United States Patent Application Publication US 2007/0281896 A1 - sequence listing, part 2

SEQ ID NO: 86 - DNA, 1494 bp, Mus musculus
gtgttttgtactcgttcgggattcaggctgtatatgagttagtgaggactgaagagaggagagttaaacaaacaagcaaacaaacaaacacacagggcaagaaaacaggacccaacagcagacgctgacaccctcccgacctgcagtgcagagtgattccaagaaccgcgcgcgacattccgtgtctcaggaaagatggtacccacactaagctcagccaagaacggcctccgcgcccgcttaattttccgaacctgttcttgtggtgctgatggggagggtggccgggaagagaggagagaccactgatcaagttgctgtttgtatattggttgattgctgtttgctgtttgtttattgattgattttttttttattggcccctggccgaggatgagctaagaagccttttgcataccttgacctgacctcacttatccttccacacttctacacccttttccttcctgcgcagggtcctgagcaggtctaaatcaagcagtgcttagagcctcccacaacgggccttcaaccatatttggaagaaaagaaggaatccagagaggaaatggttacctgtgcttacaggcggtctgcaccacaagcgctgactcagcaagagggaactctgcgtacccctgtcccgaaagccccttgagcaaggacgtcagaaagagactaaaatggagggacagcctccgagggccctggagcagggtaacatgagatctatgactatctagtcattcgctacctgcatttgaaagcatatgcattattatggttgtcaccatttatagtagtatacttagacgttgtccatcaaatctggacgcatactcaatttgaaactaaataaaacctaaaggaacataggtgaccatgagggactccagggaacattctctgggacggaactctgtgaagagtggagaagaggcctctaggatcaagctattcatcatggatacagcctcagatccaggacctccaccctctggtgcagtatttccaggatattagtgggggactgtggaccattcaagccttggaacaagtctagcccaaccactgtctaactttgctgctgacggaagcctgacccagccctgacctcgtagaccttataggaatatgttctcagctcactgctccacatttctggccctgtgacctcaccaaacaaacacctgcctatctcagagcattgtatctattcatgttgatttctgtctcttccttattagtctcttgcacaaaccatgaactggatgaaagcaagaacgggatcgtttgggttctgtgggtgacatcaggacttgactgtggacttgacttgcatctggcacagcctgctcgccagctcctgttcccttgcccacctgttctttgaccttgaaccccaacccctttttcttggcatcagtatcgtcctctctaagagcagagattaggattaataaatctatgacgtgcttgtcacagggactaatg

SEQ ID NO: 87 - protein, 57 aa, Mus musculus; identical to SEQ ID NO: 85

SEQ ID NO: 88 - DNA, 88761 bp, Mus musculus
agcagagcgcggctgcagggtgagcagcaagcagcggggagacacaaccctccgccccagtcagccaccgcgtgtgttccctctgtcgggagagcgccaatgcccgggccgacccaaacgttgtccccaaatggcgagaacaacaacgacatcatccaggataacgggactatcattcctttccggaagcacacagtgcgcggggagcggtcctacaggtactggcacgggaggctgcggacggtctgtcccgttacgtaacacggaggccgggattgcttggttgcagggtctcgtgtcggtggcgtgagcatggaggctttagcgtgtggataggtttgctgcctgcaaggggtctccctccatctctttcctgcatgccatcttcccgcatccccgaaaggacataagctctgcacttcctctcctctttcccttttagcatttaaaggaaccattaggtggcgggcactaaaggagcaaacaaaccggagaatggcgagaaagggaggatggtgaggagcgcgcttgcgcttaacctggggagcatgcaggaaaagatggaatcctctagatgaagctgcagtgtgtgatgttaaaccaccagattgatggagctttgtaagaattctgagcgctgattggtgcaaggattgacagcagaggtcacagtgtcagacattcaccaaaattctctccatagaagtctaggctgattagaaagagactggactgtttcggatctaggagaaaacaaaaaaacaaaaaaacaaaaaccggcgccgctacgcattttctgaagagttttatggtctctgcatgggtgggggagcccttctttcttatttacagtagaaggtgatgcctgatgttttgctgaggtctgatttgaggatgggaatgcattgtattgtattgtgagctttttgattaatgagttgcctgtgctgttggcatctattttgcattaacatatctggcaatatgttcccatagataagctcattaaaattgtttgcattgtttgataaggataacaatgtgatgccgagaacgtgggtcttaggcagctcaaggccagacttacagggagacagatagctttttcctctgaagttcttttgtactaaggtggttatttttaaacgtaacctttataaccatcaacgatgcttttgctttaaagtagagcacacatacctgtaagatgcatcctctcagccagtgagcaacaggaaataactcttttttaaaaaaataaaccttccatctgaatttccaaattatattatgggtggagtattctgtgttcaaattctatatgcatatcataaagtagatttcctttcctttaagtagagactccatttgttgactcaaaaagggaggggagtgttaaaagcaaccctttgccctgtcatctctggcagttatataaatacttaaagttaattttggctgtacccattaggtcaccaaggctcacgtcttatggttccaataaatagagcctgcacagcatccttaaagattacagcttgtttttctcctaatgtaagccacggctcatcctcaacttctgagactctccctcttggggatcttgcagtttgaaattctgtctcctccttaccgttctccactgggaacatccacctcaaaacctaaaaagagaatttagaaatgaacagaacaggttgctgtgctttcacgaaccgttcttagaggcgacacacttgaagtcctgtttcctaagtgactcagcccctgctctgtcagtagctgctgcccctaggatggagtacacactgtaccacgtgggccagaggaagttgcctagttggattttattactcatgtgaaccaactcaaagtggtaatggaaaactatttgacagaaggtcaaacagggctgtcttgtgaaagaaaaaaaaggcattgcttttaaatgaaactgaatttgtgtttttaacttgacttattcctcccggttattaagtgatttctgctttgcgttttgatttcctatggaggcgcctgaaattacataaaattcaaaagagaaaagcctgaattttagtaaagatctgactaggcaagcgctttactggaagcatccttgtgtttgcattttacagaacatgattgctgggtgctataggcagagatgccatggacccactgaagagagctgtctgtcctcatggtcccatttgtgctgaatgatgcacggaccacgcttggaagcagacacactggatgttccccttgctctgctctctttaaagtgaatgagcaacagagtacaactactgcgtgttttttggagagacctgagggaaggaaagaatgtgacacgtttttctgtccaggaagcattccatcattcttttggcatcccaagactggaataatgtagccatctgattgctgaggaaacttggaaggcagtttgaaagccacaatagagatttaaccaaagtaaaagtttgaccttggctgtaggcttgaggtagcactcagcaatgagatatgcctgcaagttttctgtgcagtccctgggggatccttaatgtactgaaggtcctggcaagaccagcagcaattctgctcctggctgcttccctggtacctaggtagactctagcagctcttatgtcaggctttctttcctgacattgctgcttacaatgaaggatttatgttcttttttttttttttttcattttgtgctattttgcctgcatgtatgtctatgtgccacattcattaatgccctctgaggccagaagaggctggcagattatagacagtgatagacagttgtgattacagggaattgaaccctggtcctctgtaagagcagccaatgcctttaaacggttacactatcactctaggccatgtaattttattcctcaagagatgtggagttagctgctaaagccgtgggtttcatcctcagtgcaggcatgtaggtatgtaaacaaatgctttgttactaaagtgggaggggggcattctcaggagcttagactggaatacgcctgaccttgctggcgcttcagacaagagacggtgtggacacctagaagagatgatggcctcccacgagggatgagggtgggtgcacgtgccatagatgacagccttgtctgagtgtgttctgtccgtccaccgtgtaggttctagggatcaaactcagtctctgggcttagaggctagcatctttaccaactgagccatcccccagggccaactaccatactgttcaccataaaaatgaggtgatgttctggtgtggacatcataagtcaggcatcagtgcctggagtcaaatagataacaaatcattatcaaaacccctgtgcactttaattacaacagcaagcttctcttaaaaaaaaaaaaatcagccttgtgtttaaaattacatttaaagcaatgaagtaccaaaatggcccagtaaagctgcctgcacacatttctacaactactacataagagagcatctcccggcccaagttccccattgcagttaggaatccatatattttaagagctgtttaaaaaataaatgtggtgagggccatccgaggtgacactctttaattcagagagcgaatgagtcgaggtctggactccctggagaggctactccctacagctccgctccacacagatgccggtcggaaatgagatttattaactggccttctgcccaacgcatcgttgtttgcatagtccaggcttttgagaatgagcgtatagagagggctgtctcagaatgggtgttccagctacggtagcacgtgtgtctgaatgctttaaaaaaaaaattttactcggccccaggaagtgaactgtaaagaaaagcagaagtaaagtgttagcccaaaatattcacttacaacatctggcttttggcacttttattttgttttgttttgttttgttttgtttttttaaagcaagctgttgttgggaacatagagaaatgtcccgtgtgcagatgtagaaaatgtctgattgtgaagtgtgttccagtcagtaggagctatggtaatatgcctcacgttaccagggtgtgcatttcagcgatacccctagagcagcagttacacacagcaaaggtctgaccttgcctgtctccattatctgtctgtggattagtgtcaaaggaggcttttacaaatactgggttttgtccttaatatttgacttagtgctacttaatgccgtgctgggtggctcaacgctgagtcttggtttggggtcttcctcagagcctctgtgagaggggtgtgcatgccgtgccttcggggagaagctggcctgctccgtggtgtccgtttgtggcacaggatctcagtggagctgcggcgtgagctccccctctggattcgggtttgctttccaaatgcagcatcttttctgtccctagggaccatgtaatactgaaacaaataatccctcaaaaggaaggagggacaactactgggaaagacacaaatagtccatttggatcggaaaattcagtccatatttgattgtcttctctggtcagcatctgagctaaatgccccttggagaatgttgagtgctaacaaagccagggatagaagcagctcctcctgcatcagatttacattgctgtcaatattttgcttagtcggctagcaatagtggtttgcatttcctgagcccacagtgactcaaagaaagagaagatatcttcagttttcagtgagaaaactcaagactcctaatcagcagggggcaaggacaagggaaatagccattgcctggctcagggcttctatcctgatggagaagcaaagaaagcagcaagcctcataaagggacaggaactggggtcacttcctgactggcagtctgattaaggggctaatgtatctgagccactgtgtctcgatcgatcagcaagaactgagaacagagtacctggtatatcatcagtgtgagaaatgcaggaggagggataggtgtggcccaggaaggcgatccagtcccagcatgtcatcttgatggaggtcacaagagtggcctgaaagtttaccctgtgtcatctgatcatggcttaaattttgttggtttcactttcaaggacaaataaatttgcaacccttttaggaaaaataacatttccacaatgaaatatattagactactttcaaaagctggatctggcagtgcgcagctgtaatcccaacacccaagacaggatgatcagaagttcaagggtggcttaggctatgtgagcccctatctcaacacagaaaaagaagacaatgctttcaggctatctatccttcagctgtatgactatgaaattctaatatactcagccggtatcggatgcactggtctcttatgacccggggagcacacccctctggtgttctgtaagccttacttctcaactcatctccagagtctcccttcatatcgttggcccttgctatttattactgtttggagagaattcttctcaagtggaaatcccaatccatttatgcaatgagaaattaaatgttacacaacttttgcttaatgaagcaaaattttgctagttgcatctccaaagatggactgtttaattttaatgaaaataatcagtaaggtaagactgaacaagcttttatagaccagggcaaaagaagtcttttgataaattaccaaaaaaaaaaaaaattcatgtatgtattttccatatcaagtcgccccgtgtcagttaggattttactcacttgaaccaggacagattttcttaaaggtcttttctttcttctgaagtaggagttggtgacagatatatagggtggtcgaattgatggcagcttttagtggtggtgcccctcagtgtttagctagttaagaaaatagagttcaaactcagttcctcatgtgtctacatcgagcatggttccatcaggttcagtaactggaccacaaaaatctgatttggggcatgactttggaatagaaaaggatgtaagcaagggacttaaggaggaaaaatcatttgtattcattgtgcacatgcatatggacttgtagctcatgtacagatgcacactggcagaactctgcattttcaataccaacactgttgttctgttctgaagtcattttggcatgtatgacattctatgggacagaactcgtggacatctaaattttaattatgtataggggtgcatacgaggaagtgttgtctgtaatcttggcacaagggatgcagaaaaaagaagatcttaaatttgctgccagcctaagcaacatagcaatctctctctctctctctctctctctcacacacacacacacacacacacacacacacacagaattgaccttgaggattccggtcaatacttgctgttgcctgcccaaatgataaaaagagcctcttctgaaataccttggatggtctgcaatacttcttactttgttttggttcactttaaagctgtcaattgcttgttctttatttagtgccagccagccctggcatcgctctgaggtagtcttcagagatgtcggaggcatggtgaagactctcttatgctcactcttcactctgaatatgaacactggtgttcttttcttatgagcccaccatgataactgtaagccttgtagttagtgacacacaaatcacaataaggtggcatcactgaaatgggctcctccctgccacagtccttgccactcccctcccgtcattctagggtgcccagacatgtttccagcctagaaatggtgaaacaccttaagttgccctcattgaactttacacaggtgccattatgttaatatttaaccccagtttttccctttagcaaacaaacttccttctctctgccagtctgcttatggggcccttagaatccagggtcaataatgccagcacctcactgtcagagggagggcagatgcctaggcagcagcaaggagagaagcttggtggagagatacccacacatggccccagagaagacccatgtgtctgtttcattctggggtatggctgacagtggctcatcagattctatcagacctagccagcaagccccagggagcttcccgtctccacccctttgacactgaaagtatagacatgtgctaccacaccctacttttttgtgggcgctggggatcaaactcaggttttttccttttatgacaaggacttcaccagctaagctgtttctttgcctccctgactcccacctcctattttgaaccaaggtcttatgtagtccagactggcctgaaattctccatatatttaagtctggtcttgagttccttgactttctttctatttcccaagtgctggagttacaagcatgttccattctggtccacctgcaaagaccactttaaaaaaaaaaagtttactagtttgtttgcttgttttggttttgattgtttttgagaccgggtttctctatgtagccctggctgtcctgaaattctctgggtagaccaggatggcctagaactcagagacctacctgcctctgcctccctagtgctggggttaaaggtatgtgccaccattgtccagctaagatttaaaatttgttattatgtgtctagtgtatgtgtgtttgtgtgtacatatgcctgtgtgcacatgcatacttgtggaagtcaaaggacagttttgtatggcctgttccctctttcctcctttaactgggttccagggataaacttaggtagcttggttgacacagctagtgtttccccaactgagccatcacaccagctgcataagtacggttcgtatgttagagtaccccaagtcactgatgagcagtgccccacccccatctgccctgaggtttcaaaccgagggagccaccatcgtcctaacttcatttcgctttctccagggcacactactgggttcgggggtgagtccagcctgcttagtatgctcagcgaatcttagcctaactgcacagtaatccttcatgaggattatttttcaatatcctctttgcagtttcattttcttcttgtttattgagcacctgctgtttgtcaggtgctgtgtggggtcctgacattgttcaaggacaaggaactgccatttttgtcacttctgattcgcctaatctcccattttagggcagttaaacacacacagaatgagagagagagaaagggtggaggggaggggggtgggagagagagaatgaatatcagtatctgaccctagagtaacccctagatcctgtgatgatggccaagcaggcatccatccatccactcagagcatgctttcctgcacaggcagcctcctcacccagcaggctggatgaagtctgagagcatccccagggacactgccagttaagaaacaaaggacagctttgcgtgcaataacttcactgtggacctgcccactgtctgtattgaaataaacagaccttggagtgtgtaaccagaaggactctgctagaaaaggaggaagcagatggatgcaggggtcctgggagggcagggttctcaaaggcagtatgtgaggtgtgaagaaggctcagggtttctggagccagtgtgtgtggcttccatcaccgcttgcactgtctgtctctgtctgtctatctgtctctctctctctctgctccagcagttctagagtagcaagcggtaagcagtaaatgacctaggctgggcatggccccaggccaggtagaccaagtgggcctccctgagttctcatatgagggcctagaactcaggataaatccacaagtgtctgtatttggggaactgattttcttgccctggaatttttgaaaggcacgtggcagtgactttaagatgtcccacaagcaacactgactgcttctacttccttagttcctgtgcagtttctgtccaggtttggcacgtccttccttccaaatattgtggtctgatgagatgctcagaatgcccagccagcaagccacttggggctctggcataagacagtctctgtcacagcctcactcaggacaaatgccatctgcctctttaagcatcattttcctccatacccagggagctaacagcaccaacctcacagggttgtcatgtgggactgaatgctaggaatataaagaaccctgcagttgcctggggcaaagtcagtcctggagagaatgctagttactagtttgagtctgcgactttttacctgtctttacagtctgtgatctttgtgccctaaatacctggcacaatacatgacacacagcagatgctctttaaaaaaaaatccctccgttggcctcattaagaattcataaagaaacaataagctatatctattttaagtgtatagttcagtgggtttggctatccatcacggctcccaaatttctttgtgccctctgcagcctgtgtttccactctccgcagccccaggaaccgcctgagtcactttctatcaactggtgtgaaatagaacagcgtctggctgttttgactctgtggcatgagtttgagatccatccattttggctgcatctacagttgtatagctccttcctctttcacattgagtagcactccatcatggggcactccacagtttgtttatgcactcaccagttgctaaacattggcatttccagtttgaggtggttacaggtaaagctctggtaaacattcatgtagaaatctttgtgggacatatttcatgtctctcataaatgcctaggagtgaaatgattgtgtttaactgtattgggggggggggcgcaccagagaccaacctcaagtgtttctgagggacttgcaaccttgtttttaaaagatggtctctcactagccctgaaactcacctagagggctatgctggctaaccagtgagtgccagcatctgcttgtctccacctccccagctctggaattaaaagcgtgcaccatgccaccacgcctggccctctgtgtgggtattgagaatgctggtgttcattcttgctcagcaagtgctcttaaacaacagagcccctggccccaaggtttaacatgagagcagtttctcaagagcagttgtgccatctcccattctgccagagcctttgccgacgtgtcctgtcactctgtcagatttagagcatggggcgtagaggggtttgcttgatgactgatgttgagaatctttctgtgtgcttattgactgagtactttctttaatgacatgtccaattctttagcccagttttagaagtcattatacaagaaggtggatagaagtatattttaagccaggcagtggtggcacacacctttagtcccagcactgaggaggccaaagcaggtggatctcggagttcgaggctagcctggactacagagggagttccaggacagccagggctacacagagaaaccctgtcttgaaacagaacaaaaaacaaagtatattttaaatacttaaatgtagtctgtttagattttaatgcggatgggtttttgttttacacctgcacttagatccttcaagaagaaaggctgcttctgtcctctgtccacagactgcagcagtactgcttgtcagctttttttttttaataaaaatttatatattttattgtatgtgagtacactgtagccgccttcagacacaccagaagagggcatcggatcccgttatagatggttgtgaaccaccatgtagtcactgggaattgaacttagaacctttggaagaacagtcagtgctcttaaccactgagccatctctccagtcctgcttgccagcgtttaagtgcaggctaagatgccctcgtgcagaatccctggtagcacaaccagttcccagttcccgtgtatttggatctgggctgcctccagagcccactgcaagagcatccctgctccaagactcagacacccggtcagtgccccaatatgttaggttctggagcatttggggattagggatgctcagcctgcatgcatccagtggcactatgaataggcaggaaactgtaacacaattattatggtaacttagaaaaacgactaaatctactttttcagtgccacatggaggtataggtttgggagctgttttttttttttttttcctatcctgacaggcatgcactgcccttttatttctgtggaggatactgtaattatgtagataatctctcctttatgttgtgggcccttttacaggagatcaaaggttctactattagtgttaaagagtaaaatgtgtgtagagacagtttctagtgcctttaaagccaacaaggagctatttgcctgtttgcaaaaacttgcctggagaactgaacagcgactgcccctcgtttgaaattctgcggcggacaccaccccttagtccctctgatttgagggagtgcttgtttgttttgtcctgttagggcttgagctttttccatgcctgtttacagtctgctagaacacattccctccgtatctgctgcccttcccttctcaccccacctcacctgtagtctccctttactgctagaaggtggttctctttgttctagttgggactgagccggctgcggccagtaaacaatgagtgcagagtggagacatccttttgctgtaactgggtctattctatgagaggaagctgagtactatcagacaggacatcctgtgatcccctggtcctatggtgcggacaggctttttatttaaatgctaggatggtctcctgtttcctttcctgctaagtagggagcccactgggatgactcctttctctttgaatccccaacaaacaacacactcccagaaaatcaggactcattttctcctcctccttctttcttcatctgtgtgtgtgtttttcttggaccgtcgttgaaaacattcaccactttttatgtgaacggtcatgatttaacctactaccgttttttttttttgttgccttgaaacaattaactgaacaacatgagcaatgaacagagacatttttggttttgtttttaagatttatttgttattattttttatatgcattgggtttttttctaagtgtatgtacatgtgtgaggatgctagattcccccacaagtggggttacagacaggtgtgagatgccatgtgggtgctggaaactgaactggggtccactggaggagaaggtaaatgctcttaaccactctccagcccccagaggtgttctttaaacattaatatatggctctggaattgggtcattgtgatatacctgcatacttaaatatacacacgatctgtgaagatatgaaatgtgtgcatgaggtgttaagaggaacagctgggtgttatcaaagctgttttcatgaaggctcccacaacagtctgctgtacactgggtggtttaacctttgtcctctctcctggtgaggctagatctgcactatgcctttggcagtgccatgttgccttcacaggctctaggaaagagtcttttctgtcccttcccatcctggtggcctcatatgttctgtggtctctagtttcaacactcagtccctgcttctgattatcctgcctccttcttcatctgtgtattttcttggaccatcacttaaaagtcattaggtccaccctaatccaatatcttcctctctactaattcatttgtaaagacactatttgcaaataaggtcacattctgaggttgccaatacatgggactctaggagaagggacaatcttcaactctatgtgaggagattatatgtattcattgcctgtgccgttatgtgtagaagactgtatgcatgcattgcttatgaagttatatgtagaacagtatatgtgtgcattgattgtatagttatgtgtagaagactgtatgcattgattatgtgtgagaacccattttaaagtgtgtgcttgtgaaaatgcataaagtgttctaccatacatataaaacactgggttttttgttttttgagatgaggtctcctgttgcacaggtccactgtgaacggacagtgtagccagagatggctttgaactcctaatcatcctgattctgcttcccaagtactagaattaaaggcttgcaccaccatgccaggctaattaaaagaaacttaaaaagatgaggttgtgatggagtaagaaaataatggctctttttatccatgttgggaattaaactttcagccttgtgtgtggtaggcactgagctaatccccagcctgaattatggatatttaaaatgtttaaatcttattttttttctgtattttctgctttttcttttctttatcccccttgtcatccctgggcaggggccatgctaatctgtatcgttctagttttagtatatatgctgccaaagcgagcacatttttctgctttttctatagtgcaaaaatgtgcatattttttaatgggaaaattcttttttaaaaagacattttaaaaagtaatttctttgctttatcaggttataagctatttgagcttatttaataacgtagtcttcttatcatttatgtacacatacaaacatgtgaatgaatctattggtgttttcatgaactgggtattgttgtgcttagtgtgatattgactataatagcagctaatggggagataatgaaaagtaatgtcacattgtttcaatatgacctccatgcagcctctgtgacatcagatcttgggctcaaatttgacagtcaaaatgaagttagatttattagttagtggttgaattcaagactaattttcaaaacgttttaaagtttctatgtcaaatgattcctgggactcactggaaactaggcgtggggactggatgtgactgcttccagagtgacacttttcatcagttcatattgacttcaaagttgagaaacagtaatcacacatgacctctagacccaactctagataattctgatataaaaagactattagtgtcttcattctggtaatggtaaatgagcttgttgatttaaaaacaaaaacaattttcaaatatgcaagacagtagttggtgttcttcactctgccattctctagacatgtcagtaagtagctaaccagttcttattctgtcttttaagagtcccacatcttggggctctggagacagtatggtgggtaagagcacttgtgtaaggacctgagttagaatcccctgtatccttctacaaacactggtgcatgtgtgtagtaggtaaaacattcttacattcagtagaggccacgaatcctccacattaaactactaccactataagatttctttgttcaagccacacacaccctccttccttcctcaagccaagggtcttacagtgtgtctgttattttggtgcctgatccagtttgtatgtgacatagctcctacccactcaagtgctcagtgtttgctcttccctctgaaaatttcaatgctagacacccttgctgggtatggtggaattcacacctataactaaaacaagagaaggagagcaatgaaatactgcaacgctctgtgtgtgtgagtgcacacgcatacacgcacgcgcgcgcgcacacacacacacacacacacacacacacacacacacatgcgcactcatgcatgagtatatctatgtgtgtgtactcatccaagagcatgtaaatgctgtaacttttgacctgtaagaagactgaagagagtaaagccaagaaatactgccgatctcctttcttcctccctccctgcctccctcctttccttccttccttccttccttccttccttccttccttccttccttccttccttcctcctgcttcccacctctggtatgggtgaattagtgtttctctagataattctgatatagaaaagactgctagtgtcttcgttctggtaatggtaaatgagcttgttgatttaaaaacaaaaacaatttttaaatatacaagacagtagttcttagcaagaatgttaagaagttggctgagatgtggcttagtggtaaggcacttgtctgcatgtttgaggcctttagttcaattcctagaactacaaaacaaattggaaaatatccttagtttactctttttttttttttttcctggtgctggtattttatttctttgtgtacattaggccatgaattcgtatggaatgggctccaacagctcaggctcttttccgttagtcctctttattgccaacttgcctatgagaagattcccaacgaacgactcctgggcacatcagtgcgggtgtttccagagggttttatcccaggagggaagacctaccctgaatgcggctagaaccattccccggcctggaatccccagcttgaattgaaaggggggaaagaaggaacccgttgagttcctgcatctctgctgaggggtcagttagtttgggggaagctgctgtgtgagctgacaggaagagggctcctggcttcagtactgccgcctacagcgatagccctgtgctgaaatcgtttaccttatctcagtgactgcggtcaccagcatgtctgtctgttgccatgttcaggaaatatgtcttttttttttcatatatgtaatatggactgtggtctctaggattgtggcgtgagtttgatacagattatcatgcaagaatgttcaacctgctgcctgctggtgacatgtggcccaggatagctagaatgtggctcaatgcaaaattgtaatcttacttagaacatcatgggatatttttatttatttttatttttttttatttatttggtaacctgtttgggtattgttgaccccaaactttgtagaagacagggtgaccgaggtgccagagggaagctttttcaccccagcttcgtagcattctgatccctggcttgaagttttcccttttgaccgagcctgctttggaaagaatttggagaggatggacagaagaaggactcagggaatgagagtctgttactcagtttggacttaagtttactagaatctctttaaatgttagcctgcactttaccgtctcattaatagtctgttttgtggcacttgcttttcatttcaagatgttctcacatgtttaaaaatcatttttaccataatgaaggtgcaggcatttggataaacaccagtctttgagagtgagataatcaagattatatttttaaggatatgttattctaaacacattgtcaagataccaatctaaagtcttttattagctttgggggaaaaaaaactataagcagtaatgtccatttttgctaatctaccacaaaaagtaaattgagagccttggctccaaaatacatagtaactagaaatggaaaacgtggcagatcctaaataccagcatggcttatgtgttccagctgccaggtgctcccgccagaaagcgttccttcccatcaataaccctggggaagtctcacccaaatctctactgtttggcctttcttcatgtgtttaaaaatcctggggtttaagtccaggctgaagaactgggttcagtgcctacctgcgctacaagagttcaaggctgtcccagagaactcagctgagtccaagtcccaaaataagattagaaggctgggaatatactctgaggtgtagaaggtcggaggtcacttgcctagcataccccaggtcctgggtttggtcccctgtacaaaacagctttagtagcaccccagcccggttctcactgaagaatcagtgagctttgtatcttgtccccctcctcatgcctgtctggaagggagggggctcgcatcgacaacagccatcctagaatcaccccagctccagaccccagctctgcaacctgataactgtgacctcacagaaccggtcacttttcccacatcagggcataaaagcagctgtaggacgttgctgagaggacacaaccgtgctgatgactctctcctacaggagaaatgggcactcgccaaacactgttctgtatcacctcatccggcctccgtgcctcaccatcgaaggaggtctcctgggggccacacaggtggccaagcttacccaaccaagcgggtgcccttggtcagagccctgttgagtctgctgatcagctaggagcattacacaactgacatggagaacacacattacttacccccaaactcgccgctgctgctgctgcttttttttttttaattcaaaagacaaagtccgttagtccactccgccctaatgtgttccctgcaagccgcctcacagcacatgggtatatcaggacagtggggtatagttttgagtgtcctgcagctttctcttcccctcaaaaccctccgaaacactcattcattcagcacagtcgtacagttttgtgcatgccctggagatacaacagaaaacaagacatgcactataaagttctgccggcacagatcttgcatgggggagcggggaggcaagaaggcttgctgaggagttgacattgaagctaatcctggattgtgtaatatccaggagccgggaacagaatgctgtcgagtaacaggagaggccacttcagggtgggcagggagggcatgctgaggagttgacgtggaagctggacctgaagcatgaggtgtgggtgacagtgccaagttctggaaagagcttccgtctctttgcctaagcctgtgcccctgtcgtcccttcatgatcagctgggagccgctatccatccatcacttgttcctcattaccagaaggtttagagaaggcaaactgaagatgctgacagaggagaaacagcagcacctgagccccatcccattgccacacattcttctgcttttgctttgccttctgcactgggtcttacacagggcgggtgagcagctgagcctgaccatgcagtggtacccagcgtgcctgcttcctgaaaggttaacccggggccgtgctgggtggggtgacttgggccctgacttaaaattacttgggatcctgggaaggagggaaggtcagagtggcagagaacaaggccaagcaaggctgggaaagtaaacagaaggcatatggaggagaagaagaggatatagagggagccaagaggggtaggcggggctgctgggcaaaagttggtgccctgaggagaccggccaagtcttgtggcctgggaacaagccctgggttattgggattattttcagaacatggacaaagccacccactgcttggaacagatgggtatttaggcgaatacaatcagctgcatttctgaccatatgaagagacatgcgaccactgtgcctgcatgaatgtgtgcacagagtatgcatctgaaagaccttagctactttctcactatatgaaattagctttcattcatatccctagacaaaaagcctgtttagaattctaaaattttcttatttcttgggtaagagtcaagcttctgattgatttcagggccatagatatcaacttaattctcagttaaaaatcaaaataacaaaaatgtctacctggatttgacatctaaaggattctttcctcttggtcagtaacgaaacagaggacatgctcaggagactccggatgagagcacccgttgaagttgcaggcagcagctgtctactaaaggtggagggtttgtggccaaggcaagcgatggggcctcactttgcagatagctatagagatctgtgaatttttgtcatattctaaaagtgcattttaaaggggacagggctggagagatgcttcagcaggtaaaagcgcttgctgcgcaagcacgaaaacctgagttcaaatcctaagcacctctgtaaaaagccagaccctgcaggggatggagacagatggatcactggggctctctggctccggatgatccgtgctcaatgggagaccatgtctcaaggggataaagaggacaacaggatgtctaatgacctcctctggctttcacatgcttgtaggctcatccacaggtgcgtacagtgtaaacacacacacacacacacacacacacacacacacaaatagaataaaaagtttaaagtaatgattaattatcgaagtggcaggcacccttacgttatttttctattcactctctctaggaagtagaggttatttgcaggacttagaagtttaggtgacggagctaatcagaaccctatgctcacattgatatcatcaagcagtagatgataacacaacagcctataaaggcctggagtacagccagcagccagcctctaaagctttgtcctcaaagcaccttcccgtgaaggccttttcactggtttcctttgctggttttgaaccactggtgcctaatttgaaggggaaatggtgtacttcggtgtctagtaacatgcctgatgcccaactcttccttcccatcctgctgtgaactcagctctgggctcagacctctgccacctcagaggccgcctcttcttcccaaggagtttggcttgcctcatctatctcatcccatcacagaagatacaacacgagtaaagtacgtgagtctgcccacagctgtgtagttactacacggagacagggtgaggtctgtaatctccttcctcagtcatacaccagaagatacatagaaacctcagaacaccatcttcaatgaagtgccctcttggggatgattgagtcttgtcaaggtttttctttcgatggtttttctggacccctctgcttagatttgatctctgccttggacagatctttcctcccatgcccgcacatctgggtcatgaatgaatgaagagaaaggaatgaatgagtgaatgagtaggcagtgattaaggaatgatgaatgggcatggtgtagagatattctttccttggtgaagtagcctctcagtcctgcccctcacagctcttcatttggggaatgaattatacacagatgaaaaatggatctttctggcttgaggcacacattacgcctggctctctatgaaaacccccagttcatcatgaaggatgttctgggggtttcgttctggaggagctgggccctgtgtgtgtagtcacaggcttcccacccaccttcggagaagcagactagaacctacgagagcagtgggggcttcctgcccttggctcgtcctctttttctgttattgtttgaggatttttgatttgggttttgagacagcgtctcactgtataaccccatttggcctgaaacatactctgtagaccaggcttttcctcgaactcacagatccacatactcttcagtccaagtgctgagcttaaagccatatgccgccacgcccagcttaaagccaccacgcccagctgactaagcatcttaatccttggacatagatgtacttttttaaaaaaagaatatttatggttgaagttattctaggaactataactgctaagcttaaggtcattattatatcatcaacttgataaatctttcttattttaaacatatttgtacatactaagactattcttaaaagatttaggctgttttattagaactaccctaaaaagatttttctgagtaagagccctgttacaagcttgaaacgcagcccctctccttaccttatttgcggagtgctctaacctcgacaattctaacatctttgaccagagaagagtctgatttgggatctgaatgaggcaggtgtgagtcccgcatctgtctgatggagaagaggtttggggacgacaggtgcttctctcacccaaagctgtagctgagctatcctgggtatagacctttataaggcctttacaaatcatcgtaaagtcaaatatatgagttgctcacatgaaaggaaaacaacattcattgtcttatttatcttttccagttctgctctttgtttcatttatgtgaagtggagggaaactgtattttcttagactcttggtggtgagtttcttctcccagtgatgagaggtttgctgaaaatagagattgttttaggaggagaaagatagtcataggtactgatactgtcagcaaaaactatgtgatgggatgtattggtgtaactagtcaaactttctgaacgttttatagcaaagcacgaagattccaattgagtataggctccttaagggagtgagccaagagagtaactgaagtccttcttgcctttaagaaagacttgtcaatttctacgtgtgtgtgtctgtgtgtgtgtctgtatgtgtgtgtgtgggggggggggggtgtacatgtgctgtgtgagtttttctgcactgtgtgcagggaggtggtacctttggattctagaagagcgcatcagaggccctggggctggagttagagggctgtaatcacctgaaaagggtgctgggaactgaacttgggtcctctgcagcaatggtaagcactcttaacgattgagcctttggccgtccccataatgacttttaaagatttagcttcaacgtgattggattggagcagatgcaagctaaatagggccactgtgctgagcagcaggcaaagcccactgcatacagagggctggttactctgcaaatttggggagattgtgaacacagaagttagctgttaagaatcaaaatagattccacaggcctccttcctcaaattaatttcttttttctttttttcactttttatttattctttgtgtcacattaagtaccccagtcccctcatctccccctcccctcatatccaccagtgccccttgcagcttcccgccccaaataaaacacacacacacaaacagcaacaacaaagcatagaaaaaaaaagtcactttagaagctgtagtctgtcagtgtgtcccacagtgcgtccttctgtccacacacttgcagatgttcattgcagtgaacattaatctctgcccctacatagcacggactcatacatcagacttatacttcagcagccgctcaggccagaacctcaccatagccccaggtggtggggctggacacacacaagagactactcctctctaccctgggtctccagtttgatttcactccataatgctcaatctgctccacttctctttctctcccatttgaccaccatacacttgcacattgtgatggctcctgagggcctctgggtgacagtgtccatctgtgatgcatggtgtggcagcaaactggtgtctgtggcccaaatgtgctgtgcactgaagggcgggtctctagtagcatggcagtccacagctctctgtcttcctcctcccatgctatgctgcctggatttgatttgatttgatttgatttggtttggtttatatgagtcctaggcataagagcctggccaccaagccaggcatcaaactaggataaagaaaggacagctacctgctctgcccctgactgatagaagaacaccaccacaccaaggtgtcatgtcctccacaggaggaagacgacaggcagagacctgtggattgccgtgcctatagagacccacccttcatgcagtacagatgtagaatgtctctatgcccattgccaggggtgaccaaattaacttcttaaattgctcttatgtggacaaccccaaagcaagacatagatcctggaacacctgacctatcgtgaccctgctttgagggagctgtgaaggggttgactgagagtgtggaggagaaaatggagacagtagggctgtgggggtcaatttggtggagttgggtggggcaaagagacagaacgagtgacctaagaaatcatttccgttagcaggcagcgctgacagacattttacctatctgtttacttttgaagaatgcttccccagaaatttttaaacctcgccaaattggttcttggacagacttgcgggctattttgtaattgggtttcaggacccatgacgagtaacatggtagaattcctattttggtttttccatgtttggggcttgacaaaccttaatccaggctaacttgtctcattgactcacagaaaattccatttgttttagcaaggagaaatgcaatgtctaattttatatggctcaataattgctgcaaagcataagcttgctgtgcctctctgtcctgcccatcaccaaacatcgaatgcaggagaagcaggagaagcctgcaggatgctgggtcccaggctgggcttgcttactctgaagtcagtgtccacagagaagtcagaagtgcaactgctttctgaggatagggatttctgcagttttgtttggtttttggtttttttcgagacagggattctctgtgtagccctggctgtcctggaactcactctatagactgaggaggctggcctcgaactcacagagatccccttgcctctgcctcctgaatgctgggattaaaggagtgtgccaccatgcccagcccctttttatttttgttttttcaacaaggtgtctttgctgtgactcagggctcacctattagggtttcctgactcaggctctgtccacttacctagttttcccataaggccctccgatccagcagtgccaggggctgcaggtgtgtcggagacctattaccgaagccgttggagggcggggctgataactaacgaggcttctaaagtaccacgctgctgctgtttttgttgtttgcccctcgtcttaatgagctctgtgaaaacatagagggccttatttgtgggagaataaatacaagaacagctgtcctcgggagaatgttatcatcacagacctagagggaagtgctgcttcatggctgctctggagccgtccacgtgtggtgttttgggttttttgtttttgtttggggggggggggttgtttgtttgtttgtttgttttttggtttttttgagacagggtctctctgtgtatccctggctgtcctggaactcattctgtagaccaggctggcctcgaactcagaaatccgcctgcctctgccacccaagtgctgggttgttgttttaatctcgtcttcctgccctagttggtatttgttcatcttctgtaactacggaccattttccactcagtggagtgtgcttgtccagcatggatctgtttgtttctcccctctctgtttagtttttaaatcacctggagcacactgttcatcacccttgcttggatgccacccggcacttgacagttcgccttccgccgatccattgctgggaaatgtaaaggcttcttattatcaccagcaaaatcattagaaaagtgtatcgctggccagagtggtcgatatagaaaccctgtcaaatggtccaaaatacttttaagttttgaattatttatccttactgaggctttatagaatttataaaggtggcgaaaggtgatttcattgtaaaagtaaatggttccccttagtaaaatatcctctaaagagaacagtgaaagctgttggctgaaaagcagtcgaagctttaacagaagtgtagcaaagtattcatggtcacatacccggggttcaatgctggcagattttcaggtcttcaagggaaggagaatttagagcagtgattctcaacctatggttcgtgaccccttggggggttcacatatcaaatatcttgcatatgagatagttatattatgacttataacagtagcaaaattatagttaggaaatagcaatgaaaccatgatatggctatgggtcagcacaacatgaggaactgtactaaagggttgcagcattaggaaggtgagagccactgacttggagggcgtgtgggtggcgtgtaggtggcgtgtgggtggcgtgtggtgtctgtcatgtgggtggcgtgtgggtggcacgtgactgctgttttctgtttataaactcctcgattaacacctcggagcaggaagcagattggtatcaccttgaggaaagcaaacggcttcaagtttagtgcaattgcttagtaagtatatagacctgttctataaaacctaaaactttagattttggtaatttatctagccatgtttaaaacatttattccttctgtgtcatcaaatactgtctgttacagaaagaagtcaggaccttggagaaatgactggttttaggtcataaagttactagctgagcctggaacatcttgtcataccagaaaacaaggacaactttatcaaaagaactgaaaggccagtctgaataaacacactgacactcagatatgccttttatcaatcaagatataaattgtaattgagtaaggcatatcaagtttactaaaactctgtgacctcatggttatacttcacaaagctaaaataaaagtcctgttgactacagaatattcaggacctacccactacctggaaagtgtgaagaggcaataacgacctgttctgtgttgtgtccaccatccaacctcgggctccctcagaagggattttctccataggatcatcagagatgatacattaagaacaacctacaggcaataacttagcttttggatgtaggcaaatatctcagtgtttaacagcacaacagaaggagccagacattccctgacttccagagaaagctcactcattgcaggaaggagtctttcacctcactctccaagttagggcctgtagattacatcatagggtacaggaaagcaaaggccaaggcagtattaaacgacgcccagagtgatggatgggagcatccagatttagaagcctccaaaaaaggtagcaattacatgaaagatccgaatagaagactagcatgcagttaataggaaaggagtaattccactgaggaagctcaaatccatattcaaatccatattcagatgaagacagatgatcagccgtcatggcacctgccatattaagacatgatgctcatttcagtgtactggtgctgttgggtttgttgcttaatgttttctgatgtctttgcaactaaaaggactcaatacttggcatttgctctaaaataatatgggctgtggggccagaaatgggattagcagagaggagttatggggctataattaaaataagcttggagtcgattgttgagttgattgtcactgaaacaaagtagacatgactggtttgttactctgcttcgtttcttttttgtgtatatttgctgctcaaataagacgtaatatatgtctatcatcatatatgcatataaacattctatgaaattcacagaattgcaaattttctatccatgtttaattgttacaaagaatcttatacacagctgttagaaggggcagcctctgagacactggcattttgagtacttgtaataaaggttctgtgagttaatgtgtaaaatataagcttccccgggctgaagggatggctcagtggttagaagcactagctcctcttgcagaggatccagtttagttccagcacccacactgagcactcacaaccacctgtcattcctgattcaatatccccgtctctcctctatgagcactgcactcacaaacacacacacacacacacacacacacacacacacacacgattcagcatcctcgtctatcctttgagcattatactctcacacgcacacacacagagaaacacacatacacacacacacacatgattcagcatccttgtctatcctctgagcattgcactctctctctctctctctctctctctctctctctctctctctcactcacacacacacacacacacacacaatgaaaaataaataaatcagactatgccggggcctagcaaacacataagtggatgctcacagtcagctattggatggatcacagggctcccaatggaggagctagagaaagtacccaaggagctaaagggatctgcaaccctataggtggaacaacattatgaactaaccagtaccccagagctcttgactctagctgcatatgtatcaaaagatggcctagtcggccatcactggaaagagaggcccattggatacacaaactttatatgccccagtacaggggaacgtcagggccaaaaaaatgggaatgggtgggtaaggaagtgggggggagggtatgggggacttttgggatagcattggaaatgtaattgaggaaaatatgtaataaaaaataattaaaaattaaaaaaaaaagaagtagagagcaacaaggttcccagagtttcatagaagcctcccacagttgtcccaagcagtgaaccctagagtgtgagttgtatcagtccaaagggacacagtgcttcatggacacctttgccaccctgcatgacaattctcacatttcagccttagccttgccgatgaagcagatggctggacactcagatggaaccttttctcctttcttttttaaacagtttattacctgagacttctctgaataggttacgtatatccctggggatataaaacaaaggcagggattattcatgcggtcaataaatgtgcattaagctcttgctgtggctccagtaaagtaaataaatacataaagcaaagatgtcttctgctcctggattttatatacttactacctgaggagatgctctaaataaataaataaataaataaagataaataaatcttgtttaaaaagaaacaaggttgtcatggtgtacagtgttgtaagcctgataacttaatgtcccacatagacttcaggtcaaaagtgagactctaaattctattacaaattaagaatctcagagcccaaagagtctagataggagatatgctgcagtggcgccccaggagaaatacatgaaatgtgatccagataggcagttagaaggaactgggggagagggcagcaaatggctttggtggagtcaggtctgctgcatgctacaactggtgaaacttcccactccaaacccctttccacctgcaaatgcttacctgagctaagcctggtaggtaaaccaagtaggttcacaaatcaaccatttatgacagtgaaccatatagaactttagaacaacccatgaatacacgtgtgagcttaccatgaagcgagccacagtgacacataccagtgattttagcaatgggaaatagaggcagatcactggcagttccaggccacctggagatagagaccatgtctcaaaaaagacaaggtgggtgtggcggtgcacgcctttaatccctttaattgtagaaaggtggctttccttaggagtttgagcctagtctacaaatagagttccaggacagacagcgctgttacacagagaaaccctatctcaaaataacaaaaaaataaataaaattatatatatatatatgtgtgtgtgtgtgtgtgtgtgtatatatatatatatatatatatatatatacacatatataaaacacaaaaaaaggaaatttacaattaatgagatggatgtgcctctttgagcacaatataatccaaagatacattgttttgatatttacgtgctaaggaccaacagcaggaaaatattaaaagccttgttttctgtaattaagccagcatgtttctgtaagagcagaaagctttgtatgtacatcgaaaataactgcactcaacacagtaatctcagaatgggaggcagggtgcttcaggcagtgaccttggcattgcaacggtactggggggggggggggaggagtgcgtttcgtgtgcgttcacggtgaacgctacagtgaagtctcctgacgcagcatggtccagcactgccaggaacaccttggattcattgcccgtctgattatgacctaattgtgggctgctgcacaatcaaaaacagtttactgatgcccaattttgtaccacctccctgtgccatcccaccacctgtatggaatcaggacccacatttaagaagcttggttgtaatctccaccaactatgtcctccttgattaagtgtctctggttgtcctatgctaattttttcttgtgagtaagcttattttcatctgttttatcctagttggggaatggcggtcaatgtgtattctacctcgataacccaggagactatgagcaggcatgacatcattgcatgggtcaatgacatcgtgtctctaaactacacaaaagtggaacagctctgttcaggtaagagattatccttatagggtttatgtaaagtgtttgctggcagttgaatgtgatttttatgaaccacagattatgtttgttgtaagacaaagatgtatatgtaagtataggctagaaggggagacgtggctggaagtgaaggacatacgggaggaaatgtctgagaacatctgagagcacacagccctcagatgagtgtatgaactgcttctggcttgctgtctgccacagccctctgtaatactggctcctaacctctgctccaccatcctattatcactatacataaggtgtcaaacacagtagagcttggactggtggtaaccaagtgggacattgttccaaaataaatagcactgaggtaagactccagggtggagcgtatgtctgtaacaccaagcaaataagaccatccacagtggacctcgaacctctggggctccctccatattgcccttctcagacccatcctacccattgctctcctgaagcaacgctccacaaaactcttggttctctgcagacacttcccctttggtccagcatagttttgttggcagtgccctcttctcagtgtaatctgcctcacctactatccactctgggaagacttccccagggtccgtggttttccccaaaccccaaccacccatccaggataacacctgtcatgccgtgtatgatccgagggggtaccaggagttcttaagatctggcctgtagtttactttctgtctaatgcctagcataccaccgtgcctgatacccagtagtttggtagagaatgtgtattgagttagacctctttggaaaaaaaaaaaggtaaacttcaaaagcaaagtccgagtgtgttactctgcctgtagcactctgactggaaaacaagtgtggatccttgttttggaaagacaggaataggttctccagatggaaactgtgccagagcatgtctgatctcctgggggctgctgaaatagcttccttggccctctcagtcagtgcccctgggcctggagcctaggccactgtgcttgataagcagtgccagcagtctgccccttgccttgcacttctgagaaacctcagaccactaacagtgcaattcaggtgtcccagacccatatggcaccatttgtatgctcttagtttaattttgtcttcaacaatagcatttggcaggaggaagaggtcttaatatttacttatttgtgaattcatttctgttcttgtcctagaagactttgagggcaggtaggacattaccactccaaagagaacaaatccaaatacggttgacctaagtcatttgtccttatcacgcttaggaatgctcagatttatggaggataatgtgtctcgggtatttgttttagttccttatagcttactgtgtggtgtttgattttagtggcatgctctgggaagacacacacagatcacctgcgtgtgtctctgcagactgttcctttctaacactgtatcccagctcagtaaagacttacactccacacctgatggttctctagctgcctttctcctctgtggagaggcttgcagctctccctcaaagccagtgttaaaacaaacatctattagaatgtatagaattccagctgtgcagaagtttactgggacgcatagactttggggtgtgtgtgtgtgggtgtgtgtgtgtttaatttggaagctctttacaaggatgttttattggttttctttttaaaatataaggaaggtgaaaacagtgatatcagcttttctttagtttgcacaaaatactgaaatactgctgtggtgctgtactggcttctggactttcttcctttgtctgacatctctttcttccacataaacatttttaaatggactctaaagtaaaagttgtgggctgggttggttgtagctcagtggtagaacacttgtctcctgtatacaaggctctggattcaatctgtaacatcataaatacatacatacatacatacatacatacatatatacatacataaggcacatggaaataccttgtaatacattacaaaataatgaagattactcatttcttgttattttaccccaaggatgttactttatgaccactttctttgaacattaaatctgggtcatggatccgtatgcatattgggacagcatttatttctcaaaaaaaagcaatctgtttcaaggagagcagagggctgtatccattttgtactgctggttgtttaaatccactttgaaatctcgtcatgttgaattctccttttggaacgggaggttgagccatgtgcaccaccacactggtccagcatagaaatggttcatgttgcttggtaaagtgtataggggagtgggcaggggatggtgtccctggttttgttcaagccagtttagtagccgtttccaaggtaatgctgagggagaaaggccagtatagaaacgttcctaaaagtggcttcctccgcttcaggcaccttgttgaaggagacaggaaggaaggggctgctcggaaagaagttggaaaggaacaggaaggagtttgacccaaggcagaagatagtgtctcctcctcacctttcaccccactgccacccttagcctcctctgggcactccatccccatccccattttgctatgtctggctctccacccctcggctgggtgttgatgtgaagccaggtttcccagctggcctttttctacagtctgtgcatcctctccctctccttcccactccgtcccaggacaggaagcacccacagcagataccagcaggcattccacactgacaggaccacagccaggaccatcactcagcccgtactggcactggttggtggacggctcacttattttcctgagcatctgactatttaaataaaatgccatttaagtgaaagcatttttgaaatttttaaatatttttcttgattgactttttttttttaaggtagaaaaaaatgatctgagtttgattcacgttcaatatgtgtttctccagattggttcaagctttgtgttggatcaaattcctggtattttcttattctgggtgctattgaatttggctgatgaaattgtagttgcatttacaactcttgagacatgaatagtggaagggaatacaatttatagaatgcactgggctgttcagaggtgtggccattgggcgtggaacctgaaggacaggccctcgctgctttaccctggtggtagtcattcctgtgcacggtagcaagttgtttgtgaccatttttggctgcggatctgtgcttgttaaataggttggttccagcctagtactgtgtcccctgtgcctactctcttgtgtcagcagagaagacaggttagggatgaaatcagctcagaggctaaatttagtagggctgatcttactgactctcttactgaaaccaagtaaggctagccttcagtgtcagcaggcctggcagttcacttagctttataagaccagagctttactgttttctgtaagaaagtgagccacttcataacgggactatggttacgtcacaggataatagtggaatattatctgtgcttagaggcattgtgtagagattttgtctagactggatattttttctccctaattttattcgaccagctaatttcaaaatccgtttacttggtctcagcataccaaatagttggagaaagacaaataacaaatgagatgggccatgtccaggcgtggtccggctggaaagtggcttgctgggctgggtagcatactgaagccgtcaccagttcatggctcaatccagcttagtttttgagtagacaatagatagtaaaagagggtttttcttcctttataatttgtatattttcattatcttaatacttttgttattaacgataaatatgaattggtgggattgcaggattttggtttggtttggtttggtgttttgccctgaaatgtgtgcatacacacacataggtaacattgaactgccaaataccagcatgtattcatcttgatttaccaaactagtcctaggagtttttgatgtttttgcacatatggatgtttgatcctggacatagtctccacacctccacccaccttcttgctgtacatgctcttctgaccatcagcagagctttattcgggaaacacatcttgagccctgagataaacagggtaagattattgtccttgaagccctgtccataaaagaccacagcagtaagtgtctctgaagagagatggacgcatacaaaggagaatgttaaataaatacaaagctgtgggacaaagggagtcagcagaaaagacactcatattcttaggtgtgcagggtgctcctgaatgacagagtggcggctgtttagggaacaccctagaatggccatcctcctcctagagtcaggtgggggtgcccagtgtataggagcccatgtagggtgctgcgtttgttcagtgggcagtccccccaaaccagggtagcctgtgtccctgccttcagaaacatgtttcgtcacactcggatccatgaactgcagggctgagtgaacattggttcgaagttactgtgcacatgtgagatatctcagggaacctaacttctttggaggaatgagtcaggcacacctaggtttcagaaaactgggtaggtgtcaaatgactgttggctttggcatccattcctgcatcctgttttcagcttcttcccttcgtcatggtgataagcactgttaatgaagataaattgaaacccaatagctaggagaagatggatgacctaaaatgtatactgtatatgtacttcatatacagtatgtgtatgtgtgatgtatatacatattacatatttagtgaaaagtcaaaggacacacatccatattaaacttgaaaacatcttatagcttatagaaataaacaaaaattgatgacattactagaaacataaaccaataaattgtaaattcttaataagatcacaaaaataattataggaagttatacaaagcaatatccttagttatactctgtgttttgatctcatcattttctgttacccggagaaattgctgcatgtggcagatatataatcttcacagtcctggttgaaagtcttgcaggttcgcaactgccctgtatccatgctgtctcttaagccaccaccctagatgtgtgtgcttagagaggagaggtgtgttcttcaaaagaacagtgtggactctgggagctagtgggagccctggaatacactccattgacttttgggcctgaggctctgactacagggcatagtcggcctcttaagaggatagagaagggaagccttgaagtgcctatggttttaagacttgttgacttggcaaccttagagcccctcccttgtgaccttgtctctgatttgtaacatgctcacttttatttggttttgtttgagactgtctccctatttagcttagtctggcctccaactttcaattcttctacctcatcttcccaagtgtgtccctggtgacctagtggttaggatttggtaatctcccagatatgtcgattatggacatagaagaccacacgtggcctaaaatactatgtgtatcttgtttttgttttgtcttttggtttgagttttggatattttgattagttgcttggttggttggtcggttggttggtcggtcagagcttattcttgttatgatggtgatggatggtgttttattgagacaaaatctcactcaagacaccaggttggccttgaactttgaattctcccactgcctcctacatgctgaaattataggtatacatcaccatgcctcacctacaatccttgcttatgaatcatatgaagacaatgtctattttgaaatcattcactgggtctataaaagccagtatccctacaagagaaaagtatgttccaatatactgagttagtttggattttttttctcaagatgtcagttctgtgatttgatggatatgctccttatacaacgttacttgaattcttgtttccaatttttctttttccctttcttttttcagtttaaaacctctaaagacctacaggaagaatatatatttaagggaggcctcagacagtcatttctttttacaaatgagtttgctatgacataagcacctctgtatttttctgagaagagacctgagaactggagacctctcagatgtttcccagcagatgagctgaagtgtctcgggagtgtgtgcttacccattctctgcatggcagaagtcacagatctcatcctgtcctttggctctaaagctcatgttcatatttcatatctgaaatagtctagtctttcctcacattggccttgcgtgagcaagttattcctaagaggatttcatagcctcattttaaccattttatggctttgaagaaaacagaatatctggaataattttgttgcaagcttagaccctgaacacatctatgcacatatacatatgcatccactggactcacacacatacatgtgtgcatacctgtgtgcatacatgcatatttacatacatacatatacatgtataactgcatttttacacatatacatgtgcacacatgcacacttacacacagataaatatgcatattacatactgcatccacacccataatgcatacacatatgtacactcacacattcacacatttcaaaggactcacacataccaaaggacttattcactggggcacacctgtttctttatgtttgattcaatacagtgcacttgtattgagtggctgccctgacactccctcaaaacttctctggtcccttcgttgggtgttttgttctgttttgttttgttttgtttttttgagacagggtttctctgcatagtcctggctgtcctggaactcactttgtagaccaggctggccttgaactcagaaatccgcctgcctctgcctcctgagtgctgagattaaagtcgtgcgccaccacgcccggctctctgatcccttcttgaacgtgaaaagttgaacctttttgtatccgttataaaagaacctgttgtttcaacattttaagagaatcactcctttatcacccacgtttaccatttaatttcctttttttctggttccacccaagctgcaggacctaaaccatttctttattcagattccggagatgccagccattgctagcacagcagactaatgaacctggcttcatccctagttatgttaatcacctcccatcactataacagaatacctgacagaatcaacccatttgtttaaggtttattccagctcgcagttttgatggttctagtgcatatctgattagctcaggtctttgggccagggcaaggtaacttttcatagatacagtaggtgatggagcaggtacattcaactcatgccaggcagcacaagagagaaggcaaagaggcccagcatccccagatgtcatcagagttatgtccctgctgaccaaaggagctctcacaaggacacactcctcagggttctgctgcctccccatagcgccaccctggagactaagcctttaacatgtgtgtctttcagggtcaatcaaggcccaatgataacatcagtcttagagactgtttacctgccagacagacagaacaactaactacactgcatctgttgccactgggctcccttagccagtagagtgagagttcaacgtgaagaacaaaaaaagacatctgcaaaagacgaccttggactaagctttgaagaaaaagaaattgtcagtgtctaagtattccaaagagacttttaaggttagaaagtctgaggcaggaggccagtgtggtgtgttgcctgtgcagtgtgcacatgtctgaggtgtgtgttagggcttgcagcagtatgcacagtattgctccaggtagtgagcactgtatgcaaggaaaagaaaggcttgtcttcatcttgtttaggtccttggccaagtggccatgaggatttggtaaatgcctgatagctactatgaagtggagctcaaatgttgagatggagcctcctaacatagacacagctcaagctgaggaaaggtgggtactttgagaaccatttcagtcttctgaggctctacactgtactctttactcctggagtcagcaggggttgactcagtacaagctgagcatggccagcatctgaggtccctacaaaagcagtaagatcaaacccggccaggacctgtccctcggcttgcagtctctctgccacatttctgtccagagctcttgactgttctgtcagcttatccacagaccaagcagagggagggcgagatccctggccaaggcgaggtgcccggcctttcttgctgtcagacagttctcagcactgatgagcagggcacgcctggtgacgtctgaatcgccagtcggcttcagtgtctgcaccttgtaatgatcaagtcaggcatgtccatgtcctacagcttttcagatacattttctcaccattttctatgaattacatttttgatttatagtttttcataagtgacaaagaaaaaaagaaaagtatcagatataacagctaaatgtttgggccttttagaattgcataccagggaaaattgcttaagataaccatcactctgcaggcggagtttctttccaccctgaaactattatgtaagtgtgacagacagcatgtcacctctccgtctcctcctttccaggggtgtggttcttccttggcctttaacacacatgggttttatggccacatgctgtaaccatgaaaagtatattgctgtgacattagtcccggcatagtttcctgaagtgtgtcttcagtcactgtcaggaagcttggtctctattcctgtcttctgaatgacattttgggacaattcatagaagaactttaaaaaactaaaggagccaagttttagtgaaaggacatatgtcaactttaaatataatgttagaattcactacttaaaaaacaaaaacaaaaaacccagcagaagtaatttcctgcctcttctcaaccctgtcaccctctttaaatcctctattgttgatgctttggctatctgactaaatccctaagtaagtaccatgaggccttcctgctagtttgccttccttctaatatggagttgtgctcagataacaaaatgtcctgaaacaaacctgggatgtcaataaatgagcttattattcagcagttttctgttatatagcacagtgcacagaggctctgtggtagctgctctctgttctctgtggctgctgggaccttctcccgtgccaagctgggtctgctgaactcttagcctttaggccccttttggggagctgttggggaaggtgtatccttctgtaggaagtagctgttagggatgctgttgatggtgtgacagctagtgagcttgtctgcggtgagtgacaagagtgaggagcctgtgacctgaaagaaaagggcaaaggtttccacctgtagaggggatgacaaggcacctaacccagggacaggaacctctgtaagcaaaagaatgttctgtgggactgagctggaggctcatggtggtccattcacaccactgtcttgcatgtgctcagagttccactttgagggctcccaccccttttatcattgcttcctgaccgcagtcagcaaagaacctcgaagactaaaaagcaatgctgagttagacttgaccctgtgtgtgggatgatggccagtttctctctagacttctccctgacccacttagcacatctgcatccctccacttgcacatctgcatccctgcgtttgcatatctgcatccctgcgtttattttgtacttgcagttgctttgtggttttgctgggttttctgttcttttttctgtttttctgaattttgtatttcagtgtttttctggcctttcaaacctcagttacttgccccttaaaatgagatcattttccttgggaaaaatgttttagaggccacaaattcatggaaatccacctgcctctgcctccaagtgctgggattaaaggaatgtggcaccataaccagattattggtttttcattcgccggtaagcagaggggcattccccatgtgttacctacagatgggcatttggctagaggtgacctgtcatcacagaagttaaacatggacactcatgtcttctcagattcctgcctctaagttaaacttaccttatttcagtctgtcttatagtctggaagcaacaaacaaacaaaaataggcaagcaacagagcaaagccttgtctgtggaagcgtagaggctatactagaaacaagtgtgtagaaacccttccaaacgcagggggaagacagcgccaggacggcagagcttgctagaaccttctttcttcatgacttcaataagaaaacggaatttctttccagtgggttttttatataccttcctaacttgttttaaggtttccccacctctgctcagtctggaatgttaaattctaactttagctgtggtctcagactcgggcttctgcttccagtttcaatgctgagctctatggaagccagtgacattttgtactgagcaccgcccccctccgcttcctcctcccccacccccacccccacccccctggactctgctgtggaagccaagtgtcactgcatgaggcaggatatgtttagtaaaatttgatgagcatgttgcctgtacggaaattgcacatcagtaattgggcatgaaactaagtacctaggactggctcagtcctagtaggtaaaaattctgctaatgtttccaaccaacagtcttactctttagctgccatgttatggtggttggataagccactacaaatagacagttgagcctagtgctggggttagtgagcctgacgtggatgctctggcttcaatacactatcttattggtgagtttctgggaaagttgcttttccaagtaatacttaaacagcagtccttgttcatattgtaagcctccagctgttgtacgctctctgtgtctctccaaagtttaccttttaataaagatatccatcctacatctcagccaaggactctttggagtttgatttctactgccctgaaattcccatttggaagagtgaggaagcgttctgtctcccatgacacaggtagccctttaatcaactcagagcatccactgactgtcccatgtaattagattctttacagtcaggctagctgtgagtagtgctctacaggtctatgtgttggggaacagtgggtaggaatgtatgtttacatttgtgtgaaagtgtgggtccatactcaaggatgcacattcatgtgtttgtgtgtgcataggtcagaggtcagccttggatgtcttcttctatttgttcctggtgttattttttgatgcagggtctcttactgaacctggggagcccactgattggctagactggcaggccaatgagcttcatccactttcttttttgagacagggtctttcactaggattggaactcaccatcagctaggctagctggtcattagttccaggaatatgctcttactgcctcccagcaccgggaatacactctcacgtcatggtaccctgctttttacataggttctagggattaaactctggtccttgtgattggcacttactgactgagctgtctcctcagcttcacaactgaactcttaaagtgtgtgttgtgtgtgtgtgtctgtctgtgtatgtgtatagaggtttctgctgactgctggaaatagaaccccatgttttgcagtatcactttcctctttagtcggccctgattttccacaggacacttcctccaataggaggtttgggctttggtggcagatgtgtcctacagaagcatcggttgcaagagtgaccaggcaaatacaaagagacagtaggcctctgtgcttgtggtgtgccaagtctcaaatccatcatgctccattaggaaagtgatttaattgtcaatatgtgactgctgaggtggcagaaaacagttacgttgttaagttatgagactatcaggagctcagaaaggagtgtatagaaataagtcaccagagaggaaaggagctggtactgtccccaggagcatgcagcacacaaggggcctctctgacataaaccacaacaaaagatggtgatgtcagaagtaactaacgtgctagtgagaacctgagacatgaccaggtggctctaattagcagagaacctcaagtagcctttgaatgagaagttggtggcagcctgagaatcagatcatcatctgagattagagctgagcactctatccaacgttgatgttgtgcacataagaaaattgttgactcagagggtgtgatagcatgtccaacctattcaaggtggggaaggctctggagccaaggctccacttctcttccctcgcccacattctcctggatagatgcttaagaaaatgtggtgggatagtttcctttatttctagctatttctgactcttgttgcctttcctaacttgaggaacacattgtgctgatggcttctgagggcagcacattataatcagccacttggtggacatagcatcctcccctttgattgcattgactcatcttgcatttattctttcaaagtttatcttttatgttctctgaagacttggtctcatagtctttaaaaaagagaaccaccaaatcttaaaaggacatctagcagctcttgtactgcctcactggggattttgataacatttccatttgctgtttcccagccctggccgccgttcagcctctgaccctcctcattcattaaccaagaagttgctggaatcttctgaattcaaatactgtattaaatgtatgcttaggtacaaaaaggaccaacactgtctcttagaaggtaaagcacacacaagcacaagctaatatagaaccagagcgaggtcataaggagtggaggagggctacctcagatggtgctgtgaaggagggccacctccaatggtggaggtgaaagaggctctctgagacagtgccttctgcactttggtctgaaggaagcagagattctaagtggccccagggtgtacaggacctaatgcagagccaggaacagcagagaagcctgcagtgaaaggagtttccttaggggaagccttgggaaagtgaggtagaactgtaacctctgggcatggtgcaccagagaaggagtctgagtcttacagtggcttcataaaaagccaccatgatgttcctacagtgtcatccacgttcagtcggagaagctttgacacagtgtgttaaaagtgggattcaagggaaacagaccatgtcatatccaggataaggaaattaacctagacccatggacctgagagtgaaccttctgatggctgacttcccaacagaggcagtagtttctgactgttccagctaggtagtatctatttgttttgggttttcgttttgttttttgtttgatttctctgtgtagccctagatgttctggaattagctctgtagactaggctggcctggaactcagagatctgatctacttgcctctgctttctgagcattataggtgtgcacaactggcccttctaaataaatgaggcagtactttttctttctaattaagggagaaaatttggaatatcaagaatgagggccaaatgccattaagaggttgagtagaacgacaagaaagagcggttgattctataacatcacattgcagacagtcagtacgaccagaatgtaagactgaacgacagttgctagccatcgagtagaattagcccaggaagcagtaggagtggggacaggagaaagagggtccactctgtttcacaagctcagtggtggtgtgaagctgagaaagttgttttttgttgggcacaggacttgaggaactaagatggggaggggaagagatgacccacgtcccaccagagctcagggcactgagcaggcagacatgttgggcatctagctgtgggaagccatgagaccccaggccggtatagggaaggcgcagtccggggtccctaggtctcacagaggccagggactacaggttctagctcctaggcatcgaaggatgtctctggatactgcagaagtgctgagatcaggtgcctcccccgcccccgggatggcagtactctttctatatcagttcctacagggcagttactcttctgttccaatgcccgtacggctgtgaaacatggaggaaggccaggaaagctcaggccacacaggtgggaaatcatgccgtcagtgttccaactgaactatttatttgtgtcctcagtgcttaagcttctcaaaatgatgaaatgcattccagcttaaccttccagtgtaaaggaaccatggtaaggaggtaggttgtacacagagcagcagagagctcgctggaaaatacgctcatcaaatcctaactgtgtgtgaatataatccagcactgcagtgaaggctcgaccactggggattgattattccagaagtgcagagttcagacgtagaaaatcaatggatatgattgatcatattgacaaactaaaggaaaaatattttcctgtttgtaaaaatagtagttgataaaattcagtgaaacttaattgctagtaaaatttaagagtatttccttagtattaaacatgtgtggctagtaacagatttgggagaagaacacattttgtgtgtgtgtgtgtgtgtgtgtgtgtgtgtgtgtgtgtgtgtgtgctgtttttgttgttggttgggtggtggccatggtgtgttttctttcttttattttctttcctttttttgacaatgtttctctgtgtagccctggctatcctggaactcactttatgcaccaggctggactcacttcaaagatctgcctacctctgcctcctgaatggctggcattaaaggcgaatgccaccagttcctgactggaacacagaatattctgattaagtttcaagcttacattcccaccagcagtgtataagagttctcttctgggcatcttctactgcatttgttagtatttatttacttaatgcttatattttttttaaaacttaatgtggttgaatttgcatttctctggtggccttgaagttgagcatttttcgtatacttattgtccacttgtactttacttgtgagaactggctgcttgtttctctggcccattcactgggttgcgttgctcgttcagcgctacagatcatcttctacccactgaagagaaaactaacatccaagaagtcataggagaggacagaccgtgctagaatagtcgctaagcaaatgaggacggcaggaattagtacacacctttcacagattactgactgctaatggtttcacccctccagtcagaatacagattagcaaatgactaagaacaggattctcaagaagtgtacctgaccttcacagacgaacagccttaagatgaggggctgataaagcacgtaaaactagaaggtgcatgagtgtcattgtctagtacctaacaaaataaacttcaaatacaatttagccaaatatacttttttaaaatgcttactattaaggaaactacatagaaaaaataattttaagcatgcacaccaaacatagtgaataaaacaaactgcagatgtgaacacataaattaatgacaacacagtaacaagggcataatctgtgggggggagggggaccactagggattcagccccatggccttgtgggtaatcagcagaagctgtactgcccagctacatcctagccccaggggatttacttttggtttcaaaacttactatggacttagagtgatggcgataatgtgtgttactggctagacgtgtagatcgagtagtcttgaaagtcaagaagaaaaagggttaagtaactataagctaattaaatttcagtaagagagctaggacaaatgttgattgagtagtttctacaaaagtgggtgggaggaggctggagatatggctcagtggttaagagtatttttggtttgcaaaggacctgggttctactcttctcacccacatggtgactcacagctatccagtcccagctgatccggggctctttgctgacctacatggatagatgtatattcaagcaaaacacccataccctcccccaaataaataaataaataaatcactttttaaatttatgaatggtcctgggataaaatattcacatgcacaatgatgaaacgttagcctcaccctatctacaagagtcagctcaaaaattgatcataaacctgaagcaacaactaaaatcatgaagcctttggaagaaagaattgggtacagatgttcccgaccttgggttggggcaggctgctgtttcttaaccatggcaacaaaagcacaagtgatagataaagggttaaattggattagttcagaactgaaagcatgcactaaaggggacactgtctgaaagagtccataccagcaagacagggagtatttggagtatttgcaaaccatgtacatgtctgataagggaactgtgtctggaaaatagaattcccacaactcaacaaaagcatacctcagtttagacacaggtaaaggatttgcaaagaagcctctaaagacggtctacagtggcccagaagcgctttaggaaggtgttcagcaccattagtaattagtgaaatccatctgaggcagcagccgcacccgttaggacatccaggatcagacagcagacagtactcagggtcaagttgaattctatggacagtgctggtgggaaagtaagatggtgtgccggccttggaaaatagatgggcacgtcttaaggatgtttgtcacagacacaccccaggactcagcagaaactccaccttacagccagtgaagacatatgccactcaagagcttacaaacattcttaccagctttactcagtggtcctcaaattgcccagatgcccactaactagtggatggattgataaaacgggatgtacttatatagtgagatatcggccataaaaaggattagagggcgagtgaacccggaaaggcttttctgaggaaaaggcccaagctcagtgatcataaagcctgatcccctctaagggaagtctgggggaaaggcagatactcagaagctagaggagcagttgccagtgcgccggggatggaacagagaaaatggctgccagtggctatgaagtctgtgtgtggtgttaaaaatctggaattagcgacctggtattggatttacagtcctatgaatgtgaatatactgaaacccactgacgaaaatgtacattttaaaaggttgagtatatgaattatattgaatatttttaaagggctattttctgtatgccttttaaattcaaaactgaaatggaaagaataaatgaatgactaccttttttgaatttttgaaagaggttttttgaatttttgaaagagctgctgctcatttcgcttgttttgtttgttttgtggggcttctttagttttgtgtttttcaagacagggtttctctgtagccctggttgtcctgaaacttgtcctgtagaccaggctgatcttgaactcagagacccacctgcttcccccacccaagactaaggtgctaggattcaggacgagcaccaccagcacccagcgagagaggagaggtcataacacacaggatccattaaacagagcatagattttggataaccaagaaaaccagacgatcgcggggacacatttaaaccacacagttcacagtctaaaatcacacctttaaaaatacaataagtgaggatgaatattaaatatacaaaaatagagatctactaaaaatattcatttttaatttttaccacaatttttttttgtttgtttgtctttttgtcttttgtttttcgagacaaggtttctctgtatatccctggctgtcttggaactcactttgtagaccaggctggcctcgaactcagaaatccacctgcctccgcctcctgagtgctgggattaaaggcgtgtgccatagcaataatattaatgacggcaatacagctttctagttgtataaacaaattgcttgtatgttacgtgttgtgacaaagaaaaatggcttccatagatgaggaaataaaagagcccccagcacattgcactagggaagtaaccatagtaaagagttcttctcccactggggaccaacacaggtggtgtcagacctggctgacatatcaaacattacagaaaccttggcaagcttatagagaaaagcatttctagggaagacgctgggtggcgtggcatcctgggaaagccaaggtcagagctggaggaacctccttgtgccggggataatagaccagccaactccattcttcacttcacgatgctctaggcacactgctgccacaactcccctgtctctgcgtttctctccctccatttgatggaggcagaaatgtgcacagcagagccctggtcgagcaccttcaatgttagtgtggaggcaggaaaagaaggcttgcctacattctgcttctgagatatgaagcagggccctgaagcatctccccagtaagaaggtccccaaatgcagaggaatcaaaaaacgacagattcccactaacatttggaatgactaaaattagaaccatactttctatcacaaaccaaaataaattccacatggatccagaattcgaatgtaaaactggagatcataaaagcatttacagaaactatgcatgaatatttatgggatgttggttgagggaagttgctaagcatgatgtaaataccagaatgccattaaaatgtttgatagagaatattgagtgacccagaaaacagcctggggtgtggtgcagtgcttgcatagcacccacaggccctgggtttgattcccagcaccacagaaacaagcgtgtatgtaaaaatagatatgattgcatcttaaaagcatcatcacattttagcaaaaataaataaatgtataaccctacctctgaaaaaatcagaatggcatatgctggaatacaagcacgggtttgttacctcttggtgatggttattagagatggtgacaaggtttttttctaactttcctccccccaccctctaaaatcattgctcattttttaatttggaaagtgaaggatttggatgtctggatgagaatatgtagcatctgggtctccagaggcaaatttaatgctaacctccaacaaaatgaggataactttgcagagtgggtcagagacagtgtttcctgtgcccacctgtgtgattacactgtgttggcctgtgctcatccggtggcactcttaaaaggaggactagctgactgaagccctctcccgcaagtctgatgtttcctcttccctccccagcatggtgttttgggtttggatttgctatgccttcctcgtctcgtttttttaagagaagccatctgcctcaggagaaatgcttaattcatggtgttggcatctaagggaaagccagacgcctttgtttcatttcttcattgccttacctacaaagaacgagctgccctggcatttctggttccacggcctttagattcctagtgttttgtctcctcttctctgcagctgcatctcggctgaggatatggtataagacacagtggtgccctagccaaaggggagtctccctctggaaagacaaggtctccagaaactttgatggtaaataggagggaggcccttcatggtccagaaagactaatcaatagcatgtcagaaatagagcaagtgacctgtagacggcagagaaaggaaaacgtgccattctacttggtcccgctcttggcacacagttgtgcttcctgtgaggtgggggacttgtgacagcttcgagtgttaaatgtccttagtcttccccattcaggtaaaagccaagtaattgccgtctttgctggggttttatttcttactgagattggcacgtttcaatatttcaatagttcttccttcatgtttaaaagtaaaaaccttgctaaacagactgtccttggaggtcccattgaacatttcagcatgactgaatatctgcatcttttcaggagatccctggcttcgtcctgtctgctcacgacggaagcctgttgctcttgggctggagtgaggttagcatgcagctgcttctgctgttagtgatacacttagtgatacagtttccagccgagttactttgcaagatggccataaaacagcatgagcatatgtatttgggcctcgcaccccataagagcctgtgtactgccctgatggttacatggtctgtgcttttccttcttaagttgacttggatgacagagagcaggacactagctagatagaagggcaaggacatgtccctttcctctgacagaagcagcaaggatcgttcataacacaactgctttggcatcctcggaggatcccacatgttggtcatgggaactaaagacatggtggctgacaaagaagtgacggatgttgtactgttgagacatggcctcttccctctggtccccaacccgtgctgtccagagggtgtaatggtataaggcgcatgtgtggaggatctgtgctctgtatcacggtgcttgtactcctgactgctgtcacacctgagtacagccagactgacctgtccctctttttgcctcttctaggagcagcctattgccagttcatggacatgctcttcccgggctgtattagtttgaagaaagtaaaattccaagcaaagttggagcatgagtatattcacaactttaaacttctgcaagcatcctttaaacggatgaatgttgataaggtaagaggcttgttaatatccctgtcatgtactctttaaaattgcctttaatattttattatttttgaaccatgtgtatgtgcgttcatatgtgggtctgtgtgtgtaagagcagtgcctgcaaagcccttaagaggttatgggactctgcaggagtcagttacacgtgactgagagccatccagtatgggtgctgggaactgaactccagtcctctgaaacagtactacagctaccttagccatctatccagcacccttaagtactttgcaatcaaaacatgatcaagtctaagaacacatccatggggatatacttagatgactcccttggggcagggcagggcggggcggggggcagggagggggagaggctgcacaaacacaaacaactgctctgagttcctgtgtacatgtgagattttagtttttaaaaatccttaaccctgcagccatttgacaaacttcttagcatgttatagtgggttgttagcgtctcagggctacaaatgaagtcttctgtttaccagatgcctctggagttctctgggtattctgttcctttggaaaaacaacttgttaacacggggacccagcatgggtatgactctcagttcccagactgaagcaagtaatttacatttgctaatggtctaaatgggctcctctgcagaagaggactaggaccctccttccttgtggttaagttaccagggagatgcaggcaacagtggccagcatagtgcatcccttagactccagccttcctgaatggtgcttttctccttcagattataattttaccctagagtgtgacacagatggaaatcttttgtgcccacttcctacggggctaagacccactggtctctccaggagtgctggcttttatccagatgttcacttactaataagtgttcattatttagggtttctctctcataatgagtatgactggctgtatctcttagaatgaattagcataacaaggcaagaattgtaaacaaggaattataaacaaggggaaagagataaactagcagagaagaaacataactctttgaaaaacacgtattaataaaaggagtaaataggctacaggataaaaaacagatactaggttataagagatgaaagctagaggaaagtttaataatttaatacaattcactgcttccctaagtaagaagcattcttaccagaatgtcaagaaaatctggcttctttctcagaattgatattgtatattgtatgctcttagccagccagggtagttccagctgctctgaagtctgaggcaggaggattgctcaggcctaagagtttgagaacatcttggacaacacatgcaacactgctatttcaaatcaaaaagaaaagaaacagaaaatatgtttctgaaaaatcttaacttttattcctttctgctgtgtctaatttccaggcaactcttccccaccacacccagctgtgcaggctctccttacttttaggaaacacctcttttctttgccctttaagtcgactcttgtacattcaaaaggagaaacagcggtacgtaggtttctggctggagcttgctgtaaatccaatcagagagctttgtgtgtctttctattagtggacacacagaggacggaagagctaagaatgttgagaaacaagtttgcagtgggaggagactgacctcccagccaacaagatgctagcataggactgtcaaatccctagagagacacagtatcatgtacctatcatgtctgctacagggcttggttttccccaaaaccaggaacacacaattaagtggagaagtaagagctgctgcataacaccattgtgtgaagttcccacacataggcagcaaattgcttcagtcgttcatgaaggcattgtgctagaggtcacttaccagtcagtctctttgaaagcaagcagtaagactcagaaggcaactgcaataaagtacacagcgagggcagggaagtatggatggggcgggaatccttcctcgagggttcaagggaagtgagaggaggggacacagcagcaccaggaccagctgcagcagctcgatgaaaaatgacccttccagaaacttctttattgtgttctgcacctctgttggttcctatcacagctgcactttaacaaatatctttggaaaatatattattgatgatttatctgagcatgtagcctgggtgcttcgcttgattttttttcccaagttatggttgattctgttctctctctctctatttttaattctttcctttacctccatgactataattgtatcgtttcccccttccctttcttccaaaccctcctgtatgcacccctccttgctctctttcaaatgtatggcctcttttttcattaattgttgttcatggtaccagaaagtaccatgccagcttccagagggagaaaagggacactagccctgcatggtgacctaagactgtagtagtggcaccatacttggaggtaaccacagctctctagttggagttttgaccctcttcacaataggaaaatcatacctggtacaggaaacctagctaactacccagggctagtaaagtcatggatcatggaggggcacccacagactgttttctgttctctttaatgtggccctgttggtatttatggcatatggtttccaaggtagcagttagtgtcttctgtctccattcatgcggtccttctactgtttctattcctgtggtcctcctacaaagccttgcttcctgtgcactgggcttctgtctgaatcgtgcatgtgtacatgtgcatcctgagtcacaacttggtgcatcactctctcatcattcccatacaatagtcacccagtgacagaggaagtaaaaatccagtaattgtgcaatgtgggaatatggtaccattccatttcctttaataaaagaaacagcgacccactgaattacagctcagtactcaagtccctcctgtgtcctttgtcataatcccggaggttcctgtgagcgttagcagggaatcatggctgactctgggttctggtggaaagcttactctgagaagctgatgtgcacgtcatgggccttcctcgtatgcttccaggactctcttactgagcatctccctctccgtgtctgcactgccatggagccctggctgtgcttctcagttgctctttcctgggccctgtactatgttagttgggatgcttgtctacattttaatgagctctgcgccatgtgtcccattacctgtttttgctgagctgcccctggttcgtgtgccctgtccggtagcattattcctttatctcaatacagctgggccaagaaataggaacacacttcaacttggaaacagtacaacatcccaggcctggtattttgtggagagattgcataactatatatatgtcccatatatgagataagtccctctatttgtggtttgttgttttctggttttgtttgttggcttttttgagatgcgatcttactatgtacctctgtttgctctcaaactcataatcttgccatagtctctcaagtggattacaggaatgtgctaccgccagacctggcaggccaccccccatcttgacagctaagggtggccctatttcagttgttcagggaatactcaggtttacaggataatccactctggggctttttggttggtggtagtgtggtaagtttttgtttgtttgtttgtttgtttgttgttgttgttctctgttgttgctttgttttgtttttaccaagtctttaaatagttaaaagttgtgttaattgtagaatactgctgagaagccaggaaaacaatgggtggtcaataacttcaggcagtggggcccgaggaacactcagtagttgagagtgcctgcgactctcacataggatgctggttcagttcccagccccactatctgatggctacagaggatcgtacccagcgacctcttctggcctcagcaggcactgcacacacatggtgcacatacatgcacataaataaaactttaaaatttttgcttacaaaaaaaaaattgcaagcaagcaattcttaggatacaattgcataaaacttcaagctaacctgaggcttgtgactcacttggtgacctgatgttgcaggtaatcccagtggagaagctggtgaaagggcgtttccaagacaacctggattttattcagtggtttaagaagttctacgatgctaactatgacgggaaggagtacgatcctgttgaggcccgacaagggcaagatgcaattcctccccctgaccctggtgaacagatcttcaacctgcccaagaagtcgcaccatgcaaactcccccacagcaggtatgtttcgaggacatctgtccttctcctcataggaaatggctccgactctctgtgcttcagtctatgcttgtgactgacagtattttcatgcctttggatggttctcagtattgtctgtgtgaccatgctgatctttctgtgacccacttgtcatgagtctaatgatctgcacttcagatattaaaaaggcacagccgtacatgctgtctctgtagctgcctattaagataataacctgaggatagatttcttttactcttaattttcctgaaattttttgagtagtttgtttagatttacatcaaaatatttcaagtgcttaattgccggcaaggcagatcatcatatgaactgacatactgctcagcatgggtcattttatagagatgttcaaaggaaatcagtgagcggtttgtatgttactacagacacttcatttatcctgagtccttgtcctcaaaattgaaactattgaggatacatacctagaacttttaggaatattttaacttttgtggatttaaaaacaaaaaacaaagctctaaaatatcttagaaatatccttgccataagcagccaactctactagacgacatacgttgttgtgaagtgaggtcattattatacacactggttgtgcgctagacggttactgctgaaatgtctgaaacttactttctgtcacaaatgcagaacccactgttcaagcctattatgatatagcttttcatctctgcccatcctaccatagtcagtatggtgagatatggttggtagtaggtatcggtagctctctggtcatactttagcttcctacttagaaaccttttgccttttatgtctgtctgaattcatagctatatgccaaataagctgtaccccttggaaatcttacatcttcaaaagatttctcacataatttgtttttaaaaaaaatattgttagaggtgacaagatcagggtatatacttgcccagtctgttagatgaggtcttcctcatgtggaatcagaagaaaaagaatacatatctctaagagatatttgggaattagctggattgggctgtggtaatgggtggatcctggagtgagcaagcaagctgccaagtgtgacttcctggcttgtctcccacacttggaaggatgaggctatcatttagtaagtgctgaaagagagctagaattgagaagacacagtgtttattttaacaaactgagtttcaggtttctttgcagcatccaaaagatgatctgaataaccattgtgtgtgtgtgtgtgtgtgtgtgtgtgtgtgtgtgtgtgtgtgtgtgtgcctgcccccatgcactcacaggcacacaagcaggagtgtgcctatacacttgtgagtgttgcgtacagtgaatctggaagtgaatacagagtgataaggggagggtgcctttaggaattcctaacaattgccgagtaaagaagaagaaacgtccccggaatgcagagaagatgccaaaaagctaggaggaggctaaggagtggctttcagggaagcagaaggaaggaggcagagtgacccacagtgtctaactccaccgaggagtcaggagagcgaggcctggagtcgtcccttggatcgctcaggatcactcatgagatgaggcctgggctggggaatgagttggataaaggactctgcgtcagtatccaagtccaggtttggaatgaatgggcctcgccactgaagagcgctgaactctgaactttgggagttagacacctgtgaagggaagaggctttttttagaaggatgagcacagacaagaaagtcaagagaactgacgtcattagtagtgcgtggaatggacaggcctagattattattctttcttccacaatcataccgtgaccttaattcttttgcctcagctccagctcttgccttccaagcagagctgcagtctgttgccttgtccccattttccaagaattccctcatctgtgtctcacagaacaaacagtaggaagtttctagaaagagggtcatgaatattaattgcagaaatacgacgtacagtgaaacttgaaaatagtatgtagagagctgactcctacgacttgattaataatctctcagggaaccggtgccctgagatggtgggccccgtggtctgcatggtgccactgaacaaggccaggaggggtgtggagcagaagcaaagggaggggctggatgaagaaagccatggggagactggaagacaaaatgtcgtcagcatccttcagagctggagcggagccggtgctggccggatgtcctccccggggctgggatcgagagacctgtgaagtgagaggaactcgggcaagaacccaaggcaggctgctcttgccctctctaatgtcagcttctgtggctgttactgatggacaggttggctttgaaaccaactgcattttttttctttaattctaataataaacctcaggatatttttctccctcaattgtaactcttctttacctttctttcttttttttaaccttctaacacttctgctctttcacccagaactagactaccctgccatccctctcacagaacccacagaggaacttgtcctttttgatgaaataccatgaacctgagaaagaagtgagtgataaaacgtaggggacatactgaaatcaacagttgataaatttgatttttttgaatgtcccagaaggcagtggtttctgattctgctcctgtaccttgatggtgtttactttgttgctcttacttggggaggaatggtattttcaggaatgcaagttaatcacccctctttaatcaaatgtgtcctgaatattagacattgtgaggcagtaaaactttactggagaaaaattaccacaagacatacatcacattcaggacacggtttttaaggaccactgttggagaaaggcccctggaaatacacaagggcctgacttgtttcaaagtcctacattcagacaatgggaacaaagccaagaaaacataaatcaaaatgctttccaaatgtcaggagaggttctgtaaacctgtgaatagaatcctgtgctttagtccaggtttctagggacttttcagaatctgttcctctttgaccgagacgtgtgtattataggaaatgggactacattgtattgagagcatcatcatattacagagatggtctgttcctggtagtgacgtattaagagatacgtaggtaccaaagcacagaaagcagggaaagatttaagagtcttaaggtgggaagtttatcagagtctgcagcctggcttcatgcttcagatccagctgcgcatgagtcccacatgtgtgagtttgaatgtgatgtagtaggtctcagggttctctcaaaattctctattcagaacactgacccacaatctctatgcagtctttttaaaaaactgatttatttattgtatcttcagacacacaccagaagaggatatcagaccccattacagatggttgtgagccaccacgtggttgctgggaattgaactcaggacctttggaaaaatagtcagtgctcttgagcgctgagccatctctccagccctataatgcagtcttgatgtatatggtatgagttgtccttcacgcaagaccacaaatgatacaggcaatcaaaaggtttcaatatgaaaacataatgatcgctggatattacagacctagaaccagacgtttgattatttgtatccatggaaacatgtaatggcttgtctagttgaaagcaggatgggggtagcatgttggaatacttgattaactttgcactggatgaatctctcctcacagatatgcctcaggctgatttaacttgcatgtctggcagcttcaaagcatcttgtgtgagtgacaaagggacgagattagagtaggaaagtgatatggagtgtgacgtccgttcagtaatgatagagagacccctgtctgtgctaacaaggaagggaatcctgcttctgcagcgtctgtgcggtgtggaccagagaaggtttcctgttcagcaccgatgctctccgcacatttggtgcattctctgtcattcaatgcagataaaagctttttctcctatggcctcaaagaagcataaagttgcttggtatctgtataggtgggcaacttacctccactataatcaacttcaatataaacaggtttcctgtcagggtgaatagctgccaagtaacatcaattctgactgaattctgaggaattgtggtgtcacagtttttaacctgccacccacagccgtgcatttaaatgcacacatcacagtgataactgtcagttaggtgtctataccctcgggaatcctgatgtttataagtgtagttaccctgatccaacttgcgattccatagctgttgagagagataggctttatgtgtgaagatttacaaaacttaaaaggaaattcagcattgtggttgctatagcaacagaagctcagacacattgtagattcacatacgctaatgtatttaaatcagactcccaaatataaatatagttagatagatttagagttgctatgggaattgagctttctctctttccttcgagaccagtcttaaaatcaggttaggaagaaatgctgttagttccaaaacagaatgtacccagacagtgtcaactgggtatcgaaataatcttcattgaacccctaagtgtagattttagtaaaccctaatagtattttttaaaactgtattgaacattgaatgtccccactgagttgctccaagctgttggttccattttaaaatgtgactgtgtttctccatctgtttgctgagcaatgtacaagcattgcttgaacgtctaaaatttaggtagacatcatctctcaccttcttttaggaaaagaaaagtcgctgtacttctttgtgtttttaatgttagttttgtttcttaagaaacatagtgccaagtgtagtgatacacgcctttaatcccagcactcgagtggcagaggcaggcagacctttgtgaatttgaggccagcctggtctacagactaagttccaggacagctagggctacaaagagatacaataatcacagtgggggttttatagttgttttgaggtttttacctcatcctggtcttagttttatagttcagaatgagtcccttttaaagtactacacgtatttgaaaagaataaactcttcatttgaacagtgctttgcaaatatgtaaaaccaaagagtttgacagtatgcttcagagtctccatagtttaatggaagggacttgtctttcccaaataactgttgcagaaataatttttagtctttctaaattgggtgtgaaattgtgtgtgcctccctttaattacttctggctttgatttctgtttttggagagtcttttactagtgcatatatatttatgattaagttatcctgttgaattgaacttataatttccaaactactctttgtcttaagaacagtgataaagacaatatagcctccactacttttttatatttatggtttgagtggtttttaaaaaaagatttatttgttatttatatgagtacactgtagctatcttcagacacaacagaagagggcatcagatcccattacagatggttgtaagccaccatgtggttgctgggaattgaactcaggacctttggaagagtgatcagtgctcttaaccactgagccatctctccagcccttgaatggtttttaatgaggtaaatatccttatttattaaaaacccacctatctgtgtctttataggtaaagtgtgttttaaaccatcatataactgggccctgccttttaactcactttggtaatctctgccttttggagtgattagtccatttatatttagtgttactagtggtttttcttgatttaaatctatcaaattattattaatttcttgtttgtttctctgttactaaaaagtttcgttctttattttgccgtattcattttcttcctttctgcacatttgagtcccatccctattctttaaactgaagagctgttagcattccttacagtgaaacgctgttcagcttctcgttctctgtaaaggtacttactgcgtattcatccctcgtgtgtgcgctgatgaagccctccagcattctagtgttttaaagatcctgtggcctctacataagcatgcgagacttggacaccctttcctcaagcttttctcccgaactttggttttctgttctgcgatgcctgaccatgatcacgtaatctggagtgttttacctgtctggagtgttttacctgtcctcactctctaagtcaggaaagcaccataaacatcttgtcaaataatagtgttgctctcagcccctccccccacaccattctattccatggccagtgcatactaagacacagctatattgctaagctgcatgtggttatcccttagctatgtaaaggcctagaaaaagatttaaggagattctctaatggctcagataattaaattccaagagggaaccccctgctctctattaggaaagaaggatcagcaaaggtcttcccattggacatctgccacataagagttaaataagagataccactaactattgggatactgtcttctcaaaaactaatcaagcctgtatttttctacttatgtgtttgagctgctatagttacgtggcataaattcatcttataaacaacagaaatgcatttcttgcaaagaagggggccagcaagttcaaaaagcaaagtgctaggagcttcagtgtctgataaggacctgtttcccacaaacactgtccagagatgaggccctttactgtgtcctgagatgagtcagaggttctcaagacaaactctcctctggaaggcctcgcctagtaagactatcatattgaggggggagtttaaatatatcttggtgaggagatgggtaacaaggttttacaacatggtgcctacctataatggtcacaaaactacagcatagactataaataggactctaccaggtcacactttcaggacatctatgagtttagaatattaaacataagcaaagaagcaggaagagttaagggatgtcaaatcagagcctccagctccatctttttgtctgagtttgtttgattgctgggatgctcactgggatgctcacttcctccccctgaggctctcccgatcaaactttttcatgagctttaagggttgtttaaaatagagaagggatgggtcctatccatgtgtatttgtgcaatatgcagtaagcaccagctgctgtaagccttcctttaaggttagtgtccctcataacagccctgacaggtggctgttaatatcagcctccttttaccatccaggactctgcaatcggaacttcagtaacttgcctgcgtaagaaacataggatctgagggaggtgtggtgctgattccagaaccctagctcctcactggacctcctcgcagatttcacagacacacacacattgtgtatcagtaaaatatacaaaaaccacattgtgaggttcaacaaggaggacgaaggctgtgggtattcctaagagatgaccctcggagtggcatgcttgcttttcatgtctagcatcctcatttttgactgcagtcatgttgagcgagaagatatgtactatgtcttaccatattcataaatgcaggaagtgtgaagtcacttgttcctgggtgtttatcgctggtttccagattctcccatccaaatacatctctgagcaaatggtatgagagatcttgatttaaagaataagcctctcaaacaaaattgacatatttttccacccaagagggctggtggtggctcctcctgcaaccttgggtcctcttataaccagtgtgggttgttcctgcatagacactgcctatgtatgctaaaatgtgccttccttgtcatgggctactctttgtctctgaatacatacagtaaagtgaaattgtgctcttcagaggacagtcagcctcatcagttcttaaagggaaacggcatcccagtcgctcttgcagttcctcctgtaagtccacaagcaggttgtgtcacgtgcctctgaacccacttttattatctctttataaataaaaattattgtattataatttcttaatttcatttagtatgctggacaaagtgaaaagctggggtgtgtgtgtataaatatatactgtatgtatgcaaatgtgtatgtgaatgtgcatgtgtgtgaaaaatataaatttgtattgaaaaatatgtgtatatgtatgtgaatatatattgtgtacatataagtgtgtatgtgaatatgtattgtatatatgtatatatagtgtctgtgcacatgtgcatgtgtgcacatgtatgaaaaatatatttgtgtgtgtgtgcgtgcatgtgcatgcacgagcatgtacatgtgtgtcacagcattagaaagagggcagaggacaatctttaggagttctcactttccccctcactgtttctgcactgccctccaggcctctggcagggagcttccaggctcacctcccgtcacccctctcactgcaggaatgaatgctgagattacaggtgatgtgccaagcctggctctgacatggctcttacatggctcttacatggcttatcgtggtcagggtcatcaagcttgtgcagccaagcgctttgcccactgagccagcttcccagcctgaaaaggcagtgtgtggcactttacgtagtccctttgaaggaacaatcggaacgacaagccagttctgccctttagtcaccgtttgcccacaagctgacacagggggccccatctgtctgttgaacctgagtcgctgcggtattcatttatgtcaagcgcatttacaagtctgtgcagctgttaccatcatctttaacgcacttcactgtaacccagagaaacaacacagcatctgcataacagcttagaaaataccagaacagcaaatggttattatttctttggtcccttgcatttttgtgacagctctgcttgaatcatattcagtcatgtggtcctaaggtatggctgagacattgtaagggactctgagggcacacagtgatcccaacaagacccatatgtttggagggattgctgtcccgggaggaaagggaggagagagtgctcactccaggagtgtactgaggaagcccacctgaactggccttgcagcctctacaaaggttttctgggaaaagaaaacctcagctgagacgtgaggatgagtagaggtgagtcagatgagaggtatggccaagaacattccagacaggacagaacgttgtggtgacaagagaatgtgttcattcatatggtaaacaggttccttgttactgctttcagaaataaataaatatgtcaacgttggtaccttaagacaacgaaggtggaatctcacagtgcagcacagctcagctgggttctctggcctggaacccacaggcagcaacccaacatccatggggccaggatctcatcagtggctcacctggagaaagtcaggagctatctttccttggacctatggggctgagtctctctggcttctttccgtaggccactcgtgcttggttcctggaagtcacttgcaccactcatttgtgaggctttcccacaaaatgcttagtcctcagcaactgccccttcatgagcagcagggaacatctctctggtgtgtgtgctagcaagagtcctaaacatagtgacagaatagtaagcgtgccttcccatcacctttgttgaagtctctcgatcccctaccaccaccatgttctaggatgcatgtcctacaaatgtataaacaccagcagacaagaaaccactagaacgggtatcatgttcaagactgattgtcacagaggatcacagagctcatacttttatagtggggtctattgggagccattggaaggcaaaagcagtatttgccttatgagagcatacacagaggggacatgctcatatacaagcttacaacctcaagactacctctaactgtggagaagagaaaatgcatggtggttgcagtgtgtgctatgaaaacttcaaggaggtatggtcaacacagaacaatgattagtgggatatggaaagtgaaaggggaaagagtgttgggaactgataatgcgcatgcatggttggcttggtaggcaattggtagaagccgcaaaccctggtacagaagccagatgccgtaagtaaaggagactggatagctgaagtgtgctctgctcatcctcttacttcctgagctctgacacttttctgggaagtacagacaagattgtgttattggaagaacacagcaggcttgccatcttcaggaaatgtcgacaggcactcagactgaaactgaaggcagcacatctaaagtaattaagtacggaggtagcccagaaatggccatgttacttcataagcttccataaatgagtcctgcatgccagaagtacagtggtgcccacgatggtgttgtcatggcaatgcctgtgtgtctttattctctgtgggctggctcattctgctggctccatcagccactcccttccccgttactgcagaaagcaggcaaggggccgctgctgtcagttagtgttggaataggatgtgggaacccctctcggggccgggtgtgtgtgtgtgaagaatcctcattgttttaatttctctgagggcaattaaaaaatacaaacttaaccagggtggtgattggttttggcatgtgatatgtttgaaagctggattaatcttcctccaaggtgtgagaagtcagcagtttattgcaaaatatacattccacattgaaatagctatttaaaagttatgatttcaaaatcctttgccatttcaagacatgaagcatttccttgcatgttcccctctgtgagaaattctctgaaaccaaagtgactcaagcagagtctggaaaatactggagaatcacatgattcctaaaaataagcacatcgtcaccggcagggaccatgagcagggcagcagagacagtatgtcagggcccccactcaggcatgcgccgtgagctcagcctctaccatccatcccacaggctgcctttgtgcaggctggtcaaccgggggaggggtcctaaggggtcctccaatactgcttactcttctgtgacagccacaccctctgcagtgagggtgcctgcctttcagggagcctctatagtgggttctctcagggcagagccgtttatcatgttgtataatgatcccaaagcagtgactgggcgtggctgatgcccccgcccgcctctgcctggctcccctttggctctccctatggaatcaatagcacatggtatccatctgagaatgtttcctttcttttcctcctgttaacattaacattacacaaaacatagattgtgtaaagatgagcatctggcagctacagaaaatggtgtagaataaggtttttaaactgcaccatctcaaacactgtccaaaacggaacaaaatctgtggtgactgttcctagaggaatgactgcagtgctccttgctggccttttgtgggtctgccctcacagtctattctgagagcagagatgtaacctgtgaaggccagcactgggacatgcccttctgcccagggtcctggatcctggaagcctgggaagacctgggcatccaccctcgtgtgtctctgtagctctgccctgtgcattctctagcacagcaacctgagctggccctgaactgctgaggcagaacccaaacagataaggcctccacacagcctgtttctctccctacttgccacattgctggcttctagcacatctttatcttggtttacatcttgccctctcgttgaggtcttgaggatcaaaggatgacccctgcctcttgtgtcctttgtagggatcctggaggacattctaagagccattaccctctgtgaggaataagactattaaaacaaggtgcccagcttccctcttccaacacacactctcatatatatatatatatatatatatatatatatatatatatatatatatatatatatgcacacatatacacatacgtacatacacacacacacacacacacctggccaatggctcttgctaccctgttgatccacagagttcctgagcagactgtgggaaccctgcaggtctaggagaatcgttgaaactggagaagaccaagaacctacgtaaaatcacttcgccacccagcccaaccctcctcacacatgcaactgggtccctcgtccctcctgctctacttgcaggtgcagggatgctctcgttggctctgttacttaccagcttattgtgttactgtttagtgccatgttcccagatggatcgggaactccacacacacaggcctcatttgtgtttcgttcactatttgatgccagtctatttagtttgcaagctacatggtaattgattgattgattgattgattgattgattaatggagagagatagaataagcacatgctgacactacctcacgctgatactcactgtagtttccttggtgtccctccttcactggaggccttggggcgcatagtgagctatggaggttccagtagaatgagtctctcctttgagcactgctgtttcattttctagtgtttggaataggaagccagtacgtttgaatgctttgttaagccagatctcatttgctgaggaatgacattaataacaaagtgagtgctatgtactaggcttcggggtaaaagttgttcagattttaagccggggtagtgacgcacaactttcatcccagcactacagaggcagagagcagtggatctatgagtttgaggttagcctagtctatgaagtgagttccaggctagccagtgctactcagagaaaccctgtcttaaaaagccaagggggaggggtccccatgttttaaagattgtttgtttagtgtgagtgtgtttgcatgagtttaagtgtaccacatgcatacaggtggccttggggaccagaacaggaggtcatatcccctggacctggagttgaaagtggttatgagcctttctttgctgtgggtgttgggagcctcaagcggttctgacactgagccagctctctccagccctaggtattctgtggttttactcccgtgatcttcccaactctagaaagcaacactgttcttcctgtcctgaacttaaaaccagtagggtgtcagtgggttacccctcttagctagcagcaggtcaagggtcctttggacccatggcgccacagggctctgctagtaagtaccacatcccacagtcaccccaagatgagctgacagatcccacaggatcagtgtggttcatgctctgtgcagccctgagctgctccaagaggaacggctcctgttatcagctgatattaatttatgaagagcagcaacctgactttgccacggtctgtcttggtgaagacagagccagaagggctctgaatttgaaaaccccaggaccctgttaaaattcccttagaactgaacccttgccacctctgagactgattttttccccctttcaaaataaaattaatgtttattctttgaattttgtagaaatcagtattgtatggagtggtctgtctccttgccgtctggtgactctggtgtcaactaataagaggaaggctttcctgtgaccatggggcctccctcctcatccatcagtccagcccagctgctttctgccattcctagccttttgtttgattttaaagcaaattcattataacaatttaaagacaaaatacgtgtgccaaggtgaaggggactaggaagtgatgtcagatttatccacgaatgattaatcaatgcatttgtgaggtattgtctgcctgcctgctgtgtttcagctgttctatggggttttaatgaaggaagcttgtgggggtggaacaggagagggaggaacagtccctcagagtaaggaagaggtcaatggctttgtgtcgggatgggggatgcgtgtgcccatatacttaacactaatgtcatgaatattaatatcatgtaattagctactttccatttatggtttggtaaaaggagtcccccagattatgagaagagtttctaaagtcttagagaactggccaggaagagaagagacgacactgctttcgtttgcttctttctcctttctgaactttacccagcctcctttctccaaaatgtagcattttccatacacatcaagcaagctactaattacagacattagacacagcgatgccctgactccatcaagacactgaatcaagccactcactcctttttacaaccgtggttaaaatatcttagaatcatatttatgccccaaatcctaaaagcattcattaagatgggactgctcaaagacaggcattgtgaatcatgtccatctccggtggggaatgcttgagaattacaggggcttggccagagattatgtccatttccctctgcttctgaaccccctttttattttgaaagggaaaattaagggggtgtagaaaagcttacgggcaggacaattgtgtctgaaacagagctactgctaattacggtctcaggacaccatcaaatgtagcttgaaagaaactgaagtgtttgatagctgtaagggaaaaatactctaaatctgaattgtagtcagggtgactgcatggccttgaaaagtcaggatgttttccacgtgtgcacgcttgaagcgtaagacctgggaaggtgcagcagcagaatcgctagtcacgatgagcatttgggccgcaaggaaggcagccaccattgaggacctcggcctccaaagccaggcttggccactagatgaggtgacgggagcacctgagaaggctagaaaaacaaatactcgcttacataactgggttataactacagctactgattgctacatttccttcatagcagccttagggtggttggtcccagcaagtaagaaaaaaaatacccggacctagaagctagatacactttagagtgtggttgtttaaagtaaaagaggaaaaagggcttggctaataaagaagcagagtgttctgagctgaggtgaacttgaaggcactacttactgcagtactcggaaatgaaacaatggtgtcagcgaacgagaggaagccaaagatcacaactgtcttcctttgcgtgtggtgtctctctggatgtgtgagttacatgagagtcctttccatgtgttgactctctgggtgtgtgagttacacgagggtcctttccgtgtggtgcctctctaggtgtgtgtgtgagttacacaagggtaagtctgtccctattagtcacagcacgggatgtttcaagcacccactctgcagcctcctgaagaggagctgacatgtgatactcagacttgtactccatgtgatgctaagatgtcctattctgtacttcatgcttatcactagggcgacatcctcgtttgtctttgatttttctctatctgcttctttccaaacaatctaatgagaattccaaagcctccctcatttgaaatatcaaatgaaaagtccttttcatctgttagtaggttttttcaaatgtatgctctactccatgtcctccatgtgggagctgtgcttccgccccctccctgtgagtgtgtgtgtatgtatgagtgtaaatgagtgtatgagagaatatgtgtgtctatgagtgtgagagaaagggagagcatgcatgtgtgaaagagtgtgtatgtgatacagtgtgtatgagagtggtagagatagtatgagtatgtgtgaataagtatgtgtatgagtgtggctgagagtatgtgagaaagagtttgtatgtgtgagagtatatatgtgtgaatgtgtgagtgtgtgtgtgtggggtatgtgaatgagtgtgacagagtatgtgagagagtgtatatgtgtgagagagagagcatgtacgtgtgtgtgagtatgtgtggtatgtatgtgtgtgaataagtgtgtgaatgggtgtgacagagagcatgtgagagagagtgtgtgtgtatgtatgagaaagtacgtatgcatgtgtgtgtatacgtaggtggtggagcagctgccaactccaagtctgactctcatgtcttcctctttctcatcttggggttccctgagggatactgatgatacagcatgaaagacctggttccagggtcccagctggcctttacagggtccaagaaaccagtgctatgtgaaggctgagcccatgggctgggagaaccagacccacagagaggttctgctgagctctggccacagtgagggtgtgttcccacaagcaaaggcagtttaactacagccccacgaccaccagctctgacctctcccatgagccatgtgtgtcaccccagcctctgtccctttgcaatggtccttcccctctgtagctgacagttcagtttgtttcagacttcattttgacagtaccctgaagtcacagttagtgggagctctgcgtgtataacctttaacagccttctctcttctctgttcttttctcttggaactgatgccaaagtgtaaggccatgacttcctggtaacctgagcttagtcactgtcacatattttgatgacctacttagggagaactgcctggagtgagaagtgatatgcactctcttaggaaggcccttctgtgagcagaggccagtgacagagatatggacagcccggcaccagccacctggctcataacccagacatcagccgactgcactcactctgtcagcggactggctagattccacgtggaagaactccacatcataacttacaaaagggacctggaaagaaaacagatggaggacccagccggaaggctgacacccaaatggtttctttcttgttggctcttccagtcagtgactttgacgttggcatcagtacctcaaagcttctgtgtgtcaccgctggttcactgtctctgctgggtgttctggccgtgcacagacagcatccaggtcgggcgctgcactcgctgtacttatcagtgacaaacaaaacagatgcagttccagcctgatggagttatgtccagtgcaagacgaggcatccgggtgtcaccacaatcgtgcagtagatacagcctctcgggaaaaagttcgaggcactgtgccctccaggggactcggcagctcaagtgagacctgaagaaaggatggagggcctagttactcaaaggagacagatcagacatggggagaagaggggtgctacatgcagaggagatagagccccagtgtgaaaggtatggcattccagaacactggcctgttcccaagaaggccaagagggtaccatacctggggaattttaggtgactgtctctctgggagaggctgcacctttatcattttagcaggccttgtgcatgaccacggcggacacttaatatgagtttttagataagcagctctctgtaacctttcccttagacttcctatctattcaaatgccaatcttgttaaaactgaaagggctttatcgttgcaaaagtggtcttccctgctactaggctggtggctgtctgggaaggcctcatactccctgcccgctcttccatagtctgttctacagcctaaggagttgcgcagcagaactgggaagtcaggttctagaattctgtgtgggcctctccagagagaaaggctcttacagcagtttgtccattctaagcaaagcacacttcccaggtgccctgagcccgctctgtacatagtgaggtctctgggctcactgattgcccttgtcagaatgcacgctgatttaggtcattcatatctaatcatctcaagtctgctggccctttccctgggctttgaaagattcctttccccttgttgaaacaaaagggcatatttttaaaaggctgtgacattgttaagacttcccagaggtgtggatcactcccatttgtaaccagtgactccgggcacctgaagacacatcatataaatgttacagcttttctgttggctacgctgtaattagggtgttggttgagacttgctgctgctgctgctgcctgcccgcctttagaatcccttgcctctgtcagaaagactagagactgaagttggaaaccacaaaccaagttttaattgcctgtttatctatttatctaaagttgttcctttaccaaaatgtatttagcctaacattttacaaggcactggggttgctgacatgagtaagacatgttctttgccctctaacaacattctggaaggggagaggatgaaagatcgtggtggaaattttaattggggagagggaacacacaggagatcccgtgtggacaggagacgcagaagtgttgcctgtctgggactgtgtcctaacaacaactaagggctgagggcgcatcccagaagagcggccggctcctactctgaagcacaccggtttctttgtgtagacctagctgcttctgttttagctgcagaagccattcctatgcttgtgctgggttctagatggtaattccactctaggttgtgtgcccagtgagtgaaggctcacctgaaataacagtgtgcccttattaggaacttggtaaacctccagctatgaaggccctctctctacatgtcgcatctcccatctaaagcctcggcacccgttcaggaacagctctggagttttctctcttctcgggtaccacatatctgtcttctagcagctcctcggctttccctggtgatcagtttataagccctttatacccctccctccccatggcctgatagacatcacattccaaggtatttcataacttacagccatcattcctcatgctaagcaggctgcccccgccaagctggtcctgtgccctttgccctgagcgtcttcacgtcttgccacaagctgtcctgcactcacctttctagttctgtgccatcagcagctttgcaggaagcccttttgttgaagggtaacatttagaaaccaagagtggaccgcagagtggtcatcaccatgtagatgtcactgtttctgtccttcccttacagagtgcactgtacaagaacgcgcatacctgcgtgccagtgtttcttctacagtatgaacctgtcatggggcctttgctcttagaataataatttgtggtgactaaagaacgtttcctgtcacttacttttaaccgttcatgtgtatgcgatatgttttatacggtcatgtgtggggcacatacatacatgcaccataggtggaggacaaaatataacttagggtgttggtcctcaaattctctcttacttgagacagggctctccatgtttgtcacacagtgagcctgtctctacctcctgtcttacagtaggagccctgggctatcacatctggcttcagagaggttcttgggatttgaactcaggtcctcaggcttggacaataaggattgactcactgaccgtctccgcagcccccacagtctttcctcttactcaggttcactgtagctgtgctctgaggcctggagggaaagggttaacccgctcactggagcagctgctgtccaggctcagtgcagtattgccccaggctcgctcgacactgtggcttttgctgaagctgatcgctctgactgcattgaggaggggttgcacattgcttgtggttttcaggaagctcattttatgtcatgcgtttgcagtgtatctgaaaatctcctctcatgctggctgtactcataatgtattctgcttgcttctaggcgcggctaagtcaagtcctgcatctaagccaggatccacaccttctcgcccctcgtctgccaaaagggcttcatccagtggctctgcatccagatctgacaaagatttagaaacgcaggtcatacagctcaacgagcaggtaattcatcgcctccacccttgtctctggaagcagtgctgtgtgtgaggggtgaggaggtcacgcccgcaggcctggggtaagggagagaaggcaagacagccagtgagactaggaggacctgctcaagaagccggtgacgagcagtattagtcacaaagcttggcgccaagcatgaggctgtgggatgtgacacagcctgatgcaggctgccctgcattcctggctccctgtttctcagggcccatcctgaactccaggcctagcctgcccactcctggtcagtctaacaagagttatggctgccttagggttcagctggctccctctccatcccttccttcctttcagcatctagtggttgagcctgttttatgtgatggagaccatgcttcactcccatggtataacaatagcaaaatgggtgacgccatgccctcatttaaagctactgacagcagctacacaccagagcttagtactaaaattaaataaaacagcagtcccctacggtggcataaggtgcccgggagccctgaacaatggctgtgtattaagtagacatttcatctgccctaatagccccttacaattatggtacacctggctataccaactaacatttccaacttgaaaccttaaatacgggagtggggtacggctttgtggtagaacacaggtctggcaagcaagagaccctgggtttggtccagaggcatagatatgttttctaacttgtaatgcctaatttttttatacagcttaagaataataaaacactgggcagtgctgtccccactgtagaagccacctgcttcctgcagcagggcccgtgattgtgaaggaatctgtgactgcgccttcctaggctgtacccagctaccagccgagtctgtcctagtcctgagtcttctgcttgctaaggcaggagtctggaaagtgtgcgctctcctcaggagtttgttgcagaggcctgacaagggtgctgcaagttagaaacactagcacttgaggtagcacttgaggcaacgtcttaggccacctttggactcggattggataactgtggattgttctgttacctgcccatctcctgttggagccagccagttttcagtaatgactgctgctcagattaaacagaaaacaggaatgagcctcaggccacaagattaagactccacacaagcctgagtgacccggaagaagtcaagcttgagttcatcgtactctaggtctgtgctccttcccaaagcaactcgactttttccacagtcattagaagctcgtgctcaggttcctgtcactgtccttgctccctctcctccatacgccacagtggcccaaattctgaccacgtggcaacctccagtcccttagttgtccctaataccttgtggcctacactagacaggcacttcttctccttggggctggctctaagctccgtaaactctgaaatcacatgcagagggtctgtttccaaaaggccttgtcagtttttagggccactcaggagaggacagagggacaggagagtctgcctgctgtccttcccagagtacttctgagagaggcttccctctgcttcctgacccaatcccttactgttgaggaggtcgaatatacccacctcctccacctccactccgtccttcagaggacaggtgaatcacaacctaacctaggcagatactaagttctcaatccaagttggttttcctggtgacctgagtctgggtgcccacctgtgaagctcccaggaggaaggccctgaggctcatgggtggccacacaagtgccccagtgttgaaacacagggaaaaggaagagccgagtggaaatgcagaggcaggaccatgacttatggtggcaatagagaaagtgacgactgccataaacctaaggaactttcatttgcttggcctggttcctttactcaggcagtctccgtgaaatactacaaaagcacgctgcggtgcacaattccagtgatagccgtgaatcagaggtggagggaggaagaggttagcagaagattagggacgggatgcctcctggtcagtgggttagccagcaggaagtagatgggagtcactgttgtcccggcgcctccgggaggacacacacagtctgtggacatgcctgggaagagttcggaaaactgtggaaggaagcttctactatggggcctttgaacttgatttttctcggcctctgccacctacccatctgctgtgacctgtaaggagagaggctggcattcgtctataattccatccaaatggaattgaatttgccacctgacctctgatcatttaaagtagctactggcaagattttttttttttttttttttttttttttgctttgttgcccaaactggtgttgaactcaagtcaattcccttgcctcagtctcttgcctcttgagtgccagaattactggtgtgcaccatcatgcccagttgccatcagtgtttatgtgggtgggaggcgttgacaggtccttctctaatacatcagtagtaccagtctggtccagctcagactgaatacttccacagaagccaccgtgtgctgtatccagaggcaaagcctgggctttgcaggttaactctgtctgctgtgatttgaatgtaaatgccgccccatcctgtgctgttaggggagattgtggaaactaggagctgaggccagagctggaagaagcagggtgctgactgtggtaggccttcaagggtttagcccaaccccacttctggtccgggtcgctactgcctggccagcaccatgtaacaggcagcaactgccggctcctattggcttctgctgtcacaagccatatcctctgctgtgccacctgtgccatgatgccctctgattcccgaaatgcaggtcacaataatccctcattgaagctgcatctgtggaaaggagctaatgtcatgcctctgcttggcttgggggagctgcactctaggatccatctgcctgactccgtgcagagctgggagggattctacagctaagctcagagacagcatctagaactaggggaggtttttttctacctgaagtgcaagcttgatcactttgtatttttgctgatgtgttgtcttaaaaggaatgaaaattcagggttaacctaaaccttctcaccttctcaagtagctagatgagggcatctgtgaggtctacatagactcctgcatagatctatttgctagatatagggtaaaggaatggttgcatggaccagtatgtgtttaaatgtcagtaattgcagggataatataccaaaggcccaacctattaacatatacacttatacacacagaagagatttggattttgtacctcaaaagtaatcattaaaaataatgtatagaaacatatttatgtatgtgtatgtatatatgtatgtatatacatatattcatgtgtgtatgtatatatatatatgtgtgtgtgtgtatatatatatatatatatatatgcaaacttcacctaaagaaaaccatgagacttcatttcttccacagtgccatccatttgctctagaaatttccaatgaccctaggtttataggaccataaaagggtatacaaagcaaattagctgataataaatcataaagaatttttattttatcctttggagttaacatggtggcacacactttaatctcagaactcaaaaggcagaggtaggtggacctcagtgggttccaggccagaccgggctctgtctcaaaagcaaaagcaagaaaatttgcttactgaacacatggtgctttttcatctaacagtaccacacaggtaaactagtctgataaactaggggtgctagtgtttgttttctgtaattagagcatcaagtttctgtccgaacagtgtgtgtagtgactgagttgaggcatctcgtgttggctggctatgtgtggcataagagcatgctcatgcaaagggtcaaagttcaaagccagagcgtcagtgaaggcctgtgctgcagcacagggcagttgtaccagaagcacctcacatccactgtgcatttggtttctaatagattttaactgttgaacaccacagacttttactagtaccagatattttttgtaagccacacacacacacacacacacatacacacacatattcagttacataacccacggcagagtcatgaccctccatttagaatttttgctctacacaaatgtaaacaaagtattacaaaagaggaagttctcaggaaccagaaacaggccatagtttgaacctgtgcgtggctgtcagagagttgtatcctaagatttaaaagtcaaaagtcaccccgccctgcttcttcagaactgataccaccccaatgtggtcctgccttagttgttggcccagagcttgcactgacccagaagttagaaacttcacaactccagaaggtccctaaatccaccctccccttccaatgataacacagagccaccagagctggacaaacagaggcagattgtcatagctagcctcctccattgtcacctctaccccatctttgtgcaccaagatctgccctcaagatgacagcatgcatctgctctgactcagcatctgaggagtggcttttaatatataccagtgatctgaagaaaggaagggtcacttagaaaacactaagtctcttaccttccttctcagtagactatgagtgagtgtttgagtctgtttgggatgctgtaataaaataccctaagcttggtgtcttgtgagcaacagaattttctttcttaccattggaggctgtgaggtctgatatcaaaatatcagcccatcagttgtctgacctcagtgggaaatgatgtacctagcctcacagacttgatgtgccagagtcaggggatacccaggggagccctcgccctctcagaggagaagggagcaaggctaggggggtgggttatgggagggggtgactgggagggggccagtgcgtgggatataaagtgaataagtaaaaactttttaaaagatgtcagcagatcagttgtctagccaagccctcgtcctcatggtctccccatgctgcgaaagatccctaagcgtctttcatacacagatctcattcacctcccaaaggccctgccccgtgataccatcacactgtagggagagacagacatcccagatcatagcaacgagatgtggttcagcacaagttaccaagagaggaaaggcttgtctaagcccaggtatgcaggtgaatggaacaccctgactacctgataaattctctagtagcgaacactcagcatgctcctgagactggccgccaagcctgttgcttcttccttacacttgtgcttccattcttgtgtgtgtccggctccgtgtgttttccatcgtacacagacatagctggttgggtatttcttactctaccccactctcctgcaggtacattcattgaaactcgccctagaaggtgtggagaaggagagggatttctacttcgggaagttgagagagattgagctgctgtgccaagaacatgggcaggagaacgatgacctcgtgcagcgactaatggaagtgctctacgcttccgatgaacaggtgggtgtggggaacccccggctcctgagttcaaagtgcagcacacccggccatcttaaatacttccctggggtctcggtgatgttacaacatagctggcagccttgacggtcccagagaaataaatatgcttgtcatcaagacctattctgcctcacctgggggatgtgcattcgccagttacttgggaggagttgggtagaggcagagactgggactgaaacacacagagcgcttcaccttgagcaaatgggcagtaaaagttgtatgaagacctgtgttctgaggatggttaagcgagaaaacaatttttcccatccctgagagccctacagccatcttaattttattacagacagacttctctgtaggtaggacctgccactaattaagtgtacaggggaagacccggctttgtgctgggcagggtggaacaggcaggagtgacaagaagacaaagtgaatccagggctatcctgggctacatgagaccctgttttgttttgttttgttttgttttgttttgttttgaaaaatggaaaccaggctcggtgtcatgtgcctttaatcctagaacctggaaggctgaggcaggtagatctctgtgggttcaaggccagtctggtctacgtagcaagttccaggccagccagggcttcatagtgagacccagtctcaaaaaggcagcacaacaataaaagggaaagagaggagaggggaaggaagaggaagagaaaaagggaagaagagaggagtgtggaggactgcggagaccaggcaatagggtcaggaaggacactatgaccaagagttgacaggcaggatacagaaacactgctgagtcagcacagtctgtatgtgcaggagggagagcctggcccgagtgaggtggaagtgagagacctactgaagcttccccttctacagagctgggttgggggagacaagaggccagggctgggtgtccagcttctccttaccctaggtcaaagctggtgaagtatttggcactctgccctggaggcctgtgggtgctcagagggaactatggagagtcacatgtgctagtgtccccacagagcgttagtgagctgccagaaagttcatgttcttattccagccaaaggcagatgtttgttccacgtgtgccttaaagtgctagcatagaaactcccgttggctaaaggagctgtcccgtgcttgggaacttccgtcggtgcaggaaaccgtgccgtgcttgggaactccccaccattgcgttcttttctctcaaattgtttttggtaacttctttcttggttactagaagctcaaaatgtggatttggaaaccttgggactctgcccagttaattcccggggccatgatgatctcatcaaatgtggctctccgagtggaggctggtttgtagtgtgcctgggaccactgtagatgtactgaggtacacctcggttgcggtggctgtctctaaagcttgcttgagatgacatcagatgagcacaccacatgagactgcgtgtgtgtggcagccatctgtgctggcgggtgctagcaggagcaaggccagcaggcgtgcttagatcttcccagcagtgccctcgtggcaggaaggaaaccttcctcaaagccagaagtgatcccaagagagaggagacacggtgttggaatgtggcctggtgaattgtgtgacaccattgaattgctggataggcaggtgagcctggggcaggaactttcctgtcctccagggaggagcttgaggaggcccttcctagaagtctacactcggtttctttctgctattccagtcccccgcacactagtgtaccttgccacctacaattcttgtactgtgagcagatggcccaggaacactcgtgcataaagcgccatcagtgagtgaggccaaatgggttgcctagaccctgactaagatgcctggagtctgagctgacgcctgggcctttgtgttttatgggtagttctttagcagttgctttagttctcgtgaggatcttatcaagtacatattgtcctgttttctagataaaggggaagagagaaaagagcttcggcactttgtaagcaactggagtctgaatcccgggctctctctcccttttctatttggggaggggtggaggagggggcattggtactgaagattaaactcagtcttgtgcatgctgggaacaggctctaccactgtgcagcaccttagctctaccactgtgcagcagtgcagcagggagcaggctctaccactgagcagcaccttagcccttggatcatcatcaagcgaagagaaatgtgttaaggaagagagacgtggacatgggcatacccacttaaccatcccacggccagaaagagagttagaggagccaagtattgcccagcagggacacagacttcaactctgtgtgttgctgaagctgtgtcttcgcatgcagtccctggcttagtgtttctacttcaggatacattacattgtaactctgtgtctggaaaattcccaggagctatcaggctatgagatatcaggaagagattcccatggggaataaggcatttgatatgcagtataccagttcttgctgcatgtgggataagacccaagacgaaggtttctaggcctcatttctacagtaagaaagggaagatgtgtgtacagacaccatgctggatgggtgtgtgccatgctgtgcacaagtatgtgtgtgcacactggcccactctccagtctacttccctgctgaaggtcaaggagtcatccaagaaaccttggagtcttcaagcatctgcctttatctctgaggagcatgggtcctgctcccgtggcagctgccctaaagcatagccagcactagaaggagtgggtctaagaaagaggctgcctaccctttagggcttccctctggaaacacatgctcagtggcctcggtgtcgttacacgctcccacccgcaaccctcagatcctcctttgtcccagtgttgtgtcctatgtccaggtcattcccacccctgagtgttgggcaggtcggtgctcctgtgtgggtctgaagagtatggagtccaggaagaaatacctctattttgcttaaggctcgtagcgtgaggatgtgtaagcacctgagatggcagaggtgtctggctttcccagagggggaagatgggctgaggaatcaaaggctagattgcatgtgtgctcttccactaagctgtctgagcattgcttgacttcccaggaggagtatcgactgggggatcttccatttttctttttgctggtaactggtcactgcctcctcgagtcaagcaaccccagaatatgatgtgtagatgtaaaactccagcgtagagcagtgaatcaggtcattcagctttaaaatgtagaagcctagtggaagtttcgagaactggtcaccaggaatacagtgcctctttactatcctcagtatatttctccttatgtaacttgggccacaggtatcttggcttaatcactggctgcctgcctaccagcttgctgaggtatgccagctagcagaggtatgccagctgataaacagttgctcatttcctgaggtactgtcatggaagctacagttaaaatgaacttaagactgactttctcctcagcacttttttgagacagtctgtttctgtcactggggcatctgtgcactccactggccttgaaattctacttatccagagatagatacagctactacctcagaggaactcacgggcctaaggagggagacagccagggactcagctgactggaaaatgtggcagattgtgataaatgtgacaacggagacataaataacttgtgtgggacacacactgcctggagatcccagcagacgtcactacaaagatggcatttgggttggaggttgagctgtgactaggggacattagcagttacagaaccaagatgggagggaaaagagcagccagctgtggctggcaccaaatgggggcaggaggctaagtgtccccccgtttagggatcaggaacatcagcttctggtgacctctgacctcatttttcatccattgtggccaagctcagcctttgacactctctcccaacctgcctctttctgatgggtagagtaaaagtaaagaagagtagcattgctcacagctgagcacttagagaagtacaggggctaccatagaattgttagtgttcatctgctgatacaccagtatactagtcctgtgttcagcgtaggttttaccgggctgtggctggggagcctgtagtgacattgtgagtgttctaagcattagcaaagcagctaaacaggcatgtttgctatttataccaaccagtattgcccagtaagcatgtcctgaagatcaacagtctccatgggtgtgcgtcatcaccagcagtttcccctggctaacacatcagcctgggggcgggggcgggagggggggggctactttctccagctacaaactgcagagccaccttcttcctcaacctggacctgaggagaggagccctgactagtggtgaggaacaaggacctgcagcttgttcctggctctgtgcttaatggagtctggtcctcctgctttcaggccttgattaaaactctgttatcccacagtaaactcccagcggtgatgagattctctgtaaaacacaaagcacaccccatgcctgtggccacacgtaagaacaattatgttagaaaagtatgcttcaagcagctgagggcatagtatgaaaggcagcatggcagactgagagcttaggatgagtaagttagcatccccatcatggtggggtgaggggaccgactagagcgtggctgcacagtaagctgggtagtagttgccagcacaatatacacagaagcaagaaagaaagatggaagcttcgccagaggaacaggagccattaataccgaagcagggttaggcagagaggcttccagaagtatcttttcatgtggggaatgaaccctggactctcccacattcctctacagcagaggactcctgctctgactgaggccagcacctgctgctctgtgacctcccacactgccagttccccctgtttgccactgttggccaaggctctgactccttaagctgagaaggctatactactccacatgtcaaacagcaggcaaagcacctgccagaagatgctgccaaaaaagcagccacagcaaagccctggggcctgacgtgtgagtgagcatcagaggaacacaagagaaagcaggatatctgcccatacctgccaaagatgggacagttctaggaggtggcagtggtatggtcataggcatagtcaggactcacatttaccaaatcatgtggccattgaccaagagccaataaagtgcaatgctagaatcagtctcaggtcttccatttgatgtcgctttgtactttcagctgctgtagaaagggtaactgtctattaattgtttgaacatttgaaatatatttcaaagtattctcacaccaagaaattacgatcacagctcatgtttatcatactgactatgaaataaacatgaagctggagcaagttaccagtttttaacttacctgttcctctgttagaggatattaatgcagtgttgaattgatcagtgaaacacactttaaacttgctacgtgagtaaagcagttgcactctaagcccagagcttcacaggtcacagattgcagagcttggcagagaaccccacagtcatgcacataaccttaacattatatggtctctgaggaaacactgtatagccttggctggtagtcatccattctggaatccgctttcttccacttggcatatgtggaacattgtagtgaatgagatgcagttcagttgaacaaggctatctgtctcaagaacctcaggctccaatagaaaagggctccagacattgagattccaagtgagtttccttggggggagttgagagagatgggtggggttggttttgtttttgcgatgctggggatcaaaccttgtgagcatccgctcccacataccacaggctccaagtgagtctcacagatgcagaaagcagatgcagcacacagggaaagggtgaagtcctgtctgaattggatcttagccttggcccacaggaaatggccaagtaggaagagaacaggcttggcagacccggagacagtatgtcacatgtccgaatgtgccagcatgcatgcaagactgcatcttgaagtcctgtgccattcctgagggcagtaactactctcagtttgtctcaccctttctgcttgggtggtaaagaactaattattctttctgacaaaagccgaggctgagacgatgcctgtgatctgcttcactgaataaataggacaggtggagccaagtgaaggaaaactgaccctatctgcttcgcagtcaggagcagaaagtaagcagatagggccccacatgccctaaagatgtgtggcaaggtcctggagccagagcttctaacgcagtgctgaaggggcctctttgcctacagcagcctgtgaaatgtgttctcaccccttcccttcccctcagaaagtaacaggttgcatctctggtgccttcagtctgcctcagattggtgttaggtggcagaaagcatctccttcacaaaaaacactgcccaggcatgatgatgacagcatcagcaggaacaggaaataggtcacaagcaatgcatgatgggctgttggggagggacaagcatcctatgcatctgcagaggcctggggtgctgtttgaggcttctctgtggttactaggctgtggagtggctgtgtctggcttatcatatcgactctcactgaggagagctaagtacacagcttgttttatgaagatttcctgggaaaacagttggaagaagagatgagttcttaacactcagtgcttgtgctttgcagagcggtcctccttggatggccctgggatgtgaaggtatccctgtatcccgggatgacaccaggaagctgggaagcatttgtgcgttgttgagttatgcctgaggctggcgtactccagaacctggtgtttaggtgattcttgctgattaggcctgacaccccacagggcctgaaagtaaaccggtttagctaaaactcctcccctatcccacaggagggccaaacggaagagccagaagcagaggagcaagcccatgaccagcagccccagcagcaggaggagtactgaaccgtctcatcagctcttgacacttccatcgtgcgtggggactttgcttccagagaattggaacgtgtgtggcctggagcgcagtagaaaccagccgttcccaacctattcccattgacagtgatcttgcatccgccagccattgctcttggctcccacttcctctgccaagatgcgttagcagatggccattctggtcagctccctgccaggtcatagggtcacataccgtcaacttcacctcctggctgcttaagactagttctactcccccctcataactatgtcccaccccaacaccatcaccaccaccaccaccaccaccacccctttttatcctggtgtgaaacaatggtaatttgatatatggtatttatattggcatttttcaatccagtgtcagtagctgtcacgcgcatttgtggtgctttgatgtttgcgagtctaacctcctctcataaatttggtcagataattaattggaacaaagggaaacagatatttgatatgaaagccatatgacagtagcttgtgtcatggggaaacagtttctccctctactcacaacactaaagggaaaaaggtggattcagaactatgacttcagggcccagcagtgttgatagagcagcatattagacaaacacacagttgttagttttcagacattcgctcacggacaataccatctcagctttgcccttgctccgtgtgtccactcctgcccccctcccccaggttttcctgttattttctttctcagggtcctttctttggtgggggtccactccccgaaagatgttgtcattggcaatctgcagttgcaaagggggtagggtggtctcagaaggcacgaggcttcctgcctcttccctcttcctccttgtaagagcttcaacccaagtcctccaattcacattaaggaatccatactaaagggggacttgagggtgtgtaccctacaggccagccttccacatcgtgtcagtgttggctgcccaggttggaagcgaagacttgattgatagcatggtttcaagagagaagtggggccacacacaaaatcaccaatgattccgttaccttctggagtaaggaccccaccctctctgcagcaagggggccctccttgtcactgacatttgctaaaccgtggcaattcatcaacgggaaacattagtgaattgaaggcattcccttgtttttaactaatatttgcacattttcttagtctccttcctgatggtcgcccgtcctccccttttgacggatggtattctttcctaactccctctgttttgtttaattttggctttaggtttgctgtcactggtcatatggccagcaagtgcagagaaacaagaaacaaatgtgcccaccccaccttccacttaaagaaaaaaaatctcaaaataaatttctgaattatgcatcataaagctttgaaatttcttttttaattgatgggatactaaccttaaattctagcgttggtgctttgcaccaagagaaagctttccaaaattaaccttcacagcagcgttgtaagtaactgaggtccatgtggaaaagatggcttgtatttttgaaatgatcacaacacactgtgcagaagtggacagatgttccatggcgtttggttctccttccttctctctcctgctcacttctctgccgcgcaacacatctctctgaggctggcaagcctcgcccctcgcagtgacgtcctcccacgcctggcggccgtagtggctgtgctccgggcagcatcgggcttcataggttcgttgctctcctgagcttttttgattcacttgctttgttttctgttttttttaatagctatta

SEQ ID NO: 89 - DNA, 1721 bp, Mus musculus
agcagagcgcggctgcagggtgagcagcaagcagcggggagacacaaccctccgccccagtcagccaccgcgtgtgttccctctgtcgggagagcgccaatgcccgggccgacccaaacgttgtccccaaatggcgagaacaacaacgacatcatccaggataacgggactatcattcctttccggaagcacacagtgcgcggggagcggtcctacagttggggaatggcggtcaatgtgtattctacctcgataacccaggagactatgagcaggcatgacatcattgcatgggtcaatgacatcgtgtctctaaactacacaaaagtggaacagctctgttcaggagcagcctattgccagttcatggacatgctcttcccgggctgtattagtttgaagaaagtaaaattccaagcaaagttggagcatgagtatattcacaactttaaacttctgcaagcatcctttaaacggatgaatgttgataaggtaatcccagtggagaagctggtgaaagggcgtttccaagacaacctggattttattcagtggtttaagaagttctacgatgctaactatgacgggaaggagtacgatcctgttgaggcccgacaagggcaagatgcaattcctccccctgaccctggtgaacagatcttcaacctgcccaagaagtcgcaccatgcaaactcccccacagcaggcgcggctaagtcaagtcctgcatctaagccaggatccacaccttctcgcccctcgtctgccaaaagggcttcatccagtggctctgcatccagatctgacaaagatttagaaacgcaggtcatacagctcaacgagcaggtacattcattgaaactcgccctagaaggtgtggagaaggagagggatttctacttcgggaagttgagagagattgagctgctgtgccaagaacatgggcaggagaacgatgacctcgtgcagcgactaatggaagtgctctacgcttccgatgaacaggagggccaaacggaagagccagaagcagaggagcaagcccatgaccagcagccccagcagcaggaggagtactgaaccgtctcatcagctcttgacacttccatcgtgcgtggggactttgcttccagagaattggaacgtgtgtggcctggagcgcagtagaaaccagccgttcccaacctattcccattgacagtgatcttgcatccgccacaagtgcagagaaacaagaaacaaatgtgcccaccccaccttccacttaaagaaaaaaaatctcaaaataaatttctgaattatgcatcataaagctttgaaatttcttttttaattgatgggatactaaccttaaattctagcgttggtgctttgcaccaagagaaagctttccaaaattaaccttcacagcagcgttgtaagtaactgaggtccatgtggaaaagatggcttgtatttttgaaatgatcacaacacactgtgcagaagtggacagatgttccatggcgtttggttctccttccttctctctcctgctcacttctctgccgcgcaacacatctctctgaggctggcaagcctcgcccctcgcagtgacgtcctcccacgcctggcggccgtagtggctgtgctccgggcagcatcgggcttcataggttcgttgctctcctgagcttttttgattcacttgctttgttttctgttttttttaatagctatta

SEQ ID NO: 90 - protein, 326 aa, Mus musculus
MPGPTQTLSPNGENNNDIIQDNGTIIPFRKHTVRGERSYSWGMAVNVYSTSITQETMSRHDIIAWVNDIVSLNYTKVEQLCSGAAYCQFMDMLFPGCISLKKVKFQAKLEHEYIHNFKLLQASFKRMNVDKVIPVEKLVKGRFQDNLDFIQWFKKFYDANYDGKEYDPVEARQGQDAIPPPDPGEQIFNLPKKSHHANSPTAGAAKSSPASKPGSTPSRPSSAKRASSSGSASRSDKDLETQVIQLNEQVHSLKLALEGVEKERDFYFGKLREIELLCQEHGQENDDLVQRLMEVLYASDEQEGQTEEPEAEEQAHDQQPQQQEEY

SEQ ID NO: 91 - DNA, 202791 bp, Homo sapiens
agaggaaggaggcgacagcgccggagcaggtgagtcaagtgcatttaaagcggtaccgccctggcgcaccccgacaccccctgcactgaagcagtccctcccaggccaggggctggctgcgcctcctcctgccgctgaggtctgcagcccgcggggctcggagcaaccggaaccgggggtccagagtctagcaagaagttgtgcaagggtcggctaggcggtctccgggtgtgcaccccgccgctctcccgcgggccacatctctggttcggtgccccagctctgtgcaccccaggaaagtggagggagggagttggggctgccacgctggcagaagcgaagtggactggttctgaggggtgaggctggggctgtccagggtaggaacacggcgttggtgaaggaggggggctcgcgactgcgcgaccgcggcgcacgaccctccaggctctagctggggcgccggcactgagagagctgggggctctggcaggggctgcgcgcttgggggcagatcaggaagtgcagcgcgctggcgctcgcccgcttgggagcatcccctggaccccgggcacttccccttcggcagccaccactctcccactccgacgccggccaccatccgcgctcccgggactcaggagccgggtgggtgcaaaaggaagcaggttgttattctgcgcccaagcatctcttctgcagggagccccgggagcgcagggcgagggctactcagcgacttcgcactcggcttagtgggaaattcttcggtctacccttagaagggctatgcggaagccagaaatcccacaaagagccaggagaggggtggacgcggaaagcggtcccctctgaacctggggcgctcgataaagctgattttcagaccccaaaagggctagtgggtttggtcactcctccagtgacttcgtcaatacagtgccaagggcagagccgtaacctcggagaaggggcgctgcagccatttgatcaggagaagcctttgtcttaacccccaagcccctcctgctagtcctcgctgggtcagtagcgctgggagtaattaatattacgaacattagcctttccttcacctccgcaccagccaacactgctgtcccctccctgagtgtcttctctatcacttgttcacatctccttttccaaaaaaagaagaacaaaaggaaaatagtgtagacccgctaggcaggaagaggtcactaaaaatactatcgtgctgtcaatgtagaatgaagggttaagcgctcaaacccgcgcccgcgcgcaccgaaacggaagaacttccttgattagcatagtatcgaccctggggccgcgctgcgaggcggaggttcggtcccagctggggtgaagtgtgcagaccggttgcgattgtggtcagacgcagcacctacttctaatctgaggacccgcgatttacacttttgctgaataggacactgtggaatgaaacagaacagagatcaaaaggtaatctgaagaatggcaacatttcccctgcttctcctgaacgctaaatttggccaaatttttatcaagcaaaaaggggtatggctcttggttagccagtgtcccctctggaaatgaaatgcttccttactttgctttcgttcttttctgccaaactgattaaagacatcagttaggggtaagataagaggtccgggagctcaccgagtgattggtagataagcttaactggtaaattttccttgcgtgggtagagctatgcttcttcaaagcactggttctcaaattttgctgcatagtggaatcatctggggagctttgagaactcctgatgtcctgatcacatcccaaactatttaaatcaggttgtttgggagtgagaaataggcacagtatttaaaagcaaaaacaactcctggtaacttcattgtgcagccaagttggggaaactctacagcaaaggaagagttcagcggccagcagcagcaggcattgcaagacaagatgccactttaactacttgggtgggtgagagaaaagacgctgaaactggagtgccgatgactaacaccctggggcggggaactgtcatctagcagcctagctggtggtgacacctaccacaacatttttcccttccctggctagggtctgattggaaaaatcgaagcttacttcaatgcctggtttctgcactgttgttaagggagacggatagaaacttccattcctgtgatgactcatgtgtagcagtcagtaggaaaacccagcagaaacatactccagcagcctggtgagtcagcaggctgcacagcgatcccagtgaataggaagtaattacagcgagtagtttgttgacacgcacaaactgcactcctttgaaagcacatttaatatctgatcaggatctacttgcttgcaggagccactccctttgtagcacaccattctgcctgtttcatataatgctctcttctgttagaaggggaaacacaaagctaactagacatcctgtaactttcttggtgggaagcatgtaaaaaaaaaactgttgggaaagtgtaaactggtttgggttatttcagttatgtgaagcagaaaggatgaatatgtaacacataaattttgcatacaaaaaagtcaaatactacttgattatacatccaggagtgaattaaatgatctatttaaatagaaatggttacacttaacattttatataaaacctcatgttggctattaaccaaaggtttcttgcctttaaaactgtcatcccaaaaggattactccaggataacctgttatctctggttctctgtatctttaacaggttatcttagagtcatcaaaaaacaaactttctttttcttctttcagttttaatacctcttcactatttttaatatcactatcactctctgcactgttgtctaaatgctttcttccccttcctcaatttcttttcttttctttttctttttctttttttttttttgagacagagtctcactctgttgcccaggctggcacgatttcggctcactgcaacctccgcctccaagttcaagcgattctcctgcctcagcctcctgagtagctgggattacaggcacacatcatcatgcccagctaatttttgtatttttatagagatggggtttcaccatgttggccaggccggtcttgaactcctgacctgaggtgatccacccgcctcggcctcccaaactgctgggattacaggagtgagccaccacaccagccctcaatttctttaaggaggaaaaacagtgtcttgcacacagcaagcactcaatatttttggccgttgaactttatctgaacctctcttagagcatctattgtagcctgcttggtattctattttctcataggggcctcagtgtctgtagcccccaaagcaggggcacagactctgttagttattgatactgcttgttcgtactgaagagtatcaaaaggtggggagaacattgaaaaccaaagcatcctgagtacattcagtttgctgttttccaagacagacattccagatatatagaagccaaagtcctgtcacaattcttacttgctatgatagcttatttgttcacttacatttcatacccaacaatttagcattttgagcataactaataattgttatcacatttaaccacactctaatgggccaaaacaatcacttcacaaaatttcactctctacccattattatgaaaaaccacatatgaatttattgagctaggagaaacattgtagaatagattaatagttaaatagcttttattttcacctgtgtattgcccattaaaatagcataagtacatttaaatagccaccatattaaaagtaagaagttggatgtattttgtgataagtacaaccaaaactaaatgttaataagaatttccaaagaccaaaatgatataaatgcattcattctcacttctttgtagcttagaaaaagaactggggaggcacttctgaaatgttaacacctttttgggaggcataagagataaagtagtttagaaaaatagaattaactttgggaggccgaggcgggtgaatcacctgaggtcaggagttcaagaccagcctggccaaacatggtgaaatcccgtctccactaaaaatatgaaaattagccagccaaggtggcacacacctgtagtcccagctactcgggaggctgaggtgagaggatcgcttgaatctggggaggcaacagaagttgcagtgatctaagatttcaccactgcactccagcctgggggacagagagggagatgccatcttaaaaaaaaaaaaagactaatcggattactccatattaatcagaaactatttctcagagtatgatatatacctagctctgtaatatttacaagtagctaaaaggggtagagtagaagaaagtgtgtcatctctattttataagctctaaagtgtttgagaacagacgagaaccacccagtcttattaccttaaatttatatagccctttggtcttactaacatatcagggcttaatcataattgggtaaatggtattcccaggtgccaaattacacaagtgaatccaataagttaggtgatcctggcaatgccaaggcattgactcctggattattgactccttttccagtgtttattgcaacatacaggttttcatgtagtcttgcctggaggctttggctacacaagactagtttgaattaactcctttctccttaaaaagtagaaactactcatatacatcattgtctcagcgactttatttattttttttttttattttattttattttattttttttttttgagacggagtctcactctgtctcccaggctggagtgcagtggcgccatctcggctcactgcaagctctgcctcccaggttcactctattctcctgcctcagcctcccgagtagctgggactacagcccccgccaccacacctggctaattttatgtatttttagtagagacggggtttcaacgtgttagccaggatgatctcgatctcctgacctcgtaatccgcccacctcggcctcccagaatgctgggattacaggcgtgagtcactgcgcccggccaactttattcttaaataattaacctttggaattaaccaaccccaaacatgttgagccatctttagcttttcatctaggtaaccaaaataataagttcttcaagtctttttccaagtcatagaagcataaacttcactacagacccttagagattagttccaccacccatagaaatcttaaatacctagtgcttcttcactaaggagtcctccaacttacacttgactgtctccctcaaagcacattcccatctctccttgcagcattcacctattggaggccacgaagaataaatccaactctacataattcacccgcaaccatcttaaacattgaaagagaatttatactctttaatctgagataagaaaaagtctggctttggtatttcaaatctcttaatttcacaaaatttttgttccaaatttgcaagatttgagaagtatccaaaattatatttcttaaaccagagctttatagaatagaattaattggtaaatttgcttccaataaacctaatctagtaatctatcacttctaaaatcactggcaaacttcatacaattacattaagctgtgttgagataaaactcacgactccatctgtttctagaatcagcaaactataacccattgcttgttttgtatgaccttgaagccaagagtggtttttatatttttttagtcatggaaaaatatccaaagaagaaaatactagaggacacttgaaaattacatgaaattcaaatttctgtgtccaaaataaagttttattggactgcagccatacttgtttgtttacatcttgtctatggctgtggcagcatggaattgttgaaccaaagactgtatgcccacaaaacctaaaatatttacagcaaaactactgcagacctctgatttaccccagtttaacatacttcaaattttaaataaaaatttgttcacttaaagccttagtcttttttgtttttgtttttgtttcccttagaaaaggttaagaaaaaatgtagttaccaaccataggtcaactaatcactaaaaataaaagatagtttattttcatattcttcttgtgtatgtactttgcgaaaagcagtatatttctaaatatatgaattttagtgatacggtcaactgtaaaacttctgaatccaaacaagcccaaatagtgcaatactaactagtaaccgtttccagagctctagaaaatgtgaaaacatgtccttaagagcaatcctaatgtgaacacttgccttaactctttagtcaatgttttttcaacctgtgagggccttcctatgcttattttagtatatgaagacataatttggaaatttattcagatttagaaactttttattcactgtcacttccaacacttaacatgatgtggaaacttgctgtttttggaaatagccctactattttatttcttttcatttaatttcatttattttattttgagaccaagtctcattctgtcacccaggttagagtgcaatggtactgtcttggctcactgcaacctccacctcccaggttcaagtgattctcatgcctcagcctcccaagtagctgggattacaggcacatgccaccatatccggctaatttttatgtttttggtagagatgaggtttcaccatgttggccaggttggtctcaaactcctgacttcaagtgatccacccgcctcagcccccttaagtgctgggattacaggcataagccacagtgtctggcctggaaatagcactccttttctaaaacatgcatttactgtaaattgcttgctacttgtaatggcaaggatcactaaatactaaaaggtatacacggttactaacactgctaaagctgacattatgctgtggacaattttgtttaaaatttccaaattcaaaagtagaccagattataatccagaaattcaaaattcatcttaaattatttccagtctgctcaaagctggaaagattaccattaagattctagaaaggatatttgaaaataataactacattgatgggaactagtctcaattttttattgtaagtgttgcttgtcataaaacttccttcagctaaaagaacttcttccttttgatgaattgttaatgccacagaatgggagtttgctatgagtttcatttagataatagagcaactttaagagttatatataactggtgttctcttcaccccttccagaatgagctgcaatttatagactgaaaagacaaagggattcctttttcaccaaatcaaaaaacacattataattaacgttaagttttgaggtacctaacatcagctaaattatttctaaaagcaaaaacttgtaattgtatttaatcccatcctaacaccagtgatagtaatggcatgttaggtcactaacttccacgttaacccctagtgcttctgatgggggaaaggaggaaagggatggctggagattgatgtataactcccatgctgactgggtaaggaaccaatccaagtaaaattaactgccctcctttatcataatctacattcacattttaataatatattatttaatatattacatactatatataataatatattaatatatagttatatattatataattatataatactaaaaatataaatatataatattttatatgttatataacatataaaatatataatatattttatgttatataatatataatatattttatgttatataatatataatatattttatgttatataatatataaaatatattatatataaaatatataatatataaaatatattatatataaaatatataatatattttatgttatataatatataaaatatataatatataaaatatattatataatatataaaataaaatatattataaaaatatatattatataatatataaatattatatactatattatatataaatatatacaaatatattttataatatataaatatataaaaataatatataaatataatatataaaatatatataataaaaataaaatatataatattatatattatataatataaaatatataatataatatattatataatataatatattatatattatattatatattgtatatattatattatatatataatataatatataatatattatattatatatataatataatatataatatattattttatatatatataatatataatatattataaatataatatgtaaactatattatatattatatttatataactatattgtatattatataatatataatatatatattgtatattatataatatataatatatatattatatattataaatataatatataatatatatattatatattataaatataatatataaactataaactataatatataacatatgatatattataataatatataacatatatattataataatatataacatatgatatattataataatatataaatatatattatataatatgtgatatataaatatatatcatataatatgtaatatataaatatatattatatatgtaatatataaaatatattacatatttgtttaataccttgttgaaataatccttaataagctgtctcttttaaccccctagaagagaggtaaagtatcttccaggtatgaaatatatagcctattctatacatgtagcactaatagttctctccaaattaatttctaaaattagaaaatagttaggcttactatatttttactagagcagggacttcataattatcaattgcttaaacagaggcaaaacatccaaaagtcttctgctaacaggcaaaccttggtcccaacttattataaacatcatggcaggaatgactatcggtatttgaagtaggtaggaggtaggtaaatacacaagaaaaggtacctagaaatgagtagattcctttgttttgctgaagtacctgaaactatttactgcacatcatacataaaaatgaaatgagaggattagcttgctcctttaaaagctggtaaaggctttcaaaaactggtaagagatgacagggcctgaaaccaccttgaacgttccttccttctttcaaagatcatcttaaatctgatcaatttaacaacatttgatatgaagaagaaaaacctttcatgattcttaccaagaaactactatcttagctctcccactgagcagcttcagctctccataaagtggaaaaaaagagagaccttacaagaaagaccttgctggttttgctccacctggttcttcccgggaaagacgctattgatataagtaaggctcttcggtagtttcacttccagcttgccctctattgtgatttttttaaaagtgtggtctcctgggcacagatcccctaaaaggagcttccacaaattagcagcagtaataaccaagtgtgtgatgtagtattggcaaatccagaagcaattccctctacagttgaaatgtttaggcaactcggtcagtgggtctgttaattctccatcccagcacctgaccttcagcacttcaagataaatttggaggtatgcttttctgtagagttgccaggtaaaatgcaggataaccagttaaatttgattttagataagatttgttttggtgtatctgaatttgaattaactgagcatttcatttttctgttatttggtttttaatttttatttttgctaaattcagcaatcctacttttatgatacaatagatttcaaaatgactagctttcctggtctgtaaaagatctgaggttatatttatgagataatgaattaaaaatgtcttagctgccttcacttactcaaggaaaaaaagccattaactgaagtttttttgcacaatttactagattgagaggaaataaaaagtaaaacaagaactagaaaattagcaatgtttttaattttgtaagatattttaaagtactttctattctttcaccaattttttaatagaataaatacttcaataggtatattgttagttcaagtagggctaacatgagaaatccatcaacgatgtcaacagtatgttcctaatcaaagtgagattccaagtgattgcaatgatgccttgctacctagatgaggcatcagcatcacctaggagtgtcttaaaatgcagaatttgagactccattccagacttccccaatcacaatcttcacgttaacaaatgaacacaggtgaatcacatgcgtgttgaagtttgagaagccctgaactagaggattcactttttccacacattaaattggtatttttgtttaataccttgttgaataatccttaataagctgtctcttttaaccccctagaagatagataaaatatcttccaggtatgaaatcattgtatttccattttattcatataaaattcctaaatggccatttataatattatgaatcaatgtgaaaaaatattattttttgagacagggtctctctctgttgcccaggctggagtgcagtggtacaatcaccattcactgcagcctccacctcccaggctcaagtgatcctcccacctcagcctcttgagtatctgggactatagctgcatgctgccatgcccagctaatttttgtattttttgtagagacggggtttcaccatgttgcccaggctggtctcgaactcctgggaacaaacaatccacccacctcggcctcccaaagtgttgggattacaggcatgagccaccgcacctggcctataagtcaactttttcaaagacctcatggaataaatgaacaggctaatatataattctggattttccttgattaacctgtaaattaggtggatcacaattcctggcactcagatcaccagcaaatctcttttgtttttcattttattattgtaacttacagaacagtatttatataccaataccacatattcatatacttgtacccccagattcctctaaaactggacaaaaggagatccagttgggtctatgggagattccaaactattcttgtgaaatttaaagtttttaaaagtaacaaaaagagtccatagataattctttttgagttctaaaacctcacttctttatgtctgctttcctgtcttttagaaattatagtattgtatcatagaatgaattctgaaattggagcaagaatgccaagtagcttgagttttaaaactggttctgctgctaactgggtgactttagagatgttattaacatccttcatcaacatccttcaaattgagttttttcatctgtcaaatagagaaagcgaagtctgacaagagttacaagatcagataacatctgtgtacatctttatgactgtaggacgtacagtgatgtcctaagacttgtttaatgatctgcttcatatagggctgcagttgactattataggatgtggtttcctgcaacatgcctgattttgaagaagggtgatctacacactgggaatgaagccacagagcatgtatgttacatgtagctgctggctatatatgtccacgtcagccacacactcccttctgctcctcagaaccttaaagttctcctcatggctggggaacagtgatgtgctccagggctccaagcaatggattcctcagcagacattgctctgtgaaatcaaaaggcaggttttcttttcttttgtttttttcttctagaattctgtataatcttgcctgcactctctctcaggaaatgattattaccacattattacataattgtgattagttattaagtagctttttatcttatccaatcatacaaccccaaattggaagagcctgcacagtcattttcttaaaacatcccagggcagaatttccactactagcacacaaaggagaaatctatttatccttttgttgttttaataaacataagttcattagtgagagcccaaaccaaaaaaggaaggaggggagtgggaggaagtactcctaatgttaaccaccctcatgcaactattacaaaaactatttttattattgtgtaaagttcttcttgtctgtatttacattcaacaatgtcttacataaaatgttcccttagcatttgtaatgttccctttatccagcttaatgtctctagctttggggtctttgcctgtgccttctctcggtcttctatcctggatgtcctagttgattcaagcttggactttgtcttgtctcaggttcttggtatgcaaaatgtgtggttcacctgtgtgtggtggctcatgcctataatgccagcattttgggaggctcaggcaagaggatttattgaggttagaagttcaagaccagcctgggcaacatagtgagaccctatgtttaccaaaaaattttgaaaaaattgccaggcatggtgccgtacttatagttccagatgcttggaaggctgaggcaggaggatcacttgaacctgggtgttcaaggcagcagggagctatgatcacgctactgcactacagcttgggaagcagagtgagacattccctctctctctgtctttttttttttaagttgtggtccattgaccagtggcatcagcatcacctgggagcatctcataaatgcagaacctcagggtcttctgcagacattctcattcagaatctgcactttaggaggatcccccggtaatctgttgtttggcattaatatttgagaaacattgatatggaaagcctttcctaacctcctaaccatggtctccacccatctcaatggggtgagttaggtggcccatatttggtttgcttttcatcccccctgcatggcaatccattgaagattgcaataaacttgcattcatttccacatccccagattctagcacagtgcttgacacaagattttaactttgggaattgtttcattttccaatacaatgatttgtagatgaagaattgcaatgagaatcttcttgtgcactcagaaaggttgctctccaccatgggactacagtttgttagagggtcccctttcgttgcagtctttcttataaaaaacatgcttggtggggaatgcttctctgtgaataacttctggaagtccactgccaaaaacttcatttcttctgctttgttaaatactaatacctctgggagggatggcatttgaggcttggtgtgagggttgaccagttggcaggttttggtaagggtttagaaggaacagaatgcttatctgacaggagagggtaaggaacactaggaaagatatatggtggactcttggagaattgatttctaactctgacaggtgttgggatatttttgtctggaatcttaatgtaggtcattttttttcatttagaaaaacccacacttcttatctaaaaatctcagatgtgacttttttctccaatcctgactctcatctatgataaatttcatctagcgctacgttcagtgtaaaccactgatgccctagggaatttttttagatgtttgttttaaaattttagacagtcaaaagcacagtacttctacactgatgtttctaagttatattaagatttatcaggctgggcatggtgactcatgcctataatcccaacactttggcaggacaaggcagaaggatcgcttgaggccaggaaatcaaggccagcctggacaatatactgagactccatctctataaaaagaaacacacaaaaaattaagcaataactgaactatagggagctttcgctgtattcatggatcccttggtcttttcattgtggaaggaatgttttgtgaacttggggacagataatctgatggggggaggatcagctcctgagcctctgctttttgtttttcaacttctattttagattcaggggggcacatgcagatttgttacaatggtatattgcatgatgctgaggttcgaggtacaactgaacacatcaccctggtaatgagcatagtatccaacaggtagtttttcaacccttgtccacctcctcctgcctctttcctcccctctcttcctcttctctctctctcccaattcccttttgtagtccccagtgtccattgttcccgtctttacgtctatgtgtacccactgtttagctcccacttctaagtgagagtgtgcatcatttggttttctgtttctgtgttcgttcactgagcctgttttgagtaacaggagagaccgagtagagctttggaaccaagttgtgctcagaaacaagaaacgtctgtcctacagaactattatttgccttatttgaaaggaacgagaggctcctggtactgcttacccacagctctcacaattagccacacagactgcaagactaaagggagtataatcatattccagaatgcgtggccttttttctcctcttgggagtctaccgctatattatacttacccatcaccatggacacagctccaggagcattgtgaattggagttaggttcatctcttttgtggaagagtatgtcaggctgtctttctggaatctcttatctgagtgtctgtgatgatgctattcatggtaatttgcccagacctgggaccttgggtggggtttgttaggagtcatctggcacctttagagtataacttgttgagcaatctgacgcaggtaagccatgcgggataggtaaaacaattgttgtgttctgtgctctataatatcaagtcatattttgagtcatattttcccatggagtttgtggcccatcccaatgggaagagatttttaacactatgttcttgtgaggcctagtggtgttttaagggttgctattggaatctgaaagctgtgtgaattttttcgttttttatgttttgggttttcttttaacattaaagaatgattcatagccctgagctttgttaccaccctgttaataattttgtgtgactttggttgagcgacttttggacgctgatttctctagctgaaaaattatgtaaatattgttactatcatgagtagaggctctagagattaaaaaaattaaaacagcaaaagtattacagacaagtaaaattagagaaatgataaagtggagacagcaatagctactaaaatattcaaaagaaaacatgaagtaagacaaagaatggttgtctccaactacccctcttagttcaaagtctgtgcaatgatcttcactcaaaacttttgcaagttgagcacatcattcttattgttctttattatatgaacaataagttaatttgaactgattgtcaagggacctagttcttgccccagctgtgcttaaagtacaatctaagccaactcaattcacttttgtgacctctggtctcataataaaatgaaagcatcctacataactttacccatccactctccacaaaatatcccagtgctgtgaaaggtgtttgttaattcattttcttataataaaatataatagaaaatagagtgggaactatatttttttcctttggggaatccataaattacattttaaacgtgaggaaaacatgcagttttgatagtccattagcacattgaattctttaaattggaataggcagatgcagtgataagtttaaacatccatttaacatatggagaatgccattatagctgttcaaaatacgaaagcggtgtgatttccggcagatcagacacattttaaaaagcacccactcagaaaacttcctgagctcacgtttccctgtgcatgtggtttttagtgttgggttgtctctccctcataggctgacaaataaagagtccatatatcatatcccattagcgataagggaagacatggaaaaagcagaaccactgatggagcccaggagtgagttggattgtgctgcctcaaaatacaggtcaagacactaaggcctgaatcttgtgattttgtgctactgcacaattactggacactgatttatttataaatgaatgaatgagtgagacaggatctcactcttgctcagattggattgcagtgatacagacatagctcactgcagcttcaaactcccgggctcaagtgaccctcccaagtaactggcaatataggtgtataccaccattcccgcctttttttttttttttttttttacttttaatagaggcaaggtcatgttttgttgcccagggtggtctagatctcctcggctcaagggattttcctgcctctgccttccaaagtgttgggattacaggcatgagccattgtgcctggcccaggcactgatacagcacctgcctgaggcactagatcatgcaagaacaagaagaaaatagacttaaaacacagggagtgaaccaactataacaaccttttctttgagcctaatcaaagggacttcccctttttaagactgtagttgagtcatgcttgtgagtatagaaagaccatacatcaacagttgtgaacagaagtcggaatcatttcttctcttatggccctggcacctaaaagttaatgccaaatgatgcccaaagaggggtctgtgatgagcaaagccttctcctggccaggccgtggtgttactgtactctggaccagaggtacagctccatgacactttctcactcctgatgggaacaaatgaagctagttgtgttctacccattttgaatgtctggcataatcagagggttgacagagagggtctcacaaaatcagtacataattcttgaaatatatgcccttcattatttatgccgaataacaaattaaatgaatcctagtgttttagagctgagagcaaccttggagatgatctcatttaatgccattttatagaggaaaaactgaggcatggattttctttttttttttttttttttttactgaaaccactagtaattgcaaagttttaaatgtttatagcacatcatttgcttttgacattgctttgcagatcatctgagctgcttcctggctctccagtacattgtactaactgggaggatggggagacatttgctgtccccatggggaatgaaaaaggaaaccatgtgggatggggaggggcaagaaagaagaaaaacaagcttctctaggctccaaaaaatttgaaggaaataaagatattaagcacttgttagatgaagtgatagctacaaaacacgtaatctgtacaacaatcttatgagcactattcaacattaagctaacagaagaagtctcagttgtggtcaaaaaatagttttgttttttggcttctgttttttgcttttttttttcttttcctaggctgccaaccttagagaaatgatggtcaaactggggctgccaaggtcatgtattacagaagaggcagcaaaaaaggccttggcagggccagaaaggccagagaaggtcctgttccaaggatttcttggggcccttttcatcgaggccgcatccacatgatccctgaagataggtattccctcccattctgtttaagctgttagttttccctagatttaattctattgtaatattttatatccctataatcaggagatattttcaaattcaataataataatgataaatttaataagtattttccatgtacatagaaatttatagttgctaaagaatttttatatgtaacagcagctctttaaggagctgtactttacagaaaactgtaaaaactgggtcccagagtttaagtggcatgcccaaagtcacataattgggaaaacctcaaacccaggggatgataccccaagtcccaatgctctttataccaggcagctttacaaatgatagttgaattctcagggtagccctcaaagatccctttaacccataaaagtattaacttataccagtatgttaacctctaaccaactcatatttccatagaaacatgcattgggttttaaaaacttaggtaaatacattttctggacacatctccctgtaggtgaggactcctgatattctagcatcagtgggcgcttcttttccctcagtttgaaaatgcaagtgcaccaagagaggaatgttattataaagtatgggcaatctcaaattcattttgagcctgacacttttaggcagaataatggtcccagtatggtatacagttgtggaatcaagtaatgcagtttttaagttttttagctcattgtttgctagtcacagaatttggcaggacttccaagcatcttcctatctctcaagcacactggatatatgtgtggcagcttcatctgatccaattgcctacacaagaaaataacagtggcttcactgagggtgctcatgtaacaagatccagagacagccatttgagtcagcagaggaaaaaataacaaatttttgttaaaacactctctaatgcatttgcacaaactagttaatcaattaaatacatatcatcttcaaaaggggagaacttccctaagaacctggaactctgggtgagtatgttaccactgggggctaggaataattgcaggaaggaggagcaagaaaaaagtggtgtgcaccaaggatggacttcacatccttagttttgcttgcttgggggtaaggtctaagctatatgtttgtgtccattgtttggtagtaaggtctaagctatacattagtttatctcagttgggatcatgtgagtgaatggctcctttaccaagcgcatgttaatctgtcaccatagcagattctagaaagagcctgaagcacagagagtgtgtgtgtgtgccttgcaactcaaggtgtggtctttagaccagcagcatcacctagaagattttagaaaggcggattctcacacccctcaacggctagacgtactgaatcataacctgcattgtaacaaaattcccaggtgattcataaagtcaggaaagcgctgtcacagatgaacctgatagttaaaatgcttgttttcctctaattttcagaatgagaaaaacaaatgatcttcaaactctatatgctccccaagaaaacagcagtcaggaatttttccacccctgctgtcaatatcattgccttcacagccctgtgatatgattattttgtgtttattacctcggcggtcctaaacctttttggcaccagggaccagttttgtggaagacaatttttccatagactgggggtagggtggaggatgagggatggtttcgggatgaaactgttccacctcagatcatcaagcattagattttcataagcagcgggcaacctagatccctcatgtgcacggttcacaatagtgttcgcactcctatgagaatctaatgctgcagctgatctgacaggaggcagagcttaagtggttacccaactagacttaagtcctgggtggctgttctgtgtcttgttcacccttagaatcccagcacccaacatggtacctggaatctaataggtgtgtatggtggtactcaagagtcccagcttcaaagtacaacaaacatgggttggaagcttcagttcatacatctatgagatgggataaagaataacacctcttatagggttattgggaggagtaaatgagctgatgcaccagagcccctgatgtactgtagctactcataagtggctaatatgttgaacaaatgaaagaatagaaaccttgtatacgaagtcttcagaggtctgaaatgtggtgccctgttgcttcaaatatatgaaattgaatttaaaaacaatatgcaaaggaagcctgataaacataagaaaacggtagaatagatccatgagaaaagcctgtgatttggaatcacaagaccagtgtttgggtttcaactctcccctttactagctgtgtgatctcatgcaagaaacaagcttcctgagcctcagtttcttcacctaaagagtggagttagtaatcctcttcttttcatggcgttatgcttaaaaaaggggggtgggaggtttacaacttgcaacattcattcattattcatttttgtatcccttattcatttttgtatcctccttattcatttttgtatccctacctctcctgacaaatagtgatgctcaataatgcctgtttgctccaatggattacagcataaactctcaaggggaatgaaaattggatattgcaatggcttgtggcctccaaaggttaaactttatggacaaaatcttattccatagcatttaggggatcctaaaggatttcttagcatccttaggggatacaaagactccttgtgagtggggaggaggagtgaggaagatgatttttaaaaactttgagaagcacaattagagctctgactcttcaacttggtaccacatgagagctcttcaggaaaaagcataaggagagaaaagcagctaactaaaaggcaagcagagtgaacctctagaagaagtaataaaagaattaccatttcagctgggcacagtggctaacacttgtaatcccagcactttgggaggctgaggcgggcggatcccctgaggtaaagagttcgagactagcctggccaacatggtgaaaccccgtctctactaaaaatacaaaaattagcctggcgtggtggcaggcacctgtaatcccagctattcgggaggctgaggcaggagaatctcttgaacccagaaggctgaggttgcagtgagctgaaattgcaccactgcactccaggctgggctacaagagtgagactccgtctcaaacaaataaacaatcaaaatgaattacactttcaagatctgggtgatgtgatatatataaaataattttgcaaaactaagagctataaacaagtataattactaaaggaaaagcctttaagaaatattttcaagttgtatatgttacctggatttatttccattaatatattgatttccccagtagttgttttaatccctgacagtgtaattggggtatcggctccacaacttcactgggatatttcccagttgagtggaatttagcatgaattttttttctatcaaggaatttagttactgatgtggcccccaaaccttttgaaagtagattcctttgtaaggcagaccccacagcagggagcccaagagcaaggctgtttgttgttatgtcagcatcctggggtcttcacattggctcaaacaggaaacttatggacggaggctatgctaacattcccacaggtctctacaagtcccattcacttaccagcatttttctctctctttttttttttttttttttttgagatggagtctcactctgttgcccaggctggagtgcagtggcgccatctcggctcactgcaagctctgcctcccaggttcatgccattctcctgcctcagcctcccaagtagctgggactacaggtgcccgccaccacaccccgctaatttttttatatttttagtagagacggggtttcaccgtgttagccaggatggtctcgatctcctgacctcgtgatctgcccgcctcggcctcccaaagtgctgggattacaggcatgagccaccgtgcctggcctaatttttttatttttagtagagacggggtttctccatattggccaggctagtctcgaactcttaacctcaggggatctgtccaacttggcctctgaaagtgctgggattacaggcgtgagccactgagcctggccgaagttgcaattttttttttttttttttttttttttttggacagagtctcactccggacttggccaaaaatgttaaaatataatttgaaaagatttccacagagcacaatacagggcaaaaggtcacagtagcccttgatacccaatgtcttttcagcccttttgctactgtcagtcttacttagatttcacatgtaacccttagtatgttactgtgttccttctttgcatggtcaaaggaattacagactataaaaacagcaagcatggaaagcagggctttagtttccactatgacccaaacactaaacttgaaccctgggctctgaaatgaaacctctctctgtgctactttgacacgtaacatgcattctgccacgtaacatgcattctcccacatttcattattaattgcacacatgaggagaggagctattctatgcttacgactctattttcaaaaatatctgattaaaaatggataaaaggataagtgaaaataatgtaattatagaaacactttacagaactataatatatgtgttatttcccatatatgtagttttgtctcatgtaattttttgaaagaattttacttttgtacattgagcactataaatattctattctaaaatagaaagggcaatcttaaaaaatattttaattctgattcacatggaaagtagcagatggataaatgatgattccaagaagaaagggctaggctacatttgtacgaaaagaactgaatttttattttattgtaactatcattttaggtattttctggggattatcttttatttttatagaaacctaaatcatatgaccatcagtttataacatcattaccattcttaatatataccacccaaatccatttagcagtgagctataatttttttgaagtccttaaatatacaatatgggtcatttggtagtttgtctttctgaaggagaagaatgagttgtaccagacttaacccaagattcagtgtaatctgacctcctttactagccagatacgctcatttggtttttggtttccctgttgtgtgctcagctctgtgcttcctggcagtcttgccctggggaagttgcacaggagaggggaggcagtctgggcctcccctctgctgcccctagagaaggccctgagcccaacccaagaccattaattgaggcagtgcgtggcggcggaggcagagctctctgaaagattaatatctagtaggctccacctcaggattaatggcctgtgaccttctgctaatgctgcaagctgctttattcctagaaagctatggacctcccacactaaagaatgtgatctacaactgaagggattcaatatctcaaagtggccatggggagtttggaattcaggatacagcttattctggagatccaaagacagcttagtaaactccctagatgaaaacttgggctcaggccccagtagtgttctcttcttggaaaagctgtgaacagctggggaggtagtaatgctgtctctttgtgaggaggatgctttaaccttgtgttgaccagaagcctcactggttaaacacatagcaatgaagaaagaatgaaatcttctttcgatggcatggcatgatttgaaatatttttacaaacatatttttcattctgatatatctttcatgttcctgtagtttttgtggccagacatgaaagtagcagtctttgccagaggatggggggactccctagctaggatagaggttctgctgctatgccttggacatgggatgctggaattctggatttgtttgtcaaagaaagaggatttgacatttctagaggatggggaaaatggacctttgtagaaacagagaatgtgctttgttaaagagtcatgactcttatcctaacaaagatatttggtcttttcaatgaaaacaaaaccaacaaacaagcagagccataagccagagaaagcagctggcttatggctgctcatttctgaggagctgccctagtgctcacaatggctaaagaataaaagtcagtatgatctttccaaacgcgaagggggattttgcaagttcctctgtgtgtgttggcgattaaaattctgtcgttatttagtgtatggtccagttttgaatacagaacacctgccttgtcatccataaaatagtaccacaaaggataaaattccactccatacacgtacctgtagtcccagtgacttgagatcaatccggaggcaggtggatcactggatcccaggaggttgagggtgcagtacattgtgattgtgcctgtgaatagcctcttgtactctagcttgggcatcactgcaagaccccatttgtaaaaataaatgttaaatattccatttctatgcaaataaatgtggacattttataagattttgaaaattcctagatagtgtgaacttaagggtatgagagataagttaaaaaatacaggatatatcagctgggtgccatggctcacacctgttatcccagcactttgggaggccgaggcaggcagcctcacttgaggccaggagttcaagaccagcctggccaacatggtgaaaccccatcactactaaaaaaatacaaaaattagtgggtgtggtggcacatgcctgtaatcccagctacgcgggaggttgaggcacgagaatcgcttgaaccctggagacggaagttgcagtcagcagagatggagccattgcactccagcctgggcaacagagcaagactttgtctcaaaaaaaaaaaaaaaaagatacgtgatgtatcaagctgctatttcaaactcacttctggttttgaatatgtgtatggtgaattttaatggattaagaaggtacacgagggagaagggaataacagcaaagaaaattccaacataggcaacattggatagcagaacattggcagtggtttctgaatgctaagttagtgggtgagttttttttttcttggatctgtgcaaaatggagcaaactcctggtccatcttgcccactgctttggggcttttgcttttctttgaaaaggtaagaaaataaaactaatgtatcttgctcaattctagttcctgtccaattacctgatttaaaaatatatatattttgagatgattgtacagtaagatgtaattgtaagaaataatatagagagatcccatatattctttatctaatctgccatggtagcatcttgcaaacttacagcacaatgtcacaaccaggatattgatgtcaacacaatcaaggttcagaacatttccatcaccacaaaaatatttgtgttgccttttataatcacactcatttccctccagccctcaccccctcctcttaacccctggcaaccactaatctgtgctccatttctatagttttcccattttaaaaatgttagataaatggaattatgcagtatataacttttaaggactttcttttctcactcaacctaattctctggagattcattcaggttgttactttctatcaatagttggttccttcttattgctgggtagtattctgaagtttggatgcagcacggtttgtttaaccattaacctgttgaaagatacctgggtggtttccagtttggggctactatgtataaaactgctataaacaaattttcatttctctggggtatacgccaaagtgagcaattgctgggtgatatggtagttgcatgtttagcttttaaaactacaaaactgttttccacagtagctctaccattttacattctcagaagcaatatatgagtgatctagtttcttcaaaccctcgccaacatttggtgttgtcgctattttttattttagccattctgataggtatgttgtgatgtctcatgtagttttaattttcttttatctataggctaataatgttgtataccatttaatattatttgctttccgtatatgtatatcctcttcagttaaatgtctgttcatatctttttcccattttccgactaagttggtttatttggttgcattttgagaattctttattttagacactagttctttgtcagttattgggcttgcaaatactttcttctagtttatatcttgtatttacatctgcttcacatgggcaaaagtttttaattttgatgaagtccaatttaccaatttttcctcttccagattgtgtttttggtgtcaaggctgagaacagtttgccagccccgatcctaaagattttctcctgttttttgttttttctataagttttgtagtcttacatttcacatttatgccatgatccattttgagttcgtttttacgtaaagtgtgagacttgcagacaatgagagctctactcctgccaaacacagcaggagcaagctttgcctcactcctatccccacaagcaaaggctgcatgggaaggctagacttctatccttgcaaggctgggacttcttgagcacctaccacatgctaggtcctgaacttatgatgatggagtgaaagctctccaggtatttcgaatctatgtcaaatgactgctattaaggtattttagtgtggacatacagatgaaagagaaaggagatagatactggtctgccagactcaattaaaatctatccctttctagctgcatgatattgggcaaattgccccactactctgagcctctgtttcttcatttataataagatagttttgaggattaaattagataaaatatgtgaaatgactggtgcataaggtgttcaataaataatgtcattcttctccaaactgatccattgcggctgctggaaaacctagcaatggaccgttgtcagaaaatagaaaaaggccaattgtatacagacaattctgaattttctaagggctaattatctgctttatagataaactagaaaccttatgttcctgcttcgtagcttggtggccagtggcttgcacagctactgggtactattaaataaagtagataaatgaaaatttcattctgattcagttgaactttctggaaaattgaaggacttaagaatagaaactgacatggatgggaaccaatattgttaaaatctgaatttaggtttatcaactatcattcagttgtagaaagatataacgtattcgtaaaattaaattctgctgcaaaatatgtaaggaaattcaacttattgtatctgaaggaaaaaacttagattgtagtcaatatatcttaatttagttattgacactatgtacaccattcatgttaagttttctgatttttaaacaagcccaagtttattaattatttttgagatccttcactgagtagtataacaattcagttgtcacctttacttttattctcttgactcttgccattttgtttttcacctttttttaactaaacatctcctttttcccttagagaaaaactataaaatgccacctcctcccttttaattaaaaaaaataataattctaccagcaacatctccagacctgtgtctcggaataatcacatcatgttggatctatcacaaatattttatttttacacaatgattttaagctaaataaacaccaagtcatttctgaaatggtcatagaaaacacagaagagcaatgtagggcttaggtggaaagtggggaagagagttaaggctcatatgtatatgcaagtcaggtcattcatagcagcatccagttgaaacatagcaacctcctccgtaaccgttcatcccccaaacacttgattctcaaagcaaactcagactcctccatttcttagcctccagaattggatttgtccctcatcagtttactgtcttactgcctcatttagtcaaagcatattttgaaaataaataggtaattcatataaagaaagtcaattggctgtgcacggtggcttacgcctgtaatcccagcactttgggaagccaaggcaggcggatcgcgaggtcaggagatcgagaccaccctggctaacacggtgaaacaccgtctctactaaaaatacagaaaaattagccgggcatggtggcgggcgcctgtagtcccagctactcgggaggctgaggaaggagaatggcgtgagcccaggaggcagagcctgcagtgagccgagatcgcgccactgcactccagcctgggcgacagagcgagactccatctccaaaaaaaaaaaaaaagaaaagaaagtaaattactaaattactgcttattggtatgtacattttaaagtcgtttataatgcttatcctgttgaaattaaaaatctttttgactagaaaaagcctgtgttgatactaaatataaaacctggttaaacctaagtttggggaattcagtactttaattgatgttggtatttgataccccactagaggcactgctccttggggttatccgccgacatgattcccgtcacatcagactatcagggcaggggaaaaacaaaagaaaaaatattttcataggactgacattatactaaatttttatcaactattaatcaatataagaattgatctaataatatatattgagagtataattctattgtctggctgacttaatcactttcatatggtaagattgattgacttttggatatttggcgtgtattttttctttaattttttccattgctggccacacccactaaactaaattataactctttgcttccatattttcatcatattaaatgcttgcactctttttttcttccatttttactatcccagtgtcctgtttcccagaggaacagttcatttcaacagccagggagaaagcctggatgctcaaggtaaggtttatataaattacgttgcatgactccttgcttaaaaattaatttaaagtgagtagtaatattgtcattgtaacaaatttattttcaaaattccagtacacaattaaagccgatatttgagtaaatatgctcttttaaaacactatttttcaaatcaaattccatttcccaagtgtacgaagggctaattaattgctattagtaattcctccaaaaatggtcaagccaattaattaaagtttaattttgaaaaatcttatgataggtggggagggtagaatatcaagatatggtcaaaatgaactcatgacatcgctatttataaataaatgatttttatttgatattgttaagaatcaagaaagccactctgttggctttgagaggcagaaagagagacagagtgagagcgtgcgagcgtgcgagcatgtctgtgacagagatgacgaacctggaaagcctcatttttttctgtctgggatttgtctttgagatgcaatcattttgaccttcagttatttcgaactattactctaagtctctgtaagtaatgtcttcaagagtcacctccaggagcccttagaacaaaggaacaattaactgaaattccaccagatggcaatgtttggaaagccattcagagaggtcccaagctacaagctattattgttcacacagaatagtctcacaaagtgtggtgtaacatcctatatttcatcaaaggtactctaaacatcttttattttactcctatttctccacagcatcaaacatttttacttaaaaaaaaagtgtgtggggacgtatgtgttttcttctttcaaaaaaaaattctggaatgataaaattagaaacctcattcttgaatagtaattctctaaacagtaatggtgactattaaaagctcaaatcatgaataatataccatatttgttttggggcctcattgtaataaatgctatgactggtggtcactttttaaatatttgagaagagaaactgaaattcttccacttaatagcattttaagaagttgtcttgatattaaaatttgcaggtataaaattcactgtattgacttggaacaattagtttatttagtgtggaagaatagatgttttctcctgttgctctagtgaaagtggaaatatggagcacttttgtaggctgaggtgagcacattaccagaggttaggagttaaagaccactctggccaacatggcaaaaccctgtctctactaaaaatataaaaactagctgggcattgtggtgcatacctgtaataccagctactcgggtggctgaggcacaagaatcacttgaacccaggaggcagaggttgcagtgagccaagatcgtgccactgcactccagcttgggtgacagagcaagactccatctaaaacaagcaaacaaagtggagatatggtaccctgcatgatgttccaacagctggaatattcaggggccagagcaggctctaggacagagttgggacagggctcagtggaaaggtacctgagggcattagaaataggaagaaccaggaagagaaaccacctaagctttctgtgtctatagctgcggatcataagtgccctttgaaaactgatcttgtactgctagcccttatagtaggtggtccatatgtcgggtctgtatgaggcaatcctggttcaagtctgtgttcctggaaaatagtctagttagcactgcctttcaccctcaaaacgtttcattttggatgataaattatatgatcatcctatcttccaggctggtgaagaaaaagtaacaggaaaaggtggcccactatctaaatagggtgttgctttctaaatctccttatatatgggggtatgggacaaatgtgtttttaaagagccaaattgtaaatattttttgccttgctggtcatacaagtctcagtctaaactgttcaactcattgtagtgtgaaaacagacaaagataacacataaagagatggccttggctgtgttcagtaaagctatttacaaaaacaggcaatggactatacttggcctgcaggccatcatttgcgcatccatgatagataacagagatgggttaagttggtaggagatggcagagaaccaaagagagaaccatcattagtccctctcccttctctctatatcccttctgggttgcaccctcctttatttaaccctttcaggaactagtacagttgacccttgaacaacatgggtttgaactgcacgggcttacttataagtgatttttttttttcaataaatgcagtcaaacttccatatccgtggattccagatccgcaaccaaaagtaaactgaaaatacagtattcatcggtatatgaagccaaaggcagccagcttttcatattgctggattcagtgggccaactgggggacttgagcatgaatggattcttgtgggggaaggaaggttctgaaaccaatcccctagggaaagctgtattgatcatttccttgaatgagtaatcctatctgctattaagtggttcctgagattcctttactgggtgtcacttcttgtttctcatccaaatctgttcctgcaccacacacaacatgcttgtactttatacctcatgatgtataagactcaggtgacacctgagtcttagtgttaaatactgaagcaatagctcattagtaggcaatttaattttatgctttgatcctcactaaatagttatctttgggaaatataatcagtcacgttaaggaaaagttcatgtcgactataccaaattttttattatattaatgaaaagtaacataatacacttaaagaaaacctagaggagaaaatcacccataacaacaccatcctaaaataactatttttccatttttgcatatttggtcttctcacgggcattcctaattttccacagtgcatatcataatgagtgtgaactttgtattttacctactgtgagtcacagcatcttttactttcatgggtcatcagaactattattggaattgcagtataatgttatatcaacatgccatagtatgtgctttaattcttactatcttcccattttcactataaaaaatgctatgctaaatttttatacagatcttgttgttggtttggtttcgtttggtttgtgtctattcatctattttctaaggtcacaatcccagaagtgggattatctgtcaaggacagaccatttttatgacttttaatctagtttactatatttttcccagagatttggaataatttacaaacatttatagttttagggtactagtttcaccataacattttcagaaagcatttaatttattcaatagtatttactgaatgattactaactgtaaagcactgtgctgagtgttttggggtgtgtgtgtgtgtgcatgcacgtgtgtgtgtgtacatatatatatatgaatgatgtgctcattctacatttattttgtgcctactatcagctaggtattgtagtttttcaatagtgagcaagagatagcttctatctcagagcatttgactttactggggaactaagatatatgtaaacgactttagtaagaaaataagatgcaccataggagaaatacagttacagtataatgggagtttggggagggggaggtagagatgacatctgagctgagccatgaaggtgagttggtgtggaatactcagggatggtgagattagctattcattccataaacatgtattgatcaccaactctgtgccaagttttatggtaaaagctagggatatagaggtgaccaaggcagagctcttaaagcatactatctaatagtgtaaagaatattttttaaaaaatcattataagggtgataagcaggctagcttgcctggcagaagatacacaaggttagggatgaatgcgagtttcccctggaatgaaacttttccatggcttctcttttgtaaggcacagccttcatcatcagttattgtgtcagaatctgtgggaacatctgcttctggaagcttgaagtttcttgtaattgcacttgtactgaccaacattccaattaaagttggcctgcattgacagtcccctaaatgagtacatttactgagaatgcacggaggataggcctgggatcggtgagacctacaacttggccctcaccagatgatgatggaagtaaatcactaaaaattgtgggtttcatttgtgttttgtctttaaaacagctggaaggaacctcactgataatctaatccaacatctcattttacagatgaacattcttgagtgaggagagtttgagtgacttttctagggttagacagtggcattaccacagcaccagaaccttcacttctgattcttcttgttctatggtcactgctttaattagccctgcctcatctaaaccatagaggtagtaagaattaggactagattaacctaagcatcccttgtataataaaagcaataagataaattttacccatctcacaccacagtaacaattttttaatttacaatttttaattaaaattttaatttagaccatggtaggtcacgcctgtaatcccaacacttttggaggctgacactggaggatcacttgaggccaggggttcaagaccagcctgggcaatatagcaagacctcatctctctacaaaaaaaataaataaataaaaattaaaaacaattagccagtgtggtggcccatgtctgtagttgcagctattcaggaggctgaagcaggcagatcccttgaatccaagagttcaaggctacagtgagccgtgattgtaccactgcataccagcttgtgagctggacaaatagcttgacctcactaagctccactctcatcttcaaagtagagatgtaatacatcttgtttgttgtgagaataattagaggtaacataattgttgggtgcatcatggacactcagaaaatattgaaatattgattttctttccccttccctcctagagctacaggttcttcatgggattccttttgtttattcatcaagttgccttataagacttctgagaattaaatgatggaataagggtacatttataaactgtggtgcagagattaacgttctcatttctgagttttacttaactaggcttaagtagaggtttagagattttctttatggttccttttcctccttttcttcagtagcttatcttacatgttctatggatgtgttggtaagacttaagaattcacttgttttctctgtgttttaccttaaaataatgtgtcaaataaatatagagaggtagatggttagataaagaaaatatggctaaatgttaacaattgctgaatatagctggtgggtatgaatgtctgttatactattataagattttttttacccttctggaggtttgaaatgtctcaagcaaaattttttagagcattatgtatcaggtattaagcttctaccatggctccatcactgttcaggggcagagggtagattttgcgtgagacagtcagggttctcagccctgatggagatatggcccactgcagggaatgttaatgaaataggcagttccattccagagtgctgagtgctgtggtgggagaagtacaggatgccgtgggagtcctcagcagcaacagctaagccagaactggtgtgcagaggccagacaaggcttccaagtttcgaggcgtctaatctgagacccgaaggaaaaggaagagctagccaagtgttggggagaggaggacttcagagaaagggaaattgtttgggcagaaagagtagcagcttcaaagatctggagggaaaataagagaagcatttggcatattaatgaaattgaaagaagttaagtaatgagctgcagcattgagggaatagtgacaggtagggctggacagacagacagatcaggaagggccttgccaggctaaagaagaactcttggttgtatcataaaagatgttgaagtcctttaagcgtagaggtaaaactacctgttttatatcttagaatggtcactctgatggctgtgtaaaggaaagatcaggaagggacatgattagacagcagagagaccaggcggaagatgattagcatctggctatagtggtgacagctggggtagaggttaatgggtggatttgagtactatttaggtggcaaaaaaaaggaaaaaaaccacagttacttttgcaccaacctaatagaaaggactggggaaggaagacgtcaaggagttattcattcatctagcgaacacacagtgagtgcttgctatgtgttaaatgctgtttcagtgctatgaagagaagtaaagaaagggggacaggaatacagccggaggaggtgctattttatgtagggggaagtaatggagagggattttctagaggagaacacattgatctttaagggatggcaaagtgagaagtagtcacctaaagatcttggggttcagtgggatccctgggagccccacaagtggcagtgctgtggttggcagaagatagtgcccagtgtctggcatgagtaagtgggggctttggtgagtgttatttactgagacaggacacattgtaaacgtgaggacaagaatcagaagcccagtattgcccatgttgtgcttagggtgcctgtgacgttaaaaaagatatagatatagatatctttatgtatatatatggatttgagacctgaactctggaagaaaaagaaatgaattacagctttgagggtcactagcatgtaagcagtaagccacaaatatagataaaattgcccaaggagagtatagaatgagaaagggagtccagagtagaaccttgaaaatcaccaatatttgaaatgtagattaagaaaaagagagagtacacctatgttcacagcagcagcattcacagtcgccaaaaggtggaaacaacccaagtgtccattgagagatgaatggataaacaaaatctggtatatacatacaatggaatattgttcaaccataggtaggaaattctgactcatgctacaacatgggttaatcttgaggccaatgcgttaagtgaaatacaccagtcacaaaaagacaaatactgtatgattccacttatgtgagctatctagagtagtcaaattcatggagacagaaagttgaatggtggttgtcaggggctgacaggagggggaaatggagagttagtgtttaatagttatagagtttcagtttaggggaatgaaaacattctggagaaggatggtggtgatggttgaacaagaatgttaatatatgtaatgtcaccaaactgtacacttaaaaatggttaaattggtaaaattttgttatatgcattttactacaatgtgaaagtgagagagatgaagattagccagaaacacaagagaaagaccagttgagtatgctatcatggaagccaagggaaaatagcatttcaagaatagcagggtcaggaaatccacatgcccataaaggttatataaaataataaacactaaaaatgcctattgctttagcaacaaagaggttgttagtgatcttggtgagaataatttcaatgtcatgttcagaatgggagccagatgcaagaagttgaggaggaagggagaaattgagaagtggaaagggcaggtttagataacccttaagatactgactataaagatggagacagaaagcaggacctgtggggaagaagagttgatttaaggtagaagagacctgagtgatttaaacactgcctggaggcagccagtggacaaggcataggagaaactggtagaaagttacaaactagagctttttaattttgttaattgacaaatagttcttgtacatattcatggggtacatagtgatgttttgatatgtataatgtaagtaattatatcagggtacttagcatatccatcatgtaaaatatttataatttctttctgttaggaacatttaatattttcattctagctatttgaaactatatgttattgtcaacaatagtcaacctacaatggtatagaacactagaacctatccctcctgtctagctgtaattttgtatcctttaacaaatctctccctatcctttccttcccccaacccttcccagcctctagtatcctgtcttctactttttacttctatgaaatcaacttttgtttagtaatagctttcacgtattagtgagaatatgcagtgttcaactttctgctcctggcttatctcacttaatataatgacctccagttccatccatgttgctgtgaaagaccagattttgttctttttcatggcattgtgtgtatatactacattttctttattcattcatctgttattggacacctagtttgatttaatatcttgactattgtaaacaatgccacaataaacatgggggtacagatgtctctttgacataatgatttactttctgatttaaatataccagggctttgaaaaggcaggaggcaagaggggagaccatagccctttattgcaacaagcaagaatccgaataagatggcaatcctttaggtaaatatgtaggtttggggacagaaaagttaaattctggtctaatggcttcaataccttctataaagtcagatgcaaggccatctgctaagggaagagaaggtggtagggtcggagatataaggacacggaaaaagtattgaaacatctggtttatgaataatgacggaacccaaactagggaaacagaagggtgatttagaagcattgagatccactgggtttggaggccatcagtttacagttgtgctagtctcccgggcagggtgattttttttttttttttggtcccagcaggtctcggcagtctatataaggcatatatacctggcagataaaaattgtataaaagctcttctttggggaaacgtgaaaattgatcatgagggtgacacatttatttttaaatggactaatgctttatttctttctctttacaatgttgtaagagccaaatgactgggttaagagttgcaaattgtttggtttataatgagtttgttattggtacagagattgtaactaactctccagggccctctgttgactacagagattattggggaccaaccttaattatcaattgatcattgatcagagtgaaacttagaacaacttactgagcagtttgatggtgttacatcccccctcacaaacttgtattcccttttaagggtactgtggccccagggacaagcactgtgttgcatatacaaatacatctacactatgcttagtgcacctttaccacgttgtaaatccatggcattgccatagatttttgccttttgcatggagtaccaggatctagttaagtaacagtcatttttgctagccaaaatgtcactaaaattactctgaggttgacatgtcttatcaaaattttctgtacaagtaggctgtggtatatggaaagaatgctactgctgtctcacaggccaatgcctagaatgcttgtatatattcagacccctaaacaagaaatgtgtttcctctaccccccttcactttctgactttactttcctggccagagagtcactaagaataacaagtcctgccatcaacaagttggtgatagcctagggattctggtcctggtgaggttgagtacaggggaaggagcaagacctgtaaacagtccaccaagccaaagtggattcaccttcatttcctaaactgtgtaatacctgaacaccagacccctgtatataggggaaaacatgtgggagaataaactttatttgatgcctacggtgtaccagatactctgctagcaacttatcctcatatgttctacatgaaacttcgttgttgctttttacaaatgaggaaattgtttcagagaggttactgacttgttcaaggcatatagttagtaagtggtagagccaagattaggacccaagcgggtgtgaatgcaaatttgttatctaccctaacgaatcacgttttattttccttctagtcctcattcacataattttacacagttggtgggtgtgtatagggatggcagtgtgtgtgtgtgtgtgtgtgtgtgtgtgtgtgtgtgtgtgtgtgtatttttgcctttaagccctggttgggaagaattttttcctttctacagttgtcagatcatgaacaaaaattcagaacaaaccccaataaattgcagaaacactaactaaaatcaaatgctactttttacatttctacttttattttagattcttggggtacacatgcagttttattacctgggtatattgcacgatgctgacgttttgggtataactgatcctgccacttgggtactaagaaaagtacccaataatttttcaacccttgcccccttccttctgcactctagtagtccccagtttctattgttgccatctttatgtccataagtacccaatgtccagttcccacttatgagaatatgtggtattggttttctatatctgtgttaatttgcccaggataatggcctccagctgcatccatgttgctgtaagggacatgatttcattcatttttatggctgcgtagtattttatggtatatatatataccacatcttctttacccaatccactgtggatagactcctaggcagattccacatcttcactattgtgaacagtgctgcagtgaaagtgcaagtgtatgtgtctttttggtagaatgatttattttcctttgagatatatatatatatctccagtaatgggatacctgggttgaatgtagttctgtttaagttctttgagaaatctacaaactgctttcaacagtggctgaactaatttacattcccaccaactatgtataagcattcccttttctcgacatccttgtcagcatctgtcgttggttaacattttaataatagctattttgattggtgtgagatggcatctcattgtggttttgatttgcatttctctaattagtgatgtggagcatttttcataagtttgtttgccacttgtatgtcttcttttaagcaatgtctgttcatgtttttgcctattttttgatgaggttatttgttttttgcttgttccgttgcttaagttccttatagactctggatattagacctttgttggatgcatagtttgtgaatattttctcccattctgtagcttatctgtttactttgttgatagtttcttctgctgtgcagaagctctttcatttaatttggtcccatcatcaatttttgtttttgttgcatttgactttaagaatttagtcataaattattcctcaaggtcaatgtccagaatggtgtttcctagttttttttctaggattcttacaaagtcttcacttaaatctttaatccatcttgagttaacttttgtatatagtgaaaggtaggagtccagttttattattctgctgcatatggctagctagctatctcagtatcatttattgaataggaagacctttccccattgcttatttttgtcaattttgttgaagatcaggtggctgtgtccctttatttctgagttctctactctgttctgttagcctgtgtgtctgtttttgtacatgtaccatgttcctttggtctgtatatagccttatagtttaaagtcaagtaatgtgatgcctccggttttgttgttttttttttttttttttgcataggattgctttggctatttgagctcttttttggttccatatggaattttataatttttttctagttctttgaaaaaatgatgttggtagtttgataggtatagcatttaatctgtagattgctttgggcagtgtggccattttaacaatattgattcttccaatccatgagcatggaatgttttccatttgtttgtgtcatctctgatttctttcagcagtgttttgtagtactccttgtagagatctttcaacttcttgtttagatgtatccctaggttttttcttttgttttttgttttttgttttttttttacagctactttaaatgggatttcaaccttgatttgagtctcagcttgaacattactggtgaatggaaatgttacttatttttgtacattaattttatattctgaaactttattgaagttgtttatctgttccagcagtattttggtggagtctttagggttttctaggtgtagaatttttattattcatgaagagagatagtttgacttcttttcctatttggatgccttttatttctttctcttgcctgattgttctgggtagcacttccagtattatgttaaataggagggatgagagtgggcatctttgtcttgttccagttctcaatatgaatgcatccagtttttgcccattcagtatgctgttggctgtgggtttgtcatagatggctcttattattatgaggtatgttccttgaaggtttttatcataaaaggatgttggatttttatcaaaagctttttctacatctattgagatgatcacagggtctttgtttttaattctgtttatgtggtgaatcacatttattgacttgcatatgttgaatcagccttgcatcctgggaacgaagcctacttgatcgtggtgggttaactttttgatatgctgttggatttaacttgctagtattttggtgaggatttttgcatctatgtttgttagggatattggcatgtagttttctttttttgttgtgtctttgccaggtttgggtatcaggttgatgtctgataaaatgagttagggaagaggtcttcttcctcgatttttaaaaatactttcagcagaattgataccagttcttctttgtatatctgctagaatttgactgtgaatccgtctggcccagggcaatttttggttggtagggtgttgttttggtctttttttttttaattactgattcaattttggaacttgatattggtctgctcagggtttcgatttcttcctgattcaatcttgggagactgtgtatttccaggaatttatccatttcctctagattttctagtttgtgtgcatagagatgttcataatagcctctgaggatctttggtatttctctggggtcagttgtaatgtcacctttgtcacttccaattgtacttattttgatcttctttttttctgtgttaatatagctagcagctattgatcttgtttatcttttcaaagaatcacctttaggtttcactgattctttgtatggatttttgggtctcaattttattcagttctgctagattttaatttatttatattctcctgctagctttggggttagtttgttcttgtttctctgcttccctttggtatgatgttagatcattaatgtaaggtccttctttttgaggtaggcatttagcactatagactttcctcctaacactgcatttgctggatcccagagattttggtatgttgcatgtctgttttcatttatttcaaagaatttttttagaattttttttttatttctgccttaattttattgtttacccaaaagttattagggagcaagttgtttaacttccatattatgtacctttgaggagtcttcttggtattgatttctatttttattccactgcggtccaacagtatgtttggtatgattttgattttcttttaatttattgagacactttatggctgagcatgtggttgatattggagtatgttccatgtgcagatgagaagaatgtatattctgtggttgatgagtggagtattctgtagctgtctattaggtccaattgttgaatttgagtccagaattcctttgtcaattgtgtattctgtggttggtggagtattctgtagatgtctattaggtccaagtgttgaatttgagtccggaatttgtcagttttctgcctcaatgatctatctaatgctgtcagtgggatgttaaagtcccccactattatcatgtggctagttttatacagttgtaaccaggccttgtcatattttattttcttcttctttactttatgtcataagcagttttccatgctacagtacatattcatgattgtagacatgttttaatgtgtgtcaaatagtctgtagagttgaccattatttatccaacttgccattgtttgccatatggagtctgtttcaaagttaactttggtgtgcctgaaacttatagatcataactggttaaataatactctgagtggcaatctcatacctatgtgtccccatatccctgtgaatataacatgttttctattacagcgtggaattcctgattggatattacctcagatttttaaaacctttttcacatgtataatttttgctttccaaataataatattcttaagaacaatggatgaggcattctagtttacttatctccccagacattagatacttaatacatacttctgagttctgtaaaatcagctcggcctcaggttgcctggctacttgtactgtggatgacacagattttcagcaccccttacctcaaatatcattctgcttaaaatgtgtgcatgatgtgtttgtctctgttctaaaattagctgtgcttcagtcttcaagaaagcaattcagatgaatcacagattatcaggataacatcaaactacagaaggaaaaatgaataatacaggtcaagataagccccagagtgcctccctaaagaactcgattctaggccatgaggatattttattctccagctggactctaaatcctactttggatgctgatgtgttattctgttatgatttttcaaggcaatgactatgctttatatttggttggtagtttctctcatggaattctttaactttattttcgcccttggtgagtgccatgttcaaacctgtgtcaggtaatgccattcatgcaacattacttcggtttataagctggcctgaaccatttgcaccctcttttagtgagtgcttagcttagagaaaagctttccttggcttgtcaaaaaaaaaaaaaatgtgcagtgagtgcttagaacatttgtatactgatattattgcctctgaccagaagcaacctatttctgtaaaggtgtcttcgaataagactatctaaccactcttgcctcctactcaagaaaacgtatcccctcaattataaaataaaaatttcctggctcgagaacattactttatttaaaaagctgtgtccataaatttgatattttcgttgtatagtgagacataaaaacatgaagcatttgcttttaaattttcatttaggtaaaatgattttagattatatactaaaaatggcagagaagaaaattctggttggaaaaattgccattgctggcacaagaaacagaattatttgtctggatggaactcaatacatatttttaactgatacagaattaggggtatcctggaatgttcaaaaagacttcagaagatgtggtctttgagccgagcctgcctgtgtaaaatggtagatgaaaggaaaaaggacattccaggcgagaaatgaaatgtaggccatctcaagggggcagagagaacctggtactttagtgtgaataatggaggattaaggaagaaagataagctagggtcaaactgtgcagagtcccaaataccagaccattacttaagctttatattttagacaatgagggaaatgttgaacatgatgcaagtatattctagaaaaattcgtgagttttaagatgacagtctaaatacagttttgctcccatcttcccagctcttcaactgaaataacaaaatttaaaaaggagagcaaatccatgacacttacagaaacatgaatggggaccagaaatggacaaagttctggaagatggaaagggcataggattatattgccagctaaataagagcaaaaattgaaaaagaaataaaatagctaatttagatgaagtaattcagagaatagaagaaaacgtttaataaatatccttaaacagacaaaaagtattgcatcccttaaacttcacggccccactcctcccagaaaaaaagagttgctatgaataagaggtaatcagaaagtgcaagagctttggcgaattaaaaatataattaaatcaaaaatcaattggacttagtgtggctgagagtatcacagggtataaagcaaaagatgaaaagacagaaaatactagaaaagtattagagaaatagaagaatgatctaaatggcctggcattctttatgaagagtttcaagaagacattgaagacaaagaaataaaggcataaagattcagattaaaagaggctactgaatgttgaccacgatgaatttaaaaaacccaaacctaggtccaccctcatgaaatttcagaataaaagagatgttagagcttgagggtcagagagaagagtgattacatacagaagagtgatcacctgaatgttatagacatcaatatgcaattctgaagcctcagaagcagtggaaccatgctttcaaagttctgagggaagtgattttggacatttcaactatcaataaaatataaaaacaaatagataacttctaacatgaaaaggtttgaaaactttacgtctctgtatctctcaaaaaataatttctagatgaactccagcaaagtaaaagagaaaaaataaagaataacataacatctaaaaatctatggaactaatgaaagaatccaattacaagaagtataagaaataccaggatgctagcagggatatcaaagcaatttgttcaaattagtaagtaagtttcatgcagaatgttttgaagaaaaacccagattctatggtttatacttagacctagaatctgagtattttttatcataagataacggtatatgcttcttctgtcaataaaaaagtagttaaaagctctagaaaaaaatatatattaagattcaagtttaatcttaaattgaatcatgcttttgaacaataaatggcatgtgaaaaaaatccatttgactttgatgttttcattggaacattcttcgggttgcaagatttaatgagaggattatattgccttctctatggaggtaataccacttgattctggagaggataagaaattacataatcataaatcctctttactagatttcaagcttagaagcaatctgtgtcaaaacagggaagataaccatagtcacagaacataatgtagatgctagtcatttttataaagaaaacacaatgagaaaaccatacaaattcaaagtaggaaaggctgcaagaaaacacagtagagagtcaacaggtactgtgccttggaatcagccaagaaatataattttaagaattttacttaaaggttgtaaaagtaaccactagaataattaaaactattaccaataaaattcagaggggaggtgagaagtaattaaaatgtgtaatagaagcactataaatttcttttataatacaaaatagatactgtgttgataagaatagaatatacctgaatttttagagtgacactcataagctcagaaaaactaaaaacagaaataagtttaaaaacattaactctttaaaatgggattgggtaaaggcaaaggataatagttaagaaagatgtttacttttcatattatacattctgttcctcaatttttaacatgtgtctgtcttattaaaaatataaattgttggccgggcgtggtggcttacacctgtaatcccagcactttgggaggccgaggtgggtggatcatgaggtcaggagatcaagaccatcctggtgaacactgtgaaaccccgtctctactaaaaatacaaaaatttagccaggtgtggtggcaggcgcctgtagtcccagctactcgggtggctgaggcaggagaatggcatgaacccaggggtcagagcttgcagtgagcagagattgcgccactgcactctagcctgggcaacagagcgagactccttcgcaaaaaatatatatatatatacatatatatatataaattgtttacatatattaatggattggaaggaaggggaatagaagtagagagattcttggaagttattgcagttgtctacatttcaggtaacatgaatctgttggaaatgaaagattgagagaggcaattggagaagaattggtaagatttggtggtccagtagatgttctgaagaggacaggttaaaaaatgaatatgaagcaaagatgaataatatttttagattcattaaagagataattgaaactgaagccactgactaaatgatgcccaggataattcttaatttttttatttactgatgccttgctgtttttcactgagtactatgtctccaggatagctgaggaatcaaaatataaccattttactatattgtcaaatattgtcaagtatgtaccgtaataagaatatgacaacctaaatttgttttttatttaatcacaaatgtcaaatatactaccataaagaaccaccgtagggcacagtaaaaaataagttaaataacataattttttggtcataatgttcatataaacaaagcgttgatgcttcaggctaacagtgtatgctggctctatcagacacctttcaatgatttggtttgtagcagggggaaagtgcccaagtgttattgcattagaagcactcagagttctggagctatcttgttctggtaccatgagctgggatttttagcaactttcaggtctttgtcctcgttcctaaaggtttttaaactcctaacttgaaactaggaggaatagagattttctccaacccctctgtaaatgatgaactctgtgtccctctcccttttattcatgctctgacagcatccttgactcatgaagtatcttttgcaatagttgctgaaagccttttgactataaatgctgttttcttcagaatgaagtagaacaaagcattttatgcaaatgaacctatttcagttctattgataacgatataacttgcttttattcagtaaatgaagaagagaatctgaagatgaataaaatttactacgagtatctgcagatcaggatctgaaagttaatttaaccttcatttcccattttggagagaattataatcatgcaaaaatttggttcttacatttgcctggctgatattcaaggggaatttagaaatagaccttttcagtaaatttagtattgtcctttatatcatagacaatgttaaggatggcaacatctctcattgctataggacattctcttttgtcagataaactagtgctaacctctgaggggactgattctttaattcgttgctgcttgttttctttctccatgttgtgagtagctattaatacaatgatgaatttgcttggagggtgagtgagaaaaatataaaaaaatacaggttaactataaattttagaattatataattgggaaacactagagggttattctgaagtctttttagtgaaatccagcttctcaccttgattagtactagcaaagccatatttctactcttgatcaaatgtgtcctttatagagtatttgtacaaagcatgacataagcatggatttgcagctgtttcataaccactgtgaagtttcttggctctgctccacagcactgtgtccaagtttcaggaactcttctcaagtactgtgaatgtggaaggaggccacttgtggaatgatttactttacccagagttgagtgttttgcgtgcagaatgtgaagctgctgttcagctggttgtgtccaaatgtaagtgactggccaaagaaactttttttggagcttgtcatccagcctcaaaacttaccctctgtggatctttgcatgttctaaccatcaataggaaatagcaatgctataacttttcatttcttccagccaataatcccctatgaattttttagctgatattttaatgagcttaaaacattgtgattctgactttaatgatgtactcgattgtaattaaagcagttataaagatgagacagtcgtggctgaatgttcccaactctatgtgctcttcaccctaggaggacagggactcagaggtaacaactcggatactgttaacatttacatcatcagaattcatttcactaaattgccatcctctctgtagttttttaataaagcaagctgaagttattttcaaacagtagcttagaagtctagcagttccactgaacatagtccagtggaataatcagatgtagtaatagattcttccaagagcatttatgaaggattccaaataggaatgtttacaggttcttctctttgtttaccaagtacagaggaagctttgcttatgctgataccaggtggcaaaactaacattccaggttaggccgaaaccaaattcaatcttactctttctatacacggtggggcataagtttctaaaggtagttaggttttacagtgccaaaagaaaaacttagaatttttgtcttgaaatgatagggaacccctgaagacttctaaaaatgaaaggagggaagatagagctggtggtgagatgtgaattgactgtgaagcaaggaaacctctccagagagactcatgaggtaggtgagaggaaggagcgtgtctgaagcagggtgtgagcagcgggagaggaatgggcaggacatacctgtccccctgtgaaatgaacaggtatgatgtctgaatcagacagatgggtagagagggaaaaacattctgaggattcaaagctaagtgctggctatcagtttagctcaagcaggagatctggagagggagccaagtaggagagaagcttcctcattaaatgtactgtgtattgtctaaaccaatggccgcaacctaatttctgtgcatgcctctgacctgcttattcagtaagtgagagaatgcagcgatgaatatggacaccacaccacagtctcacatttttacaaggtgcttttggaaacctgaatggagatttgactttttttttttagttgcttccatggcaaccctccccatgaaaacaggcgcagtctgcagaggcctgttcttttctgttgatgtttgtcactaccacatggggtcaggtttgttctttctccctccccaaaaatatttgctagctctgtggaaaaactgctgttgccctaaacagtttacctgcatctgtaccacgctgttcctgtgccaaggtgactagggaccttctgtgtggctttggcatccctcagtttccagatataaagcagaggacaggttccctctactctcaaattcccatgggcatggctggggataggagagcaggcagagtccctcttcaaggacactcaccagctcctaacccaacatctctaaccagtcatgtagtcttgtggcttatagtacgaactttagtttctgaatctttgaaagatcttaagcttttgatacttgaaaatgagactctgaggctcataaacatttcttcagggttttttctctgccatgggcttacaagttgattttgaaactccgaagttgaacattcattcttttcttcctctcttgcattcctgccccatgctgaaaactcagcgagtaaagaaggttcagcaggtgtgtgtggcaggttttccaaagtgggttactacaatctctcccatcccacaggttttcttgcagtgtgagattgacattcctcctagttatgttaccagtggtgttgatagcccttcctcttgaatctgggtggaactttgtggcagccctgaccagcaaaatacaatggaagtgatgctctgtgacttccaagactaggttttaaaactgccatgcccttctgcctgctcattagggatgcttgtgctaggaacccagccaccatgctgtgaggagcccaggccacatggggaagccttgcataggtgttccaaccagagccccagctgaggccccaattaaaaggcaacgtcagccaccagtcatgagactgaggaagcctttatgaagacttcagcagtcagtcaccttccaaccatagctacatgagagaccatgggtgacaaccacctagccaagcccagtcaacctccagaatgacaagagataataataaaatgattattgctattttaatccaccaagtttagagtcacaatagagaaccaacagggtttttctgttatctgttaatgcataacagcctaccacaaaacttattaacttaaaataaccatttgtcctacattatggttttgtggaccaggagttcaggaaggtcttggttaggtgggtcctttctaatccatatatccatatagtgtcagctgtggtgggtgaagatgcaggatgcttcctcagtcacatatttggagccttggtactctttgtggtctctcctctcttcccctccctctccatgtgtcccaccctctgggcctctctacatggttggtacttcccccagagtagctagacttctcacagggcagcagacctgccttcttacagagcagcatggtagtcccagggtagctgaacttctcacagggcagctgacctttaagagacaaaggcaaaagctgcctgtcattgtaaggtctaggtcaagaactggtcggcatcatttctaccaaaatctattgatcaaagctgccaccatgattcaaagggaggagaaataaatccaacctctagaatggaagggtaagaaaaaattatggccacaggggcaaggcaggaacctaggtttatatctcaaaatgttaccttacaaatcttattatacctgttttatgggtgaagaagctgaagctagaggagttaagtaatttggccaaggttacacaacttgtaagcacttggattcaaatccaaagcatatgcatcaaaaccatgaactctgaattttgctattcttctatgcaaaatatagtaaatatataatgtatactatattttcttaattccccagtactaacttttataaggaagataacatcccccaaccccccaaacacatacacattacagctctaattttagaaaaacctagagaactattctaaatgacctgatttgggtcataggcctatctctgcatcaatcctcagggtctggaggatggaataattatatttggcaagctctgctacaaccacaaggattgaagaaataatttcccgaaagagggaggagcaaacaaaataatgttcactgtgcatgctctttatactgcaagccattatttctcattcatgatttcattgcatcattgaaggcagataggatctgtcccagtgagactggaattgtgggctggtgggaatggcgtgaagacaggctgtgtagagaagttcattccaagcattgattctagatctatcagctaactattaactcattatgtctcacatattaagactaagacctctggttttcctagggggctgattcctttatgtagaagttaaatggaggcttcttaaaggaggcccattatgttttcatgtgctacactatgcagttggacccttcatttctactttctgtacatgttgagtcaatgtgaattgagaataggaagatgcttggtgtctaagcacttgaggaaacaaaacataagctctaattaaaacatttctgatgggaaacttagtcttacttcatgatttccagttgcattttttttcctaatgaaataagctgctttaattttctttttaaaaattttatttggatgaggtcagaaaatgaggaatttctcttccattactcacactgctttccagctgccggcctcatgttcccttgacacgctgtcgaggagccatccagaagccatagctctgccatggtacacaccagacttgacagagaagttccaggctcaggaagacgcttccttccaatgtccctggttgccacttgatggcctgggttctgagtagctctggaactctggaagtccctggtacctgatggaatgaccattgccccactttctcctgacttcctttgtatgtatattaaggagttgccactcagcttgcactctttaatatcaaagtcagaaataaagcccagtgagttagttgatttttaagaaccctaaggaaatcttctctgggaagcttctgaatcgtctgcaagataatttatttgttagcagtacttggagtctcttcatttctcttgccacccaactgagcccaaggtgccttttaatcccttttagctgtcctacgcagtcacttcaacaagatgcattttattttaagatggaaataaaatagagaaaggaaatagaggaatttcataaaattggacatagacacgttttaacgagagcactcaaatagacatgtctgtatctggatggttgaattataacagtcttggcatagtgaaaatgaaagcagattgtagctttgaatacaaataccaaaaaaatgcctgcagtttcctttccctccagaaggtatcaaagaaatggacattgctagctgacgcttactgagaaataaaatagctaatcactatataaggacaagaaaattatttttttctctatcaatcacatatactgctaacaccaaatcctagcatttcttcctccttccccctccctttttcttaaccataatttacagctcctctccctccatttctttcaatctctcaccctcatggatactgctatcctgtacagcctcccatccctgggtcctttttattctctctgtctctcagcccttgtatgtttttatttccttgcttcctacacggaagtgccgttttatggcagcagtctcttgcctctgcaaccatcagctatctcatccctgccactccccaccctggattctgcattcttccttccaggttaatcagaccttagtggaaggtagactgagctagggaaaaagaatgacatgtttgacatctggcaagtgtgtttgtgctcagctctgccacttcctgtctggttatttggctaagttattgaactagttacctcctgtgacaattgggacttagaatagcccctttcttgtgagaataaagtacctcctcattgttaagcatagcacttggcccataaaaagtattcaaatattaggtgttgctattaatgtgattagagaatattccacatctctgttgccactactaacactcctgcaaatgcctggtttctaactttggttttaagccaagttctttacaacagactttaaaagccctgcacattctggtttctctgtgatctttctgaccttatcttctacagttatctctcccatccccacaatacgcacacattcacactcactgtgctacatacatgtgacctgacttccttaatgtttcttgaacaaatcatgctcctacctcagggcctttgcactttctgttggctctacctgaaatattcttctgatatcacaggtctatgtccctcacctctctcaggtcatcgattaaagattatcttttcaggaatgtctaccctggtcaccccatttaaaattacaacacccttcctctgcagtccaagtcctccttccttgctttagttgtctctatagcatttgccaccatctgacacactacatattttacttatatattgtctgtctcctgaccctaccacatacacttgctcatacactcaagtgtaagttcagggaattttgtctacaaatttctgcatctctgatgtctagaattgttcctagcacatagtaagttctcaataaatatttgtagaatgaatgattgaggactaattaaaatattactatcttaatgaagcttttctagtgtccccaggcctgactactttcttttctatattcctaatacttaatacacttttcattataacttttatcacattgtatttttatggaaaacacatttaaagctcttaaatttagccagatggtataattcaaaagtacatttttgtttaatagactgaaacctcacattgtacagatttgattgaatgattacagaaatcataatgctctgagtatttttaaattgcattcacatcatgttctatgagttattctacaaaattaaatccaagcttgagaaaatctaagaaaaagcagattagaaataaattccaacacagagagaaatcttgtctcatgcaatggcatgttctgtgttttcacatcatggacaccttgctattttgctagcaagtatgagacttaaaaattctgccttttgagcataaataatctgcaaagacaagtaatctcaaaagtcaattctagaggagcatacctgtgcatgttggttttgaagaggctttcttcatctggaggaaaacattattcaccaattttttttaaaataaaatgctattacttaaggccaggaggtatttgcatgtcatggaaatttcaccagatccagaagaactaataaaatcttcctatgcctctgggtgaaaggtagtgaggaagaaccaatctcaaatacatttctgtgccaccagtgcaatttcagtgccggtaccactggctggccaaccatatactttttcactgctatcattttgggtgtggagcatatatttcagccattgataactactgtacctgccattccctactggaaaatatcttaaaatatacacatgggggaaatggcttgtcctgagccagcagaggtgactgctaagtggaatcttctgtctgtatttgaggtgataatgatctaaggaagccccgatctaaggtgatgtgacagctgtgaatgcctttgacagcagtgattatcagcttcagtgaacacatttttaacctgaaaaaaggcattcatgtgatgagtaggtgtttctgggattgagtcaagattaacattcattcctggctagggaattcatgtcttctctgctatcatagttgagaatttctcaagtccaaggcaatgcaaaaatccctgttctagatgaaccatatgtgttggagaagtggagggatgatgatttctgtcaatacagaattatttgtactctctggcctaagttctaagagaaacatgattgtgctataagctagggactcgaaattaaaattcgagttaatgccagggttcagtcttcctcaattgcacctgtgtgctgggacctcttcctgggtttttttttgttttgtttttttgtttatttttggctccctgttctcatgcttccagctctgtatcctctgggtccattttagaaatccagctctccaaacaggcactttaaacatttgtttgtttgtttgtttgttttttatttttggtggatctagacctcaagaggggcctgaaagtaggatcaattcatctgatgcctaacagttggtcattaattaacatatccttcctgtattgctgggagctttttagtacagatagttgctgattcccattagttgcagatacgttagatacacccttgatttagtatatctcttcctggaatatcttgcttcagtcataaaattcatgtttttatgaaaaattgcagtggtcaccaaaaaagagaattttagaccaatatccttgatgaacattgatgcaaaaatcctcaataaaatactggcaaactgaatccagcagcacatcaaaaagcttatccaccatgatcaagtgggcttcattcctgggatgcaaggctggttcaatatacgcaaatcaataaatgtaatctagcatataaacagaaccaaagacaaaaaccacatgattatctcaacagatgcagaaaaggcctttgacaaaattcaacaaccttcatgctaaaaactctcaataaattaggtattgatgggacgtatctcaaaataataagagctatctatgacaaacccacagccaatatcatactgaatgggcaaaaactggaagcattccctttgaaaactggcacaagacagggatgccctctctcaccactcctattcaacatagtgttggaagttctggccagggcaattaggcaggagaaggaaataaagggtattcaaattaggaaaagaggaagtcaaattgtccctgtttgcagatgacatgattgtatatctagaaaaccccattgtctcagcccaaaatctccttaagctgataagcaacttcagcaaagtctcaggatacaaaatcaatgtacaaaaatcacaagcattcttatacactaataacagacaaacagagagccaaattatgagtgaactcccattcacaattgcttcaaagagaataaaatacctaggaatccaacttacaagggatgtgaaggacctcttcaaggagaactacaaaccactgctcaaggaaataaaagaggatacaaacaaatggaagaacattccatgctcatgggtaggaagaatcaatatcgtgaaaatggccatactgcccaaggtaatttacagattcaatgccatccccatcaagctaccaatgactttcttcacagaattggaaaaaactactttaaagttcatatggaaccaaaaaagagcccacatcaccaagtcaatcctaagcaaaagaacaaagctggaggcatcatgctacctgacttcaaactatactacaaggctacagtaaccaaaacagcatggtactggtaccaaaacagagatatagatcaatggaacagaacagagccctcagaaataacgccacatatctacaactatctgatctttgacaaccctgagaaaaacaagcaatggggaaaggataccctatttaataaatggtgctgggaaaactggctagccatcctatgtagaaagctgaaactggatcccttccttacaccttatacaaaaattaattcaagatggattaaagacttaaacgttagaaaccataaaaaccctagaagaaaacctaggcattaccattcaggacataggcatgggcaaggacttcatgtctaaaacaccaaaagcaatggcaacaaaagccaaaattgacaaatggaatctaattaaactaaagagcttctgcacagcaaaagaaactagcatcagagtgaacaggcaacctacaaaatgggagaaaattttcgcaacctattcatctgacaaagggctaatatccagaatctacaatgaactcaaacaaatttacaagaaaaaaacaaacaaccccatcaaaaagtgggcaaaggacatgaacagacacttctcaaaagaagacatttatgcagccaaaaggcacatgaaaaaatgctcaccatcactggccatcacagaaatgcaaatcaaaaccacaatgagataccatctcacgccagttagaatggcaatcattaaaaagtcaggaaacaacaggtgctggagaggatgtggagaaataggaacacttttaccctgttggtgggactgtaaactagttcaaccattgtggaagtcagtgtggtgattcctcagggatctagaactagaaataccatttgacccagccatcccattactgggtatatacccaaaggactataaatcatgctgctataaagacacatgcacacgtatgtttattgcggcactattcactatagcaaagacttggaaccaacccaaatgtccaacaatgatagactggattaagaaaatgtggcacatatacaccatggaatactatgcagccataaaaaatgatgagctcatgtcctttgtagggacatggatgaaattggaaatcatcattctcagtaaactattgcaaggacaaaaaaccaaacaccgcatgttctcactcgtaggtgggaattgaacaatgagaacacatggacaaaggagggggaacatcacactctggggacggttgtggggtggggggagaggggagggatagcattaggagatatacctaatgctaaatgacgagttaatgggtgcagcacaccagcatgacacatgtatacatatgtaactaacctgcacattgtgcacatgtaccctaaaacttaaagtataataaaaataaaaaaaaattgcagtgcctcctacctgttaaaagatttcattattttcttcagtagttattgatgtgtctgacctgaaacccagcctcttaaaaatatctttaagaacatcttatcaaatctagtaaacatatctctttccttatctgattcatactctctgtgacatttgaccttagagacctctccctcctttgtgagacctgcttctcctatgggcccactgaaatcactccttcctgtgatttgccctactaggtaaaacccttcacagtctctttttgcaggtttctcttttatcatcagcctttaaagagtttcatctcgggtcttctctttccccctgaatgagagcgctcacagctgtaatgaccacctgttacgtaacttcctccaaataatatgtgtctccaagtcaaacacacctcatcacattaagacctatatattcccttattcaacaaatacttagtgaacacccatactacatgctagtatttaccactagcatgttctagaggtacttctctatgtccaaaacacattatgagaaactttatcgcaaaagaacaatttaatctgtattccttagcttgataaatggtactattatctacttggccactcaagccatacacttgggattcatttgagatgtctcttcctccttcattacccactcttaactcccaccgacgattgcatccacatccaattagtcaccaaatcctgagttataccccatgaattttacgaccccttgcctctgtttagtttaggtcttcaaaataagtcaaagagtgatgaagacctaaactgcttcttcagtatatccaccatactactgtcaacatcagacttttttgttatggtgcaagtgtcaccgtaaatttcccttcctatggcactttgtggttccaggtcaccttcagaattaagatcaagctccttagcttggccataagacctttctgcaccttcatccttgccccatctcctaccactgtgtttgccgtccatactaaacagcctgctgtttccgagagatgttataaccttccctacctctgtatgtaggaatagttgcatgaaaagccctttatcttccctctacactgccattcctcttttaaatgacaatatagcctaatggataagcatgtgaacttttgggctaagaaaacctaatatccaatcctgaatgagttgcttctctttgagcttaatgttttctcattagggttgttgtgagaatcaaatcaaatgatatttgttgaataaatgaattgattatatattcattgagtgcctactatctgccaggtcctgttctaggaactgcagatagagcggtgaacaaaactcctgaagcccttgctctaaggggtctcacattctgtctggtgcatagaaaatgaactataaagaaaaaggttactattattattactcatccaagattttaggtgtacttttcggacctacttccaagtttccattctgacttaggtgctcaccttcgatggtcccatcccaccctatgttgcaccattgctgtagcacttgtgttgtaatcataattgacaattatttttacccttgctcacctacaacactgagagttccttgaagtgaaagcctgaggcttttttttttttaccagctcctagtatacaaggaagccagttttaagtttcaaatggatgaatgaatgttttaggatatgcctaacatgttacttaaaaattacatttaccactaaagagcatttgctgtatagccactgggttaagtgctttaaatacattatataatttaatctccatctccacagcagcactatggagaaaccagcattattaccctactttatcgatgaggaaactaaatgttagagatacaaagtaacttgccaaggtcatagaacctgcatctggtgaagtcaatcccaggccccaggccccctctttaatgctgatgcttggtgacaggagttattttccaataggcagttggaggtgaagggcaatggtcagcacatgctttattttagatatgccagcacatgctttattttagatatgcctgtgtacataagacaaaacctaaatccacagtcatacgtacaaacacattttagcttattttttttttcccttaggatgacctgggtaattctccctaccctgctgggtagtggggaaccggaaatagtcttaaacttgctagttcacagtattacagcctcttccattttagaccatctttggatggatggcttcatctcttgggtgactattcgatctctatatatctttcctttccccagcccctctgcaagatggtgtctgtaggaatatgtgagtggggcttataggagcacaacagggttgggagagtaggggcctcctggtctcatgctggttcttgggcttgtaatatctgagtctgctgaggagtcactggtctgatctcatccatgggcactctgctggtggtctatgctgacccctacagctgtagtatctctctctctacagatgtggcccttgcccctgtgtagattcctcagagctagctatttctcctatttgggctctgccttaaatgttccatcctgtggacccacttaaatatcacttcacctctgctgtaaagacactccctcctgacaccctctaccaccaccaccatcacaaactcagccctctgatagcaacatctcctccacttcctgattatccccttacaggacggacagaaacttctagatatcttctacatggcatgctagcaaaagaagagtctgagagtgaaatttaagccaaccctctccttaaccatactaagctactgattttagtctttactgtgatgaagctacaccttgcttggtgttggggagaccctctttatggcagtggtttcctagagtatcaaatgggaaatgatgcaaaaggaagtcccttaggtttaggctttgccttcagcctatccaatgtctcccttctgggatttgagcctggagacctgaagctgggaggcccttccttgctctgccttcatccattctttctaccctcacttggggctggaaagagtgaattcttccctcatccttcctgaattttctgtacttttcctacatcgtaccattccgcttcccaaagtggaatttgccctcccttttccctagggctcagctggaaaatggcttccaggtaacctgatttatgaggagaggaatgaaaacacatctgtttaatattttcaaattattacccctgttacccctgcatctcagagggtaatcactggtctctggagttctgtgggtccctttatagtagtgtggctcagagcagtcttagaggaagatttacgcggcccttggggcccttcacctgactcacagcccctccctttttagaccatcagcccaaattcttggccatcatcccatcccttccttcatgagcagactagaaacaaagtgggtgtgttctctccacaaaattagttggtatgatcaatgaactatgcattcaaattctgacaaatttagtccccacaatgacacaaattatgttttacatactacttaaatatgggatcatggaaaagtgatctgtactaaagaacccagattgagaacatactctgaggacattaaatatttgatttgtagactgtgcctttcaatttcagactgtccccccaaaaaggggaagttttgtgaaaggaagcaaattagtaaggaaattgacagcagcaggtcaagtaacagaaacagtaagaggaagcatgggtctttgcaagaatgactacactctcatgcccctttagctcatagtgcaatgtgaagcttggtgtgtatctttgatacttagatattcatctgtgtaccttgtaagtcttaggtcagaattggatctgattgtataagaaaaaaaatcttatgtaaagtgagatgtggacgaaggaatcaacttgtgcactgtggactaactggagaagcaaaagataaaattattaaaataatagcccaagaggaaagtataaaataggaaggaaaataagtagggccccttgtttgagattatccttaccatctgggttgtaaaacatttgattctaattccagaaacttgataccagaaataacttattaccagggacatatgctgaagaattgtcaggaatgacaaagtgtttacttgtttttaatatctgtatcacaaaatgataaagctgataaaccatacagtgatgtgaaggagtgagtcatagcttaatactttatgacacatatatttatgctgtatcttttacaccccaattcttcccttttcaccctataaaaggtcagagaccactgctgataagcaaagaatccttcaaaatctctcctggctgggcgtggtggctcatgcctgtaatcctagcactttggggcgggtggactgcctgagctcaggagttcaagaccagcctgagcaactcggtgaaaccctgtctctactaaaatacaaaaattagctgggtgtggcggcgtgcgcctgttatcccacctactcaggaggctgaggcaggagaattactagaacccaggaggcggaggttgcagtgagctgagattgcgccactgcactccagcctgggtgacagagcgagactctgcctctaaaaaataataataaaaaaaaaatctctcctctctggaggacagtactgaacatatgcagggtcttttcagtttataatctaatccgtagactgcacagtgctagcaattctgttcacagttatcttttcacaacagtcatcttggaagtacttgattcttaccttgatttataatatttattgagctcacattacagatcattactgtccagtcacattgataaaaccatgtcacttggaagctccagttcaccactcctagctgtgtgaccttaagcagtttacttaatcttactagtttactcatctttaaaatgggaataataatagtatctgtcacatagccaatatatttgaaagcggtattgcaaggatatagaacagcttgaatgttaagcactttcaaatactaagtgaggtgatcacttttgtaattcaaatggaaatagaataaatgtcaatgaattaatgatctgtatcaggaggcagcataaagaatttgaattggagggttttgggtaactggtaaaatggtggttatctttttttaaaagaaaaaccctctttggggattcctttgtacagatgatctcttaatttgccatctttaatcctcacattattaaaggctacattgattagaaggaaatacagcttccttgtaggtttttagctttttggcttgtttttggggagatggttgctgctatttggagaaagggagaaaggcagaaattttaaccttagtctgataccttttctacaagctggccaccaggtcctttttaggtttttctgaaacctgaccaagtttaattgtcatggcataaaaacttggtattgaaggagttaaagggtctcccacacccctttgcatgaatcgttcttttgtgtacacagctgcagtggcagcacgggtcggaaaggaaatggttagaggaagagctggttttcagacaaggcgagtctgcgaggggggctgcagggtggcctggggttttacatgccagatgtaggcctgccccggtgcctgcctggagctgctggcgtggtcacgccgcggccctgtgcgaattgaggcgaggtgatgagttagcgggttgccatggcaacaggctggccacgtgaccagggtgctgctgccggcgctctgacgtcagctgccagagggcggggccgcaggagggcggggcgcgagcgagagctgggagaaggcagtgagcgagcaggcggcaggcacggtccgtgcggagcaggcgagcgagcgggaagacgcagccaccttcctcaccagccagcccacagcggtttgttccccttctcgggagtgcgccaatgcctgggccgacccaaaccctgtccccaaatggcgagaacaacaacgacatcatccaggataataacgggaccatcattcctttccggaagcacacagtgcgcggggagcgttcctacaggtaatggggctggcacgagagcagcgccggggaccgccgtgagggcgcgcggaaatccagcccgttatataatggagcagacactgcctgcgacccctgctgcaggcatgcatttgtgaaggcggttgtgattatttggtatctgtttccatgtgtcatgttgggtttgcattgaggctccgcgactgcagatggaaagcattttgtgaataggtttgctgccttcgaggggtctccctccatctctttccttccacactgataaaaatgcatgctgttttcccccgctgtccaaagggagacaggcagtagcacttcctttcctccttcccttttagattttaaaggagccattaggtagcagtgccaaaaggcagaaaacgggagggtggggagaaaaacgtttgcgcttaacctggagagtgtgcaggaaagatggaatcctctagattaagctgcagtctgtgatgttaaaccgccagattgatggagctttgtaagaattctgctcgctgattggtgcagggattgacagcagaggtgatagtgtcagacattcaccaaaattttctccatagaaccctaggtttattagaaagagactggactgcaaaggacttgaaaaaaactgggcgctgttatgcattttctaaggagtttatggccaccgcttgggtgggggagcctttccttcttatttacagtaggaaggtgattcctggtcttttgctgaggtctgttttgaggatgggactgatcttggtcattgtattgtgagccttttgattaatgagttggcctgtacggttggcatcatttttacattaacatatctggcaatatgttccagtagataagctcattaaaattgtttgcattgtttgataaggataacaatgtaatggagaatgcagctagagtcttatgcagctcaaggccagacttgaagggagactgatagcttcggtcatatttcctctgaagttcttttgtactggggtagttatttttaaatgttaccttgataaacgctaacaatgcttttgctttgaggcagagcacacatacctctaaagcgcatcctctcagctgatgagcaacaggaaataactctttttttcctttttagagccgtcatctaaacattcagatggtattatgggtagaatattgtgtgtgtaaatgttgcatatcacaaaatagaaccagaaagtaccctacttcctttctctttggccaaagaaatgcagtatttgttgactcaaaaaaaaaaaaattataagcaacctttgccctgtcatctctggcagttacataaatacttggagttaattttggctgtgcccatgaggtcaccaaaatctcatgccttatggttccaactaatgtgttgatatggcattcttacagatttcaagtgcttgttattcacttaatgtaaatcaaaattcctccacaacttctggagatatcctttcagagaccctgtgattggaaatttgggcctcttctcctcttactcctccacctttttcctctgtgaccatcccaaagcctaaaaatagaatttaaaaacaaaaaacttgaagtgattttaaatctcactagtttgaactttttttgtagaaaataaatttgaagccttcattttctaaatgatttaatccctgctgtgtaggtagcagttgcttttaagacagaattcgaattttaccccatgggccaaaggaagttgcctggttgggttttattactcatgtaaactaacttgaaacggcagtggaaaatcatttgacagaaaggttaaatgttacgttttggtgacagattattgctttaaaatgaaattttatttacctctttaattcaacccaggctattatttgcgtttcctaaattatttgcagtttgctttctgagtccctataatggcattcaaaattatgtaaaaaacaaaactgaattttaataaagatcttactgaacaaattcttaagtccctaagagcatcactgcatttgtatttgatataataggattactggatgatatagcgagaggtgtcataggctaaatgaagaaggaagcctctcaaattgcatttgtcttgtgttatacaaagggtgcacatggagacagacacattcgatgtttttcttcttctgtttttctttcaaagtggatgtccagtgtaataattaccacttatttttttggaggggcataggaaaaggaaaaatgtgacacatttttctatccaggaagcattccatcattattttggcatcccaagactggaatattatagccatttaattgctgaggaaacttggaaggcaatttgaaagcgaagagtagagatttaaccaaataaaagttttgccttggctataggtttggtatggccctcaacaatgaagatgtgcctggaagttctgggtggagtcccttatggtggggttggggttgagtgagcccagttccctggcaagatcagagggaattctttccctggatcctttattgacttctaggtaggcccccgaacaggtctttatcttaggctttcttttcttttctttttttgcgacagaattttgctcttgttgcccaggctggcatgtaatggcgcaatctctgctcactgcaacctccgcctcccgggttcaagagattctcctgcctcagcctcacgagtagctgggattacaggcatgcgccaccacgcccagctaattttgtatttttagtagagatggggtttcaccatgttggtcaggctggtctgtaactcctggcctcaagtgatccacctgccttggcctcccaaagtgctgggattacaggcgtgccccactgcacccagccttaggctttattttctacctttgcctgttgtatataaaaatatctagcccccgttgttagagagatattgtgaggctaaactccatatttaaaccaagtaatttcctaaaagagctatgtaacataagaatactgttgttactgaaaaagggctcttgcaggggctcttggacgagaacatgtctcaccttgctggcagcacaggtgagaagaggagggaacacctagaggatagggtggctctcctgagcattgttaatgggcaagcagtcactctttggagaaggagacattactgttatagcatttgcaccatattgttcataagtatgtcaaatttggttcctgacccacatctcttaacccaggtatctgatagtgtaaacaaagcccattttcacagcatggaacagagtgggtggcagctcattattgaaactagcttgcaccttgattagaaaagcaagcttcctttagaaaattacccctggattagtaattccaattgaaaagagtaagtacaaaaatggcttagcagactcatagagacatgttttcactcctgtgtgatttccttctcagcctcagcttcctcactgtgtttatgaatgctagaaatctatgtattttaagacctgcttaaaaaataaatgtggtgtgggccatccgaggtgacactgtttaattcacagagcgaatgagtcgtgctctggatctccctggagaggatgctccccatagctctgtttcatgcagatgctagttggaaatgagatttattaactggctctctgcccactgcatctttgtttgtatactccaggcttttaagaatgaatgtataagtctagaggactatttccacatgggtgttttgagcatgcgactacagtagcacatgtttctgaatactttaaaaaaaaaaaattacttggccccaggaaatggattgcagagaaaagcaaaactaaaatttaagcctaaagcattggccataacatccagctttgccagttttaaaaaacatgctgttgttaaggaaaacaaagagaaatatcgtaatattgtgcatgtgtgtgtgtttttttgtgcacgtgtgtgtataaaagagttgtgaaagtgtgttccattcaatagaggctattgtaacatggctcacttttatcagaacataggcttcacatcacattccccaaaacagcagttatagattgcaaaagtctacgttcatgtctttattatgtatttgttagtatcatctaggtttaatactgtcaaaggaggttttccaaaaataaagatttttgtccttactatttttcttagtgtttgtaaaaatcagaagattacttgatgctttagtacatgcccaactctggaacttcttttacggattttcagagcttctgttaatggaatggtcttccgggtgctcttgctttggggagaggctcactcctgctctgtagctggtatctgttgacagtgcattatcttagagcagtgctgtgagattgtcctctggaattcagaaggttgatttccttatgcagcatcttttctttatttacagggacctcttgaagctgcagtgaataattctagattaattggaaggggaaatttgggactaatttaaatattctgtttggtttagagaattaattaattttacaaatatttgaaagtctgctctggccaaggtctgtgctagatgccccttgaaggatcttgagtcctagtaaagtccgatggaaaaccgctcattttgtaaaagacttacagtgttggtattttgcttagtctgatagcgaaagtggtttgcatttcctgaacccccagtgacccaaagggggaaaaaaagtttctctgaagtccagtgtgctgtaggaagctaaaagacactgagagaaaccagaaattttgctgaaaagaatgtaggctttaggatcaggcagaattttcactggcctggccaggtgtgttgggcagtggtagaaaataaaagcattgaaaagcaggcggggtagttggaacttggaaataagaagctactgaaagtttattgactgaagatagtgtaatgaaaacagatgcctactgcagtggatcttcagttttgaaatgagagctaaaaggaaaacgggatcccaatgcaccactgtgtgggtctagaatcactagaaaatacttaatgccatgcgagagcttgagccctctaatgtgcagagatcaggactaggtagatgttctctggctcaggatgtctttccttgagtagaagcaatgaatgcagctttgttccataatgagactggtacttagcccagacagtggcttttatatttgcagatgcccacttcatagctatcagtctaacttttaggagtggcaagtgtggagagctgccactattctgatcttcccaaacaatgaaccaggtttctggttcattatgaagcatcttcccttggcatttaatgatgtaaaaagttccgatgtggctgatgaaactgctcagaacactccctgtgactttggggccaattcctctgacagttagaaggttatcaccttggtggcagactccagagtggatggagtttaccctaaatagtgtgtgtgtgtttacttcttattttagtcaatttcactttaaaggacaaattgattttcttctctcctgtgagaagtatcttttttctacagtgaattaagttagaatatatatctaagaacagttttattcttcctgacttcaggccatctttcagctagctgcctctgtaatactacattgagtatgtcaaacttagccaatatctgaagcactattccaacagccctttttctttctaacactccacacacatcccattggtatcatacaaaccttgtttcttagctcattttaaaattccgattgtttatcttagtgtttctggcccttggtctttattattagattgagagaattctctcaaagtggaaacctacaattcacataggcaagaaattatgcaacatttaccttatagcataaatcaaagaaatttctcctaaatatgtttttataaaatgcctccccaaagatgatcatttactttaatgaaaataaatcattagcaaggtaaagactgaacagagttttataggccaccaataaataatttcttagtaggttacttaaaaaaaaaaaaaaaaacactgtgttttcagtgtcaaatctccccaagtgaattaagattttactcacttgaaccaggacagagtttcttaaagaattactgtcttttctaagggagcagaagtttgtgataaatacatgaaatgatcaagttgacagctttgagtgatggtgtcctctaatgcttatctagttaagaaaatatggcaaaaactcaaactttctgtgatttctaggcctctctttgttccagcaggtaaaatgaccatgctggaagaatctgattttagcaatgactttggaacagaaagacaacatggcaagaggtttaattggcttacagttctgcaggctgtataggaagctggcaccagcatctgctcagcttctggggaggcctcagggagctttcactcatggtggaaggcgaagcgggagcaggcatgtctcatggccagagcagaagcaagagagagggagtggagggggaggtgccacacacttttaggcaaccagctcatgtgagaagtcactcagtgtcatgaggacagcatcgagctatgagggacccgaccccatgacccaaacacctcctaccaggccccacctccaacactggggattttaattcaacacaagatttagaggggacaacatccaaactatatcatatatttatatagtattaacacatatactatatatgtgtgtgtgtgtgtatttatacatatgtacactatagaaagtatatatacacatacatatatacttttagaaagtataattatatatgtgttacatatagtattaacacatatactacatatactatattcacacatatatagtagtaacatatatgtattatatatgtgtgtatgtatactacatacacatagtatttatagtattaacacatatactatatgtgtatatgtgtttatagtatatgtattaatactatacgtacactatactatatatactattatatatagtgtatatatagtatatgtgttaatactataacacaatggtgagaactgggcatatatagtatgtgttaatactatatataacacatatatatgtatatataattatactttctaagattatacttcctaaaggcattttggctatccataaaaatttatacagaagaaaatacaaatttttatagaaattcacattttaattgtgtgcaaaatcgatcctgaagtttatggccaatgtttgttgttgcgtatgactaaaaagatggtgctgttgatgtgagacacactttagatttctgtgatcctatttcatttttcatagaagtaatacttgtttttgttttgttttgctttaaagacattaattttttgttctttatttagtgtcagcctaccctggcaaagccctgggaggtaatttgtcaaaaacgccaggtaatttgtcaaaaaacatctctgggaggctttcttatgttcacagctatactttgattataaacagtggtatccctgattgaagggccctctgtgattccctgagaggtcttcatttggtgctgtgcaagtcaggagaaagtgaagctaagtgagctccttcccccactccctcacgccatctacttcctttttatcattttggagtgccagaaagtgttttcaggttctaataatgtcatttttaaaatccccactcttgggttttacacaattattgttacattaaagtttaagccaaaaatccttctttcagcagacttaccgagttcctttaatgtgccaaccttcctccatgctgggcccttggaatacaaagataaatattgcacagccctcccttgataagaacctccaggggcctggacagtgggcgagagtacgtggtgggagggatgtgagatggagaggttcccacacctgaccccagagtatacacagggtgtgtgttttgttttttgctgaggtgtggctgtcattggttcagaagtcttcctgatacttgtctgaataaaagtaattttgtgattattgtgttgatacttgggaagggcaaaattatcactcctataattttcaaaagctttcagaaatgtagcgtgtaagtaaaaatgtgtgtgtaccctactatgacctctatatttgtcttacgaacatagccttgaggcacaagcttgggcattgttgagtgatttttgtggcaggaagttcatttctgcttttcaaaaagtcgaggaaaagtaaaaggcttatttatctgttttgctcttccaatttttatatttgtattggtcatcactaggttaaaaatatttcagtatgctattacataaaaagtgaaaatgagatcatatattcatactttattcatagagaaactgaaaggatataaactaataatggtaagaactgggaagattaatcactgtgtacctttttatgttttttttttctaaactgaaactaaatgcattacctcatcaatcagtgatgtttcaattagccctttaatagcataggtttttaaaattaaataagtttcagtttgaacttaatgaggtttacatgttgaaatatgttaggaaacatctgatagatactcatgaacttaccaaagtcacatggatgacagtaaagatttgcctaatgcaagtaccattcttacattaaacatcagtagtcacaaatgaaatgtgctcctatagcatctgcctcatttagccctttgaggtttcacacatagcaatccatagtggagattttgtttcattttctccagagtacattgaagctgcctgtgtgttttgtgatgcgtccagcctgtttagtatgctctgtgaatcttacactaactgcaaaataatactctgtgaggattattttaaaatatcctctttgcatttttgttttcttctcatttatcaagctcctgccatttatcaagtacagcaaagggccctaaaactgagattgcaggtaattgccaattttttggccactctgagtgcagtcctctgtcctcctccaactcagcctaacctcccaccttagggaacttaattgggcaatatctggccttcatgtgacccctgtgtgtgatgacggccaggaaacaagccatctgcattcaccatgcatttctgtttcagccctctcacccaggagtctgggtgaaaactgagagaacccccagggagactgaccaattaagaaaaaaacaagaacaaagctttgaatatattatcctcagtatagggacctgctcactgtcagcaactctgaaataaaaaagcttgtggaacttacgagctgaatgtctgctagaaaaggaggaagcagaagacaggatcattgggagatggagtgtaatgggaagtgagtgcagcatggaggacagtgagggtttcttggggtgaacatgccagcctctagagagagtttagttctctgcctccctacccccaccccatctctctccctgtcttttcaagggcagagtaaaccttcccttcgacacttgttctccaaggacagaagaaaatgaagagctctgtgttagcctaggcaggggtctggcaggagaagggaaacaggaccaacaagtctctcccaagtcccttaatggggcctggaatacacagtaaattgttaagtttgagtttgggaagccaatttgggaagccaaattgataagtttgggtttgggaagccaatttctttccccctgaaatttttgacaggcagatagcattgtcataacaatgactttaagatgtcagcatgtacctatttccagcctgtatgataagtgtgtcactgctacctctactccagttcaaaatttggtctgtaccgaaaagggaacctggattgtcccctacctcctttcctaacctccaggaggaccagttggggtcctcaaagtgcacagccaggaagttgcttgaagaggcagtgaggtatagtgggcaaagcttggctctggtgtgagacttttactttctgtcccagctccatccctttctagggcaacatttttttagcttctctaagcctcattttcttaccgtgcatatggaaataatagtagcatcaacttcccagggttcttatgcagattaaatgtgttacagaacataaggtgtgccaaacggtgcctggtgcaaagtaaatgcctcaaagaatgttagctagtattattgcttgcagcttaaatctactcttttaccctgtattgataaaaatctataatctttttgttctaagtaccctgtacaatactttgcacatagcagatgttcattaaaagttcaaattgaacctggaaaaaagtcaaacaaattatactatagtcttttttccccctcatcaactttattaagaatttatgtacagtaaactgcagccatttaaagtgtctgagtcagagttttggcagtgtgtccaccctgaagccatcaccacagtcaagatgcagaacatttccatcacccccaaaagactccttgtaccctttgcagtccaaatcttctctgcccaaagccccaggagccagtgatctgctttctgtcaccacagattagattacattttatataaatgggatcacagagaatgcactcattagtgtctgactactttgactcagcacaatgattttaagattcatccatatgggatgtctcagtagttcatcactctttattgctgagtagtatttcattgtatggctataccatattttgtttatctgctcaccagttgatgaacatttatgtttccagtttttaggaattatgaagcaagtttctatgaatattgttatacaagtctttgtggaggtgttttcatttctctggggaaaatacttaggagtggagtgattgggtcatatggctggtgtttaactttttgagaaactgtttggcaaacagttgtccaaaatggttgtaccattttacattcctagcagcacagtatgagagttctgattgtttcacatccttggcaacacttactatcagtctcttaaatgttggccatccttatggatgtagaatggtatctcattgagattttaatttctattttcatgatgactaatgatgggtatgttttaatgtgcatattggccatttgtgtgtcttctgtagtaaagtgttcaaatctttttccatttaaaaaaataggttatctttttaaatagaattatacacatatgttttgcataataatatagtcttgaattgtattttaatatgtacaggtcttatattcttaacttgaatataaagtcccccccccacacacacaaaaagacctagtctttgttcacaatgacttttacagcaattagttacatggtccatcctcagtaagtacatattaaatgagtctatttagcccgggcactgtggctcatgcctgtaatcccagcactttgggaggctgaggtgggtggatcacttgaggtcaggagtttgagatcagcctggccaacatggtgaaaccccatctctactaaaaatacaaaaaatagctgggagtggtggcacttgcctgtaatcccagctacctgtgaggctgaggcaggagaatcacttgaacccaggaggtgaaggttgcagtgagccaagatcacgccactgcactccaggctaggcaacagagcgagactccatctcataaaaaataaaataaaaataaaaaaacagtatttaatatgtaaatagagggtaaaatagtaacagaataattattttagctgagaaaaaaaaaacactgaatctaccttagaagttttatatgaacatgttacatttgggaggtagtcttggtagataggagatgctcttctagttctgtggagaagaaccctataattaagacattcttttctttgtattgtgtgtccccttcttgctagattccactattaaatttaagaggaaagtgtgcatagaaaattttttttctttaattgtaacaaggataccatatgttctcacaagtggcagctaaatgatgagaactaatgaacacaaagaagagaacaacaggcattggggtctacttgagaggggaaggtagaaggagagagaggagcagaaaaaataactaatggttactgggcttaatacctgggtgatgaaataatctgtacagcaaacccccatgacatgagtttacctatataacaaaccttcacatgtacccccaaacctaaagtaaacattttaaaaactaagtaaatgaaaagagggaggaaaaataaatgtaacaaggagccatttgcatgcttccaaaattttgccaagaatagccaaagcgttggatgccccccttttaaaaatttttgtggtgaagatccctaaacttgatctctttccattcccattccatctaatttggcagttttgttgttgttttgctcctgacttctctaactccctaagaagaaattgtctcaagtaaaatttagagactgggaaacaaaagcttagtaaggtcataggtttgcctaaaaggatcgactgagggacctcgttttggagaagatgaggatccttggctcccagaatctgttcagaaatctttccagctaaaagccagtttcttaactacatatgtttcaaaatccaaaaatgcaaagtttaagttcactaatgatttcacaaatgtcctaggcctactactagatttcgtgggtgccacttatttcgtttaacatttattcattttattgccaaaaggttcaggccgaatttcaggtgagtcgctgcctccatggtggcggcagtcagatgattctctctgttctggttgggactgagtggaccacagccactcaaggatcccttgagagttgcgagtgttctttttgatttgaggatgtgccgtgaacggaagccaaatactaatagacaggacatcctgtgattcccttagtttacgatggccaaggatgtgtgggtttttttgtttgtttgtttcttttttttgataagatgattacttggtttttttcctgttaacaagggagcctagatgatgatgtccatttggcttttaggactcttaactagcaaacaactaagcccctgcaaaatcacatgaagacattggaaaatctttttatgtaaggcagagatgatttggtcatagttcgcaatgaagtgaccgtcagttctattggcttgaaataataatgaaccaaagaggggaaatgaccgaagtcgaagttcttgaaattaaggatgttaaaataaaattctgaaatctagtatactgtggtatacctatacggttaagtattatacaaatattacatgtgaagaaaatatgaaaaaagttcacaaatgtaccaatgttaacagaagcaagatgattattacaaacgtttatatggattatattagttttccagggctcccataacaaattaccacaaaccgggcggcttcaaattgatcctctcacagttgtgatgccggaggctagaagtctaaaaccaaggtgttagtaaggccatgctccctccaacagctctgggagacccttccttgtctcttcccgcttcttttggcccccatgtgctccttggcttgcagcttcatcacgcccatctctgcctttcattatcacctggccttcttcatctgtgttttttacatggtcgtcttttaaggaaccagtcattggagggcccaccttaatccagtatatcctcaccttaactaatcatatctgcaaagacctttttccaaataaagtcataatctgaggttccaggtggatatgaatcttgcagggacactattcagttctctgtgtgtgtgtgtgtgtgtgtgtgtgtgtgtgtgtgtgtgtatgtgtgtgtgtgtgtgtatacatatgaacccatttttataaataactgtatgtgtgaaacacatacacacaggtacccctcaccagacacacataaaagatgtttagggccagatgtggtggctcacgcctgtaatcctagccctttgggaggccgaggtgggcggatcatgaggttagcagttcaagaccagccagcctggccaacatggtgaaaccttgtctctactaagaatacaaaaattagccaggtgtggtggtgccagcctgtaatcctacctactggggaggctggggcaggagaatcacttaaatccaggaggcagaagttgcagtgagccgagatcatgcaactgcactgcagcctgggtgacacagcaagactcttgtctcaaaaaaaaaaaaaaaagatgtttaggaagatatgaatatgagtgttataactgggtgatggaacagtggaaattttaattttattttttatctgtattttctgcattagtgaaaatggacagatttttttaatagaaaaatctggctttttgaataaacagtagcactttgacatcttaaaaaaattgtagatttttatttttactagcatcctactttaagtttgttgttactttgcctcatccaactttaatgaaatattttaactttaaataattaatcctttgtagcattatacatatataaatatacataatgaacccattaatatatttgtgatattaaatgtttattatgcttattattataacaatagctaaagctgaaataatataaagtaaaataggtttttgagacattgaatcaaccagtgtgattgtcaggtttttggtttaggtttggaaagccaaaaaaagaaaagaaaacttataattcttactcaattgctgaactcaaacctttttttccttaaaaatgtttttaaagtctctaaccctaggaacctagaaacttggtatggaggcaggatggggagggactttaccaaatttttaaatttcatctgttcaaattggctcaaatactgggtaacttttaacacatgtatctactctagaactacttcatccactgacccttcttatttagacatttgtgcctatagtaacatctctagttatttagtcaaaaagtttactaggtcttgtggtaatttcctgtttcttaattatctttgaatgcttattaactaattgttactgttctgtctttatcccaagtttaacaaaacattctcaattcagtaatgacccctatccctaacatttgttaaactactgcagtatactgtattaaaaattttgtcctttgctcctgtaagtcctcatagcatagcgctgcagaatctaaagaggagactgcagttcaaaaagcttccctgcttccactgtccttcccaaacccatggtcttaccatgtatctgcccctctgtttttttgtttgtttgttttgttttgaaacagagtttcactcttgttgcccaggctggtgtgcaatagcgcaatctcagctcactgcatcctccgcccccctggttcaaggtattctcctgcctcagcctcccaagtaactgggattacagacacatgccaacacgtctggctcatttttgtatttttagtagagatggggtttctccacgttggccaggctggtctcgaactcctgacctcaggtgatcaacccgcctcagcctcccaaagcgctagtattacaggcatgagccaccatgccctctgttatttctatacctgatttggttcaaacatggcacaatttttatctgctttttactggaatgctcagtttctgtacttccctttgaaaattgtagtgatattacactgatgctagaaatgttgtaactttacgtttgacctgtgacaaggtagtagagaaggagagcagagagatactgcaaggagtgtgtgcgtgtgtgtgtgtgtgtgtgtgtgtgtgtgtgtgtgtaaactgatatttgtcaggggctgctaggtacttctaatgcaaaagtctgtcagttcattcttcattccagtaaataaataaagatgtttattgatttaaaaaattcttcttctgttccatatacaatatatacaatgatggtatctggttgcccaaacaagagtaccagaagaatagggaagggaaaagaaggatgaactctgatcctgggatggaattttaagaagatacagggaaatccattctctggctgaaatgagagaatcatttcacatgggaaaagaagttttggggacgatgccctacgaagctggtagtgaaataatgctcctagttttgatagtatttccccactgctccaccaacttagctgaacatcgtttatcttagctcagctgtagcaatgaccaaaatttccatttgctactcatcataaagtgcagaagagaacctgtcttgtatataatttgcagtttcttctttggggctggagcatgggtttgatgtagaggcagatcagtaccttgccaactgaacccaaggagttaagtttaatgttgtgctatttcccagtttgaagttttcaattttgattctgtgtcagagtctactatggaaataattaagaagagtagataagcacaaatatggctgggggcataaggatgtcttttggagtcagattcactggaatattttttgccactggcctgtacttcccttgtcctgttaataagcttaattttattggtacttcattttccattttcatttcaaaatgttctcatgagtttaaaaatcaattttaccataatgtaaatacagacctttggataggcaccaatctctaagagtagaatactgagaggcttgtctatttttttttaaggaatagctttttctaaacacatagtcaagataccaatctgaagtctttcattagctttgaaaaaattataagcagtataatgtacatggtctctgtccattttgactaatttaccacaaaaagcaaattgagaggcttgaaccccaaatctgtagtaactagaaatgcacgatgtgatgactcctacgatattaacataccttatatgttacagctggcagatttgccagccaaaaattcattcccagcgataaactgagtaactagccacccaaatctctacattttgagcttttcttcacagaaacttaaaatcatcttggttaaagtgaaaatgtaaaatgagatcttggtagaatttaaaaagacaaaatggcttattaaagaccacaattgtgtcctcacttggaattattttttcttcctgcttaatctcatgacataaacacaagagcagggagagtcttaattaaaagcaagaatcctggaattcatcctaggtccaaatccctgctttgccacttaataatggtgactagacaagtcactaaacctctccgagtctgtatcttttcctacataacataaaagcagcagtgatcacatggcattgttgcaaagttaaattaaaaaattcctgttttactctttcattaggcatgtggaaagttttcaataaatattagttattgtaacttctaatctagttccccttgtttactagtgaagaaaaggagatcccaaagagttgagacacatgtgcccacatttatccaactggttgatagttctggaactagaagctgctgcccctgatgcctagaacagagctctcattaagctgcagggcagctagggagcttttggtatctgtgttccagacatttccctactcacctttaaaaaaaaaaaaatgcctagaagacagggtcctttaattcactcaaccctagtctgttcctagccatctcacatagcactaggggcacgtattgatatttgccttttgtatgatttggcacacctttgtttgcattcattcagcatttatttattgtgtacctactgtgtgccacacacagttccagacacaggagataaagctgtaaacaaaacatattctataaagtttctgccttcatagagcttacatcctgggggcaagaggagtggacagatggtaaacaaacaagataattaccaatggtgttagtatcaccgagggcagagtagagagatgtgggagtaactggaagcggccacttcagaagtgggcatggagggttcactggggagttgacatttgagccaaacctgaagcatgagatgcagccaaccctgccaagtgctggaacaagctgctcttccgtggcatgaggtcttgagccccagttatccctaaggatgaaacttgaggctttgctctgtcatttgtttcttattatgagaagatttagaaaaagcagacaccgaagtacctgagaaggaactagcaccaccaagagtacaagagagctcagcaccaggaggtggggaccactcctacaaaatgtgtgcaccacaggactttgcctagtggcagcatgattgtttgatgaccgcatatgcttctgctatattgcatgcacctgattttatgcagtggactaacaactgagcatgaccacccactatggtaccagcagcacctatgtcctgaaaggttgacccagggccctgctcgttgggggcagcgtgggcatgactggaaaagacctgggatcatgggaaagagctaaggtcagggtaagagggaacgaggccaagtagggctgggaaagtaaacagaaggcatatggtcaagaaggagtggatgtgctgggagctgagttggcgggggagggggtactgagaaaagttggtgccctgaggagaccagccaagccctgtggcatgggaatgagctctaggtcattgaaattattttcagagcatggacgaagccacccactgctagaaacagatggacatttaggcaaatataatcagctgcatttctgaccatatgaagaagcgtatgtctatgtggggcagggaagggttagccttttactctctcattgtacatgtcaagtttcattcatatccatggacgttatgaatgctacaaagaacttttttagaattccaaaattttgtcataccctggataggagccaaatttccaagtcatttcagggctgtagctattgacttgttaagtctgagtttagaaaacaaaacaaaaatccacccgtatatgctgttttgaaagtttgtcttttttgtttagttacgatagggtggctagccaaactaagccctgtatgcaaggagctgcctaatgaatagtagtggatgaggttaatgcagataaataacaatgaggctgttaaaaatggagttgattttcaaggtgacttacggaatgtcctattgtaggcggttggagacacctgtgttttaatgatattctgttggttttttttcttaaaacatatgtagaatacttggtgatatggcaagaaagagcttaatctccgtgttttgaaaaataatcattaatggtaaaagggatgggcaccctgaaaaagagtattatttttatgttcattctctcttggaggtggcagttattagctgtcgttaggagtttgattgtcagactaaatggaactttgtatgcacattaaaagcattatcattaagaagtgactgataatgaagagcacattcatattggaatgataggcagcctggaaaagcctgcagtagagagcaagcacctcaaacctgataaaactcacatttatctcatcttcctctaaacagcatagttttgaagattcttacattggtcttcttcactagttctaaaccatcaatgcctaattttgagagaaaaaaatagtatatttcagtgtctatattttaataaagtatgtgcatgttgtcatatggacagtgtcctgatgtttctccatcatccttgtgtgaagtcagttccgtgctcacacccctgccacatggagaggcccggccgcagggagggtctgtgcctggaggagttggtcttgcattgtctgtctaatcccatcacagtcatagagccccgtaaaaataaaatacgtgcaggtctgcccacagcagcttatgtgtgctattacctggagacaataaatgacttcttaaattcccattccagccctagaatccatgcatacggcaattagtccacaagttaaacagaagctttaatacccagttttaggcgaaactccatagttcctgtaatctctctccaggagattttatcctgtcaaggtttgtctttcagagacaccctctttgactccctctttgctccatcctgatctccctcctcaaacaaatactttctctgtgccccacattgcaggtcacaaataaagagaaagtgatgaatctagaatgatctggtgatattctttccttgggtgaaatgtttaaatcctgcctctcgaggtattgaacctagagaatgaattatgcgcagatgaaaagcgggatatttctggttcaggagacacatttacactgtccctccctatggaagcccagttcattattaggggaggctgtgggagatttaacatcagccttttgtggtgaggacgctgggaaggaggcacgcaggcaggatctgtgtttacaaggcttttcagaggaaaagacgtttggggggatgtctgtgatgggactgaatatcttcattcccctccggaggataacatatattctaatgcagaagtagtctttgagaaaaacttttgaggtttcttcctttggctaagtatttaatctgtgggcatgaatgtacaatttgcaggttattttagaaagatgccacttctaagagaagaaaatattggtgattgataaatctctttttaaattctcataatatttgcagatacttagaaatgtttacaaaacggctatttctgttagaataacacaaaattcttctaagtaaaaagccttctttacaagcgcatttgaaataatgcacctcactttacctgctatgctggaacaggccaactttggcaatcctaaaacctttaaccaggaacaactctgtgaaatgagaactgacagtgtggccttgacctggaccgagcgaaagtccagtgactggcaaagaaagccattcttttggatcacaggtccttctcccctgttggcatgtgtagaaacactttgaaaggatctcaaacacctagtcagttggacttaatttccaaggaagcatcgatatttctaaccattaccttaataaaccacttgggttataagaaattcagaaatcattatatgctcaagcccaaagaaataagtttcttaggtgaaagaaaaatatactttttctttatatctctcttctagtctgctcgttgtttcatttatgtgaaactgggtgaagaatgcactgcatgtatttaccctaaactgttggtagtggattactttccccagtgatgggagaacatgttgaaaatagagattgttatgagagaaaagaaagacagtcacacatatcacacatatgggtatggttgtcactgcaacatgtgtgaacagagtacattggcatgcggtgggttgaactttcagaacttttgttgttgttttttttttgagatggagtctcactctgtcgcccaggccggagtgcagtggcacgatctcggctcactgcaagctccacctcctgggttcacgccattctcctgcctcagcctcctgagtagctgggactacaggcgcacaccaccacgcctggctaattttttttttgtatttttagtagagatggggtttcaccgtgttagccaggatggtcttgatctcctgacctcgtgatccgcccgccttgtcctcccaaagtgctgggattacaggcgtgagccactgcgcccggcctcagaacattttatgttgaacatgaagtttccagttgaatgtggactcctttaaggagtgacataaagaaggtaacttaaaaaaaaaaaaaggagaagaaggtagcttaaatccaaaaggccctttaaaggctcagcctccaagtgggtttggtataagtaaatccaggccaaatggggtctccttgcagcgcagcagatagcagtcaaccacttatggaggctgttcttctgcagatgaacttgcctgaatttgggaagtttggtaaactcagactttagatgatataaaaacaaaaaagtcaggctgggtactgtggctcacgcctgtaatcctagcactttgggagcccaagacagaaggattactttttgagcccaggaattcatgatcagcctatgcaacatagtgagacccctgtctctacaaaaaaatgaaaagtaagctgggagtggtggcacacgcctgtagtcccagcttcttgagaggctgagctaagagcattgctttagcccaggagattgagcctgcagtgagctatgatggcaccactgcactccagcctggactgccgagtgagaccctgtctcttaaaaaaaaaaaaaaaaaaaaaaaaatctggccaacgtgatggttcacacctgtggtcccagctactcagggatgctgatacagtaggattgcttgggcccaggaggcagaggttgtgagccaagatctcaccactgcattccagcctggactgcactccagcctgaacaacagagcaaagcctcatttcaaaaaaaaaaaatcaaaataggttccacattaaacccttttccttatagccacacacctcaaatgggaccagagccagatcccgggacaacaattggcctatcatgaaacctgctggaaaaaatatacatatatgtatatatactgttttgtcctccaaaatgagtgatcggtgaaagtgtgaaaagagaaaatgaggacaggcagccccctcccctgaagtatggctgatagtgtgtttgcaaggggtggggcagggcagagagacaaaatgaattacataggaaataatttcagttaacactcataatgctagctagcacatattatatatttgcttaattttgaagagccacttctctggaataattcacaaaccttgccaaatttgttcttgaacaaaattgttgagtattttgtagttaagttttaggtgcagaactggtaaaggtggtagaattcatattttgctcagtaggctaactcaggtctcattgactcacataaaactccatttattgtagtaagcagaaatacagtgtctaatgtgtctgattcaatcactactgcaaagcataaccttgctgtacctctccacccaacaccaccgccaaatactgaataaaggatgaaactgagcaaaatctacacattggccctcagctggaggctttcctttttctaaagtcatgtgtatcagtggtcactatccacagacaagctagaatcgtgactttgcctgctagaggtctgaagggatttttgttttttctgtgtgtttttctctcttctgtttgcaaaacaaaacaaaaaaccagctgggtgtggtggctcacgcctgtaatcccagcactttgggaggccaaggtgggcagatggcctgaggtcaggagttccagaccagtctggccaacatggtgaaaccctgtctgtactaaaaataccaaaaaaattagctgggcgtggtggcatgtgcctgcaatcccagctatttgggaggctgaagcaggggaattgcttgaaccagggaggtagacgttgcagtgagccaagatcgcgctgctgcactccagcctgggcgacagagtaggactctgtctcaaaaaaaaaaaaacaaaaagtgtattcccaccttccaagaaagctattctaatattcatgtaaaaagtgtgtaactatattgtgattattagtttattttcaagtaggggcaataaatgcaaatttgttttaaaataaaatttaaatacaatattaaagtgtggtgacccagggactgcagtgctaggaaagtgttcctcccttatctcctgcttgttgtgctgttgcactgaccagatctttatttttatttatttatcttttttatttttttttgagacggagtttcactgtcacccaggctggagtgcagtggcccaatctcaactcactgcaacctctgcctaccgggttcaagcgattctcctgcctcagcctccctagtagctgggactacaggcgcatgccaccaaacctggctaatttttgtatttttagtagagacaggatttcgccatgttggccaggctggtctcgaactccggacctcaggtgatccacccgcctcggcctcccaaagtgctgggattacaggcatgagccaccgcgcctggcctgcactgaccaggtcttaaacaacacagtgatctggttgagattccaattgaaagccacaaagtgggagacagcgctttgactttctcctttgcaaggatgggacagagagatgctcatgtcccagaggccatgtggcaagtcacctaagaataaactgttgtttccatgtaaaagacatgctgaagatccaaacatgagaataaaccccgcacagtgagttgctccttgttctgtaatagttagtatgaccttacctttcataaccatttatctttcttgactgagtctttgggaagtactccatgaattaaaaattagctttttgaattgtataattcctaccttccataggatgttgatgtaattggtaatatccctaaggactagcagtcgtgaattgaagtttgtgtccacttttgtaagggaagagtatgattcctgccctgctttcctcccaggattcttccaagggtcaatagaaccactttatctctaaaaagatataaaatttccttgtgttatccacacagcatttctgcagactaggtagggacaagtacttttacctttatattgtcatatagattgagaccccagaaatcataatgaaatcttaggattttagaatgtatccacctagggactaggacaatttaatactctctcacctgagtttaacatttggaaaaaatatataaatgttctgtgaatgttgtagccacttgtatcatttaagtttaactatatggaaagcatacctgtagaaaaagcaggagctgaaagaattgggaaaacaaaagggtggatggcagtgcaggaatagaatcctttttccactttggctgacacttcacttgcgggaggttcaggacagttccccttccagggaaagtgagtccagactcagaactctcaggcctaaaatcggaaaagctggcttgtttgggttcggggcaaacattgggagcaaagacagccacagagtgaagtgcgcttagaagtaccttgctgaaatttggaaagaggaagatcgattataagaatattcccatcagcaggggtgttaaatagaaattaactatattgatttcattgttattaatttgaagtaggtattgaagtctactcatttaatgtgttgttattttattttaggaaatggtgaaaaatttcttgccttcattggttcacttattcttaatctgtcttctaaactagttatcccacaggtcccttaacacatggtagcccctgccacagggcttgtgaggactacagctgtgttggctagcaatggtggagatttgagtggtatgcctggtaactaagtacccagaatttttctaaagcccagatctggtgctgttttcattgtttacctgatcatcttaatgaactgcttgaaggcagatagtgccttgacttacctttgtgagctgaatgtctgtttacattatgaaaggacaattgttgtccttaagtgaatgttatcagcaaagacctggaggaaagtgtgatttattgacaaactgcagcaaatgacttgcttccttgtttatatggatttttaaaaagctgtcattactcttctacctgtacttctgttgtatattaatttctcttatgtaaccacagaacgtttttactcacttgtgtatgggttatttttctaaaacacagatctgtttgtgtcttttctgctttgcatttagattttttttaaatcatcttgattaaaaatttcatctcaatttggtttggtgccatctagcataaccctgggcctcgacaccacatcctccatcagtacattgcccggtaatgcagaagctttccattactgcctgaagaagaaaccgctagaaaagcccatcagctgccaaaagttatgccagtatatgatcatttcatcagtccaaaatattttaaattttgaattatttacccttactaagattatacataatttacatagatgattttaaaaattgactacatttaaaaagcaaatggtttcgtttaataaatgatagactaaagaaaacagtggaagttattaaccaaaaagtaaaaaaccttcaataatggtgtacaaagcagtaattatggtcacactatctgagattccaatgctgtgagatttttcagatccttacgagaagacaatttagagataagggtgcttctgggaatggagtgatagatatttatttttacatttatttctaaatgaaaccttcatttagcactttaaagtagaaaacagatttttattgctttcatgagcataaataggaactccaaacacaactatttcataaaatgtagatttttgtctaaaacctatatactatagattttgctgttatatctagtcatgtttaaaaatattacttctatatctgtaaataccatttttcactaaaaggaatcaggagcgcttggagaaattactggttttaggtctgagacaagaaatatacaagttggccttggaacatctcgtcatattggaaaagaagaaggttatcaaagaccactaagactgtgtcaaaagaacttagaggctagcttgaataagctcttgcaagcttttatcaataaaggtataatttcaatggattgaaacatatcaaatatgtttaagtccgtggattcataattatacttcaaaatataagaacaaaaacttcattggtcatgtttggagaatattagggaactactcatcactttgaaaactggcaaatagagaaaaagagttaggcacctctcctgcctttcctcgatgacctgtatctcagggtacctcagggggaaacttctctttgtagaattattccagctaataaatcaagaatgaataatagaatatttgaagttttagtgaattattggatctaggcaaatatcagagctaacaatatcatggaagcaggcagtcagaggtaatagttatctgccttctgatggaagttcaaacacggcgtgaaatagtctgtttgatgcaattgtcatatactggcataacctttggcagctgatgggctgttctattggtttcttcttcaggcagtaatggaaagcttttgcattaccaggcagtgtattgatggaggattaggtgtcaaagcccagagttgtgctagatggcatcaaatccccgtcccattagaacttgaataagatcaaggctctagatggaattatcagtctgtagggatgcagaggacagcggaacatgttaaaccacagcagtgtgatacaatgagaaaaatccagaatgtggaaactatcagacaacctagttccttcaacaacaactttttttttaattgcaaggaaagattagaaatagagaagaaactttataaagaaatttaaagaatgtatcaaagaatcataatgtatgaaccttatatgaatccagattcaagcaatctgaagttaaatttgtattataatatattgaaatgcatatttgatataagtaattattttcatttttaggtgtgataatattctgtttttttaaaaaaattatttttcagagacacactgaaacacttataggtgaaattatgtgattattggcacttactccaaaataatctggcttggtaggctaggatgggattgacacaaggggagttgataggagtataaatcaaacaagttggtcaagtattgataattcttgaatccaaggggtaaacctaactggtttgttattctcttctctctccttttgcatgtatttgaaagtttccaaaatagaagttaatacatagctacaatatatacatatacatacatatacaatatatcaatatatatatattccacaaactaggtaaaattgcaaagtttcatccaggtttaaatattaaaaaaagaatcctttatcactgcacacctactagaatggccaaaccccaaaacactaacgtttccaagtctttgtagtgagtactgaaataatgtatgaaactaacagattactctggtgtatactgctacaaacctggtaactttttaatatcacacgtagacttacagtcaaaagggagactctaaattgtgttataaattaggaatctcagaacctgaggaacatttggatttagttggagagatataaaatggtactgcatgaaaaatatgtgaaatttaataattttaatgcaaatatgtaaaatagaaaaagatgctaaagggcttagccagagcaggacttttacatgccctggagtcctgccaggatcttgacctcgaataggtatcttttgtgtttctgagttaatttccttgttgttaaataaactttgttttttttctagttggggaatggcggtcaatgtgtattctacctcgataacccaagagactatgagcagacatgacatcattgcatgggttaatgacatagtatctttaaactacacaaaagtggaacagctttgttcaggtaagacatattcttttaagtgtttacctaaatatttacagtctgtcatgtggaatgtgattttatgaaccacagctgctatattttgggtaggaaaaagtatatattgctattggcatgtaattaaagggggaaaaactcagatataactaaaggacgtattgggaaaagtgtttatgagcatccaggagcacaagcagagccacacggacacgtattggaaaggtctcttgcttgagcttcgtaatgcctttcactggctcctagcctcttctctgtcatcccatctgccatcacacttgcctcctgaaaacaccaattggttcttacaacactcctcctttaaaacctctagggctccacgttgtcctcactacaggataaacttcaaactcttttcatagactaatgaggtccttattagtctcaattccaccctccacatctctctcccttatacctcagacccacaatataatctttgttccctaaagactctttcccttttgtatcccatagcttttttcatggttcctttgctgagatctttccccttcttttcatttgtgggaaaatcttgctcatactttaaaatctggttcacctgccacctgctctgggaagcattccccagcctcgcaggctccgtggtgttcctgaaacactgtgctcatcctccaaaatgacacttgccacgtcgtgttaggatgtctaactccttctagccctgaaggtgctgagagtccttgaggacaggactgcgttttgttctttgttgaatgcctgtagttgcctctacttggtatgaggtaggtctgcaaggaatatatattgagttaaacttctttaaaaaataaaaatatttgacttcaatgacaaaataggaggatgttttaaaaaacgtgctgctaggccaggtgtggtgacttacgcctgtaatcctagcactttgggaggccaaaatgggaggatcgcttgagcccaggagtttgaggctgtggtgagctatgattgtaccactgcccaacagcctaggtgacacagtgagaccctgtctctaaaacaaaacaaaacaaaaaatatgctgctagtaaattaattcattcttaggtctgagtatttatgaaagaaataagcagtcctcctttggaaacagggaatgtttccttccagtaaacaaatagataagagatttcttctttccctttggcttcaacatgaaaatggtattagaaaataccactgaaatgtatttgtgtgaaatttcatgagtcagaataggtaggaagaagtcaacattgctctttttcccagagggtcaagtataaagattttatacagtgcagttagaatttcaaaagcccccagtagtcactttcagatgttgtctgagtccaacacccaccagtgtaaatattctcccttcaccaggtctggacttgatcagaatactcctagagcactaactttgagtatgattgacatccttttccctgtgatcatttttcccacgaggaagacagtaaggttggccagaacttaggcgttgcctcactcacaaatctatgcctaggtctcagacatgaagtcttgtgatttatgaggtcagtagtgggtgctagctaaccactcctttgcccttcaatacaagatagagaaaagctgacttagactacgatgatgatgtaccaggcatgtatattgttgatctactgaaatgtctctaaaagttactttcagaaacaacttgtattgcagcttatgcaacttcagatctctacatacccaaatattactgtgctgttcttgctgtgcattcttgagctaatattttatttttaacttgctgccaaaaaagaaaccaaaaacagtttctgttattagcaatcactttgttgataacacatacccctttgtattgtaattgtgaaattgtctatttcttcacaatgcctaatgcatggttttccttcagaaatactcattttggagatgaatgaactgcaatttgcaactgctaaggggcaaagacaaaaatgtgtatcttacccacaaagtgggtatatgtgcatttggataagggaaacaaggttggttatcaagaaaaagagacataggaaggaaggggataaggaaaaggctcacagagaaaatccccaggcatgagtcttaaatgttaaaggaaaccatgaggaacttcctatgctgaaatacacttggagagtttttggtagcaaatgaaataagaacaaattgtaatttttagatactgtagtaaatgtatttataagcaatatacataatctttgcagatctttgaaatttctcataaagcaaattcaacaaaattttaagggacatttgtaaaggattcatatatggtgatcttaaagcattggtgtacatttatggcctttgtagctacactgccatcaagcgtggcttgatttaaaaacacaaaaaaacctgtagaagcaattttgatcactatcaaacagatacacataattaccattaggataacttactggctgcctaaaattacaggattgatggttcagaagaatgaagtggatttaaagtttcctttctgctctgaaatatgtttctcgctagaaaaaaaaaaggaagttaatctccatagtagagaaacaggtcttttattttaggtagcagttttctcaaggtataaactatagactctattcttttataatttcctggggagctgctgaaaaaaagcagatgaccttctaaatcggtacctctgagtatagcctagaaatctgagtttaacaagtacaagtttaagtacttttgtgctgcagcctagagcttgcagtacattttaccccagaccaacaaaaatgaggttaaattatccaaacgtccttggaagtttccttgttcataatttaatctgtgacttttgtctttagcatttagcaggaagaagctatctttctatttatttatttatgaaattatttatttatacccttcattgttctagaaaatatttaaggcagctaggacagtgctattaggataggaacaaagccaagtattgttgacttaagtgacttatattcctcatacttatgagtagtcagatttcttatgtaatattttcttcaatgtttatttcaatttttttagtttactgtgtgggattttattttagcagtatgcccaggaaaaacatacaggaaatactttctcatatttaaaatgatttaaaatgtcaacatcatttcttactctctttcctgaagacttacgctccaatcctggtggttcccattttgaatttttttcctattgcattatttcctatttctgtttttaaaattttccagctaagagatctccctccagctcagtattaaaactaacaccagcttttctttaatttgtgaagagctaaaagattgcctcacattggtgttgtgttttactcagtattttctgcctttatgtaacatctaatttgtttccaggtaggcatttttaaaagctctttaaaggaaagatggcgtgagaaagtagaacacttggaaatatgtttgtagtaagttgcaaaacagtgaaaatgactcactgttatctcctgttattttatcccaagaatataacctcatgaaaattttctttgaacattaaatctgggtcatgtaattatatgggtatctggttttcatttatttcttgtgacaaacaacctttaagtttcaagtaaaaggtgagctatataaatggagagtgggctatcaatgaatgtgaatactacctataataattcagcaatctattgctcacctagatctattttgaaatgaataattgtagattttccatggtggagtgagaaggttgaaccacatgtagtatcagattggttcagcttatagatattttatattttaattcaaaagttatacagcttgggcaggggggtgatagggaatttttttttcattttttgctttagtactagctcaaactaatttactaaatcttttataaggtagcaatgagggtgaatggacagcatggtgctaaaaatctctaaaagctttagcaactttagataccttagtggaggtgatagagaagataggggacttagaggggaagaaaaggaaatggggagggaggagtagggtggagtgggagaaagtacatcttttccttgaaagtacatattttccttcttttcctctccctcactcctcacctcaagcctcctttgagacttctttgtgacattaattttctgtgtcttgatcctctgccctaggctggagctaagcagcaaaatcactgggtccaatgctgggtcattcttgctgcttggcagactgagtgcctgccttgactcccatcctcacaaggctagtgcagcctgcccttttctctttgtgcaccttgcctccctcctccccacccctccactagccgagcagacacctgacttggggcaaatgttaaatacagtctgcatgtagggctggcactgcctggactgtcactatatcctggactgtcactgtctgtcactgaaagctgttattttcctgagcattttagtattttaataaaatgtcatttgaattaaaccatttttagatggaaaattgagatattttcttgacttgctttaaaaaaaagaaagagaaaatgatcaggatttgattcagtttcaatttgtgcttccccaaattggtgcgagctttgtcttggatcaagtcactggtattttgttcttccaggagagcttctgaatttggctaatgatattgtagtcacatttgcaattctggttacgtgatggctatgtggaaggagcaagtatttagagtacactctggcattcacacaggtgtagccatcagatggccctgggacccgtggtgcaggtgctccaggccccaccctgatggccatcattcctgagcccagcagagtgttctttgtgaccatttttggccgcagatttgtgcctgttagataggttgatcccagcctcgtgtgttgtccctgtgcctcctctcttccatccacagagacctctgtcaggacaggttaccgatgaaatctgctcagagtctaaatttagtagggcttctcttattggctctctggtattgaaaccaagtaaggatattctttcagtgtctgtaagcataagagtttacttagctttataaaatcattgactgttatttgctgtaagaaagttaggtcatcttagattatattactattgttagggaggtaattgtaatggaatattattcatacttgtgatatattacatagagtctttttggtttttttgctgacagtttttttctctaattatttgactcatgctaattttaaaagtttacatggtctcagcatatcaactaattggagaagaaggggacaaaaaaaaaagagttggataatggtggggaggggtctagcctcatgttcaattgcttcaggcagtaatatatggtaatatactctagtgtctctactaatgcactggttgaaagggagtttatttttggagcaggatagataatacagtaggttttttttccctccaaatttgttcatttacatcttgacactttgctcccgaagatgaacgtaaattgctgtttctgtttttcttgggactttttgtttgtttactgtcttttgtaatgctgaataccatggtggtgaaaagtgtgtatgcattcactttcatttaccaaactgctctataattttttttacacatatggatgatatatctttgaaagcaaccagccacatcttcgtttatgtccttaactacattcaattctataatcaatttagttttatttaataggcatattttgagcctttctttgggctaggccctggggacccagcgataaataaaacatagtcattgccctcaaatagctcagtacagcagagtactgtcctacaaaagaccagagaccacactgtggtaagtgctggtttgcaagtgctttgagcatacaaagaaggaagtaaatgaagggaggtagggacatagggagtcagtagagagatttactcagattctttgggagtggctgggtgcttctggatgaaagaatggccatcgtttgggaaacacctcagaaatgtccccctccctcttaagtcagatggagtgacaagtgtgtatgtaggataatgtgtggggtacttagtttcatttaccctgacagactccccaggctaggggggcctttgtcttatgacacagggactctagtcagtaaaatgcatgtgctttagtgggtacagcccttaagtacatgaagcatattgtcatctctaaagaaatataaaggattttcttgatgatctcatcacatgagtatgtgagaattgttattactctacttgtttgaaggaactaggcatgcgtgtgggatattctcaggaaaccatagaattggccacttctttgggaggaatgcaccagatacttttaaatactaaagccaaacctcagtgataactgcttgggtctctaactgggtagatgtcatgtgactgcattagtatttatcacaggaacagacctacagatatatccctacatcctattacccatttctgctggagcctctcctggttagtgacgaacaccataaataaggggaaattagaaaaacaggcttagggaaaaatagatcacctggaatgccattgttttattgaagactaacaatatatatactgaacaaaaaatcaaggaacatgtgatcacagttaactttatatagtgccttaacaggaataagtgaatcagtgacatattagaaacaggattaataattgcctttgagaagtctcaataagttctctctctctctctcacagatacgcgcgcgtgcgcgcgcgcacacacacacacacacacacacacacacaattggtacaaagcagtaccattagtgggaatctcatatttttttccccatatgtgagaaattcccagatgtcatagttgagtgcagtctttgaggttcttattgagtatatcactaattcacaaatgctattgtatctaccctactatagtaagaccctgctgagatttacctgcccccaagccatgaataggtgggtggttgtgagcctagagatgaaaactgttgtaccaagggatgggtcatcaaaagaaatctaagttggatacagttaatgagagtgatactgaacatagtactaaggagtctctaaagcctcatcattgatttcattaacttcagtgactggagccctaactccatagccccagggatcttgacaaaggttgtgagaaaacttgctggagtccaaggacatgacaggttttaagactcatttataattcataattctaattacagaaacctttagagccatttctcttctgattttgtctctgttatatgataagttgctttcttttaaagtacataatgatatgcttattttgaaatcattcaccaagatcaataaaaaccagtatcttaacaagaaaaagatttatctttcaacatattgaaagttattttgaatttttaaaaacatgtcaatcactttatatgatggatatgttccttataaaacactattttgtatttaccatgatactttttctttttcttttctccctttcagtttagattatctaaagactttaacaggaagagtgtaaatttggggaaaaatagtcatttccttttataaatgaatttatgattacttaagcacctcatatgtttatctgaggaaagacttaagaattacagaaaccctcaaatgtttttccacagatgaactggaggatcttagaaatgtgttcataccctttcttgtctggtaggaagccaaggacctcattttattctttggttccttgtcctttgaatctaaaacatgcattttggagattcatgttttgcatctgaaacagtccaattcaagcccattcatttttatagctctgattatcttaaccggttacatactatatagttttatacattaggggtataatgatgtcataatgcctcagcttttatttctctctctctgccattttcagtgtgtttttatatgtattatttcttttaattcatataacaaccccatgaggaagaataggaatattttattcctattttatgaggctaaaagctccaagaagccatgttcacagctgataatgagaattgaggtgtccttggatcatagcccagtactctcattgctgtatgtgtggcagctgtggatgcaacgaagggttcactgtgtgtttgcccatgtggatgtgtttctgattctttccatatccatttagcagaagtcctttaagcatctcctctaagaaaagaaagaaagtctttatctccatcctttacattctacttgaagaaatgagacatatctggtaattctactaatgacaagggtgtgtcccaatggtatcatcatcaagaactttcttaccaaaagtaacgagacagagacatttgctcctagtcttatgaagttcttccttctccacctgctgcaagtagagtggggaaagagccgcctgttctctctgattgttctccttgttccttttcttcctctaacttctttccctccaagcaagatgaggtggctctgaaattttgccacctgccatggaggaactttgcagctctctcaggataattcttggccagtgaaacaacaaccaggatgatgcctccttagacatttgcatgtgcatgtctctgcactgtctacatttgaatcccaagaatatggtccttttcttatttttatcccaggctagcttttgaacaagcttgtacctgagagaactacacatccttatttcctcctttctatgctgttgaggaaattacaacatctcctaggataattttcttacaagcttggttcccacaaaggatttacttatcaagttatcactgttttccatgtatttaatccagttcaataaacctgtattgcagtagccatgctaagaggctccatcagtacttctccaaccccttctttaatatgaaaagttgatggtttcttagtcttacgtaaaaggacttactaatgcaacatttaagagtagacaccgatttcccatccagctctatcccttcattcccatgtctggtttcccaactccagccagattgcagctcctgaactttttccatatagccattctagatctgccagtgggtatggtagcagacactgtgctagtgaagtagaaagatgaattgaacatcatccccagtcttaaagatttactcaccagtcagccaggagagagaactaattaaaatgtaagtcaaatccctgttagatttctgtatccagtatagtgaaacaattttgtgttggaaacaggaaagcttcgtagaggaggtgatgttttgactaagcttttaagaatgagaagttattcaagtataaaagaggacgaaaggacattttagacaaaaagtttgatcaaggcaaaaagaagttgcagtgttttgtgcatgtacattgcatgtgtaagacatctgtaacattaaaattcaaggcagcgaaagagggacagtaatacttcaagtaataagtgctgtattcaaagaaaggaaagattatttccatctagaaaagctttttgtcttacccttgtttgggtctttggccaaacagtcattcaaatttagtggatggtcaataaatatttatgaagttgaattgaattgaaatgctattcaaactaggattttaatatggataggattcagacggagaagaagatggtgattttgaggaaagttaccatttagatatcattttgatattctgcacattgctttatttattcctgcagtcagcagatatttattgagtacctgcaatgtgtcaggtggtggattaggattggaggatacaccactatacaaaacacaacacagatcatatccagttaggacctatccctttactaccaaagttctccctgacaggtctattcagagagagcaaattcctttttctcagcttacctgagtatgaagcaaaggcagagaaaggcccctggagaaaggtacacgtccagcctgtcttgccatcattcagtgtagggcactaatgggcagtctgtacatggaaacatctgaaatattagcaggcatctggtttctacacagttaagataatcaagccaaacatctccaaattcttctgctcttcaaaagaaaacatttttcctaaccaatttttttctgaattgtgtttttaaatttctagtttatcagacatgtagacactattaaaaaggagtgtcagaaatcactgtcaaatgtttgggcatgttagaattgcatacctggaaacagaataatgaaattgcttggcaactcgtaaagacaccatcatttttcagattgcgtttttttttttcccaccctgaaaccattacgtaattctgacaaatagcaaattacctgtgtttgtcccctccctcccaagggtgtgttcttacccaaatattaatactcataagctttttatgaccaaattatttgacatgagaagcatataaatgtgaaactaatgcgagtcctgtttcctgcagtttctcttcgcattctgcatgaggaggatcgttctccattttcatttcttctagattacatttgtatgacagctcatggaagaactttacaaaagtgtagaaggagccaaattttaatgaaaagatgtacatcaactttaaaattgcgcagaattgtgttaaaatctactatttaaaaacctcacagaaatcttttcctgcttctttttttttccaaaaattattccattcttttatttctactgtggtcatatgattgaatccctgaagtaaatactgtgcattcttcaaactgatttgggatccttctgatactagagtgtacctagaaagcaaagtatattttgggattaacctgggaaatataaagaaagcaactcataaagaacaatattctgttagtatcacagtctgcacgaatgttatgtggtgcctgaatgtgagttcctctctgtctgtaattgctggaggcttcctttggtgccacacctggccttctgggctttctctggacgggactcttttcagggagctgccggggaaggagcatcctcctctggaaagtggtaataggggatgttattggtgtagatgaaagctagaggactggactggggagagtggccataagtatggagttctcacctgcaagtcttggggagagggtgaaatggctgaaatctggggaagaatcctggagcttctagtctctagtgccagggatagtgacctcagcctcaaaatgagcaacttgagaaaggggcgcattgtgtagacgtggaccgtgggtttgcgctggtccactcataccagtatattttaccttatactaaaagcctctctgtgggctgccatacatagagttcatgtagtggcctggcctgtataactgttgatagtatgatgtgggtaatggttcagtagaaattctctgagaaaatggggaaagggatcagctttaggtttcttacttgcaatttaatttgacctaaaaatacatacgttctgaaaattagaacttaaaaatggcattctctaaagacgtttgtgcccagaaatcagcattggtttgcctaccaaattagttaagcttcttcttttcctggcatttaaagccttgagcaatctagctgcattccacctttccaacatttatccccacagcctccctacccataacctgtatttcctcaaacgcacgtttcacttatatgccctgattccttgtctttgcttggagtatctcctttgaaattcatatcaaatgccactttgccctattcttcctgatcacattcaacaaaatgtgagctctctctctcttttcaatgatcagacctttacaaagccttacgctcattgagtacttgttttaagtcttcagcattcggagttaagctccttggggactgaaatgatcatgcaagtttggcttgattttatgtgtttgataatactgattactctttgttgtttttttattgggcagactttgaactaactgtatggaactaatatttatgtatctatatttataaatattactaatatttatgtatctaggccatacagtttagcacttatagttgttttgtatttttgctgtttttccatgtgtatttctccagactctcaagactaagttacttggttcttattaagactaaggtcatattcctcaataagtatttgctggtttgtttaacattgctaaataaacaaagtgacatctctccatgccacctacagatgggcatttctttagaggtgacctatgactacaaaaattagataagatctcatatcttttcagattcttaccttctactcaagctcttcttaagtcttaccttaaatttaagtcttaccttaaatttgaccttacatatttaatcaatcctttaaaaaataaagcacctttttgtccattaaagtagaagggtaatacaagtgtgtgagaatacgtgagtgcacatgtggagaagctatatcccatgatattagagctttatgaaactttctattttcatgaccctaatgagaaaactgacttcttcagaatgggtttcatatgtaactttcgaacttgtttttcatttgtagtaaaagctttttatgtcccctttgctcctctatctggaatgtcaaattctaactttagctccactctcagactctagcctgtgagacatcgcactgccagtttcagtatcagcctccctggaagccagtgacattttgtcctgcacaccattcctgccctgtgctcccagtgcctctcctacttcttccttcttggctcctctggagaagccaaatcatattttaccaagtcagacaccttattttggtaaaatttgatgagcacattatcctacaagaaatcactggtgttagaatctaggcatgaaactgagcgctggccactgcaccattaatcagcagatgaaaagaaatctgaaaccaatgagatattttacttgccagtaaaatctctattttctaaaatttactttttaataaaaatgttgatacctaaatcttaatcaagggctatttgttatataggtttttactccattgaaatttccttttgaaagatagtagaaaatactctttattcttccatgatgtttctatgaagaagcacttttaaaatcaatttgttacagtaatattaatatctgatcaattttctctacagcaggcctaacatttaatgtagttctgcaggcttcttaataaattcagatttaaacattacattactttttggtgaaaccctgtctctactaaaaatacaaaaattagtccggtgtggtggcacacacctgtaatcccagctacttgggaggctgaggcaggagaatcacttgaatctgggaggtggaggttgcagtgaggcaagattgtgccactgcactccagcctgggtgacagagtgagactccatctcaaaaaaaaataataaataaaataacattactttttaaaaaagtattcttggttcttgttgaaagcaggttataaacagaggatactggcacctttaactgcagtttggtgcaggcctataagattcttaaaaaggttttaagatcatatgaattaatgaaaaactgagggcatttatcagataaaagaccaatcacatgatttgacaaggccttttaattaatctgctgatgctcttaaaaatctgcctctctgcctgaatgattattactagcttatttcttttcctgtacaagaaaagagatgaaaatgtccttcaacagtttattctgtgtgttcaagggaaaagatggggtgcttttcagcactctcttcagttcacataagccgcctctgtgtctgtaggagttgaaatcttcctgctggctattactccttttcctctacatgggatcagtttgaaagctacttgtctttggacttatttacaataggaataaaaagcttctgacaatgtcaggtagtggagagaagcaggaagctcagctgaggaccatgggaattcaagggagcaatctcagttgaaaccggatttctgaactcttgatctttatttttgcatttgtggctcggggcaggtaaggtaaacagtgtccaaagttccccttaacagactgaaataatactgtggtaactgaagctttcaagctgctcctccatgccaggaatgtgaaggatgcctatgaaaacaacaaaaagctactactaatttaatcagatttttgttagattagaatgatacagttgaactttgggattttaaattcctttaaaatgttaatatttcaaagcattatttcacaattgccattaaactccttacagcatgtatttctgtaggtagagagatttctgctgatgtgctggaaatatgtaaccttgtattttgcagcctcactttcctctttagtaaagccctgatttcccaaaggggaatgcttccttcaacacgaggtttgggcttaggtaatagttgcagttctgcaggaacatcagttcaaggaatgatgagctaaatgccaaaataaagctgggatgactttatgattattgcgtatgaacaatctaatatgaaggagatttttcattgctaatattcaactactggatagaaaatatggctaagttactgagtttgttaatgtcaagatctcaaagagaagtacatggaagatagggtcaccagaactgaatctggaaagggtgtgtgtgcccccaggaatattccaccagaggcagcagtgttattagtaagtctcctcttatattaactatgacaaaagccagtgatggctagaagcaagagcactggcaaacatcttggtcatatgaagatgagcatcattgtctcctaattagcagaaatatcaagtatcccttaaaagagaacttggtgacagactgagaattagaaaatcatctaattttagagaccagagatcagtccaacactgacgttttgcagataagaatactgttggcttagcagagtgtgacgacatgtcactgttcattcaagatgagaaggctcagatccaaaggccaacatagttttctgtttcctgccttcccattctttgttgatactagcttgagataataagcttttttacaaatcatttacctgtaatgattcacatcatgaagagtatgatcacatggatgtgtccaattaattgaggttgttgtgcttttcttctaacctttcatcagtaccaaataagattatggaaagtgaaaagttgtaactaaatccctcagtgatataggcatctctgtataatagttccttggcctgtgaggaaatcagatgggcaatttgagtagctgtttgtggcagaacccaatctggcttgatgtgtttttccacagattgtgttgcgtttctggaaaagtgctgtgagactttttttgacaccaataagatatatatatacatgtatatatgagatacatatatagatatgtatctcatatatatgggcgatcaataagattatatatagagatgatgtttatttttatatacacattgtatatatgtaaaatgaaattcttatgagtgtatatatactgaaatggaaagtcatgacattggagcagattaatgatctatcaagcccaagattctactataaatagaaaaggtatagctgatacttctaacaccagtccaaacgatttatatgttctcttgcattttcctttatatttccttttagaattatctataaaaatctataaaaatttctaaaacttaatctataaaaatttccaaacactctttgaacctttcaatttttacatataatttcctaaaagcagcatagaaaaaaggaatgtttttcttaaaaaaaaaaaattgaagttcagatcagagtttaaattccactctgcaatttcttagctgggtgactttctgagccttgttcccatacctgtaaaatatgggaatgataataaaaatacttacctcttaaggatactatgggattcagaatgtttaaaatacatatgaaaacgctaacagattttacccaaatgtgggtgtttttatgtcttatgtttcttgcgtaatatattccataaatttgttattagagtaatatttccttttatctgaaaatttccactttaaaaatgtccatttattctgatattactctatggttgaaatcctgggatctggtgaaaatgaaattgtcttaggcttttcatgattttatagacttaaatcatacactcctgaatcctttgagtatgaatgttcatttttgagctctgccatcttcatacagcctcccagctgttcattttttattcctgtcctcacacttgtcagcttcattatgtcaattttgatgtataacaactgaaaccaatcttagggctgcaggggtacagacagtgtagaaagaatagttttttcccccctacttatttccagatcatttcagaatcttgtagaccttcacaattgcagcagcaccttgagcttatgggctcagagtatatcccatcataattaacctcttagtaggcacagcatcctacaatttgggttgtgttacttgaatgtgttaccctatgcttagcttttaaagcttatcttttacttttctgcagacttggtctctagggtcattcttatatttgagtggctttaaaaaattttatttatacctcgtcaattcttaaaagaatttttagcaactcttctcataatatctctttggggagtttggcaacataagaattttactgtttaccagcccttgttgtggttcaactgctatgcagatcttcattcattagccagatatttattgaaacccacttatgccaggtactgtattaaatgtttagatacataggggaccaagacaaataaggcacaagtattcttgaaacttatattgcagcgagggaaaaaataagccacaaactctcttagtctgttttatgctgctataacagaatacttcaaactgggtaatttataatgaacagttatttattgtcttcctcttctggaggctaagaagtccaagatcagggaaccagcatctggcaaaggtcttcatgctgcgtcattccatggcagaaatgcaagagacaataggggagagaacaagagccaaatttgcccttttataacgaattgctttcccaagaatggcattcatccatttcaggagggctgaaccctcatggactgcttacctcttagtggtcctacctcttaattaccatcacaatggcaaataaatttcaacatgcattttggaggggatatccaaaccatagcaccaacataagagttaatacaatgccaacataagagttaataacacaggatgaggtgaaaaagagtgcctagaaggctacttcatgtggcatagtaagggaggacctctctgaggagatgacatataagctttcatctgaatgtcaagaaggtcaccatgtgaagttctagatgaaactgtgtaaaggtcctaattcaggagcaaatctgaagtgttctaggaacagcaaggaagccagcatgaagggagcttcctaaaaggaagttagacaagggagaaatagacagaggcctgataacagggtattttaagccagggaaggaatttggattttatgatagtttcatagaaaaccactgtgatattcttagcaggagagggatgtgatctgaataagggtaaccgtggcataatgagataaaattgtgtttattcaaaatgtacctcacattattgcaagggtagttaaatggcacaaaagtctgtgtatctgttgatgaggaacattctgatttgtggctgggtaagacttccaggacactggcaatgattcctgaatatttcagtttgttgacatctatttttatctgattaaagaagaaaatatagaatttcaagagcaaaagaggtggtcaataaggccaaatactattaagaggttgagtaggatgcagaaagaaaaacaactgtttgatttgatagcagagaagcttttgatgaccttgaccagaacatggtgaggttggaagacaattgaatttgtattaaattgaattggatgtcagatgaaacaatgaaaacagagaccatttgaagttttactgtgaagaggaggagatagtacatagctcaaggatgatgtgggatcaagaaactttggttttattttgtcaaagttgaatgatactggagcatatttgcaggatttaggaataacatatgcaggaagaattttgcattgcaggagagaatgaggatagcagcaggaatgactcagtgagtaagaggagacgtgacccagagcacaagtagagagttgaactttgataggaactatgcagtttctcaaagaacgtgaggtataaatcgtcatgaccttggattatgcagtggtttttggttataacaacaaaagcacaagtgacaaaagaatgaatagctaaattggattttattgaaatataaaacatttttgcttcaaatgataccatcaagaaagtgaaaaaacagtccacagaatgggagaaaatatttacaaatcatatatctgataaggaaattatatctagaatatagaaaggattcttacaattcaacaataaaaaagcaacccaattaagaaacaagcaaagaatgtgcatagacattcctccaaagaagacatacaaatggcctaaaaagcacaaggaaaagatgctctaagtcattagtcatagggaaatcaaagcaaaaccacagtgacataccacttcacatccattaggatggttagaatcaaaacgacagacaagtggtgatgaagatgtggagccctcatctgttgctggtagaaatataaaatagtacacctgctttggaaaacagtgtgatagtttttcaaattgttaaacagagttaccacatgacccagcaattccaatcctaggtatactgccaagagaattgaaaacatgtccatgaaaaaacttgtacacaactgtttgtagcatcattactcaaaatagtccaaacataaaagcaatctagatgttcattaatgaatggatcagtaaaatgtggtaattcataaaatggaatattatttgctgtaaagaaaaaaaatgaagttctgatacatggaacaacatggataaaccttgagaagagtttgctgagtgaaagaaaccagacacaaaggccacatgttatatgattccatttatatgaattgtccagaatagtcagatccatagagacagaaaatagattagtggttgccagggcctggagggaggagagatcatagagagcgactgctaatgagtaagaagggtttttttttggcagtaataaatatatgctggaattaaatagtggcaatggatgaacaattctgtgagtatgttaaaaaccactgaattttacatttcaaaaggttgaactttagggtatatgaattatatcctagctttactaggataagatctggaacaagacaaggatgtccattttaaccacttctattcaacattgttctggaagtcctagccagagtaattagacaggagaaaggaatgaaaggcatccaaattagaaaggaggaactcagggccgggcatggtggctcacgcgtgtaatcccagcactttgggagtccaaggcaggaagatcacctgaggtcaggagtttgagaccagcctggccaacatggtgaaaccctgtctccactaaaaatataaaaatgagccaggtgtggtggtgggtgcctgtagtcccagctactcaggaggctgaggcagaagaatcgcttcagcttgggaggcagaggttgcagtgagccaagattgcgccactgcactccagcctgggagacagagcaagattcggtctcaaaaaaaaaaaaaagaaaaagaaaaagaaaaaaaataggaggaagtcaaattgtttgcagacagcatgattatgtatttatatccctaaaaactcaattttaaaaaactgttagaactaataaacaaattttgttgcaggatacaaaatcagcgtaacaaaagtcagcagcgtttctgtatgctgataccaaactatctgaaaaattaaggaagcaatcccacttataatcactaccaaaaaaatgagacacctaagaataaacttagcgaaggagctgaaagatttctacaatggaaacatataaaacattgatgaaagaaattgaagaggacataaataaatggaaagccatgccatgtttatggattggaaaaatcaatattgttaaaaagtccatacaggttaagtatctctaatccaaaaatcataatgcttcaagatctgaaattgttttagttctgacataccacaagtgaaaaatccacacctaatctcatgtgacagttcacaggcaaaacacattcaaacttgttttatgcacaaaattattaaaaatactgtataaaattaccttcagggtatgtgtataaggtgtatatgaagcataaacgattttcatgtgtagacttgggtcctgtctcctagatatctcattatatgtatgcagatattcccaaatcttaaagtatctgaaatctgaaaacacttctagtccaaagcattttggataaggtgtacttaacctatactacccaaagccatctatagatccagtgcaattcctgcaaaaaataccaatggcattcttcacagaaagagaaaaagataattttaaagttcacatggaaccacaaaagaccctgaatagccaaagcgatactgaacaaaaagaacaatgctggaggggactgcagcagatgggtgggctcctttgactccactttgcctccttggcaatgagtgggctatcccactctcccacggcatctgtatttaaaaaaaaaaaaaatactgaggcatcacatcgcctgacttcaaaatacactacagagctgtagtagccaaaataacatcatactggcatgatgtattagcctattcttgcattgctatacagaaatatctgagactgtgtaatgtattaatattaagaaaagaggcttaattggctcacagttctgcaggctgtacatattggcttctgcttctggggaggcctcagcaagcttccagtcatggcagaaggccaagggaaagcaggcacatcttacgtggctggagcaggagcaagagagggatgtgggagttgcttcacacttgctacacacttttaaacaaccagatttcacaagaactcactgcttactcactatcataagaacagcactgaggggatagtgatcacccattcatgagaaactggccccatgacccagtcacctcccaccaggccccacctccaaaattggggattacaattgaacatgagatgtgggtggggacgcagatccaaaccatatcacctgaaaatagatacatagaacaatccaacagaatagagcacacagaagtaaatccacacgtttgtagccaactgatttttgaccacagtgccaggaacatagggaaaggacagtctcttcataaatgatgctaagaaatctggctatccatgtgcagaagaattaaactagatccctatctcttaccacatacaaaaatcaactcaaaatgggctaaagacttaagtgaaagacctaaaatgataaaactactagaagaaaacataggggaaatacttcatgacattgatctgggcaaagattttttgggtaagaccttaaaagcacagctaacaaaagcaaaaatagacaaataggattatatcgaacaaaaaaactccttcacagcaaaggaaacagtcagcagaatgaaaagacaacctacagaatggaagaaaatatgtgcaaactattcatctggcaaggggctaatataaggaactcaactcagtagaaaaaagaactaaataaaaaatgggcaaaagacttggttagacatttctcaaaagaaaacatacaaatggccacaggtataggagaaaatgttcaacgtcactaatcatcaaggaaatacaatgggaaccacagtgagacatcacctcaccccgattagaatggctattatcaaaaagaggccaggcgcagtggctcatgcctgtaatcccagcactttgggaggctgaggtgggcagatcacttgaggtcggtagttcaagaccagcctggctaacatggtaaaaccccatctcttctacaaatacaaaaattacctgggcatgctggcgggtgcctgtagtcccagttactggggagattgaggcatgagaatcacttgaacctgggaggtggacgttgcagtgagccgagatcatgacactgcactccaggttaggagacagagcaagaccctgtctcaaaaaaaaaaaaaaaaaaaaaaaaaaggaatggctattatcaaaaaggcaaaaaaaattgttggcatggatttggagaaaggagaactctcatacactgttggtagaaatgtgaattagtacagccattataaaaaacaatatggaggcgcctcaaaacactaaaaatagaactaccgtatgatccagcaatcccacgactggatatatagccaaaggaaattaaatcagtatgcccaagagatatctgcactcatgtttattgtagcactgttgacaataaccaagaaatggaatcaaccttagtgtccatcagtgtgattaatagatgtttaaaaagtggtataaatacacaacgaaatactgtttagtcatataaaaaaatgaaatcttgtcatttgtggccacatggatgaacgtggaggacgttatgttcggtgaaataagccaggcacagaaagacaaatactgcatgatcttcctcatgtggaatctgacagagttgatctcatagaaatagagagtagaataatgatttccagagactggaaaggggaaagcagagggaggaatggagagagattggtcagtgggtacaaagttacagttaggtaggaggaataagctctggcattctgttatacagtatggtgactatggttaacaatattgtgttgtatatttcatattccccttgctctcaaatcccaggagtgtaccctatttagagctaacatctccctgacttatattgacctttctcaagacaagagtttttcaaatcatagcattatttataattgagaaaaattggaaaacaagcacaaggttaaataagcaatggtgaaataccaagtaaatattttgcagccacttgggaaaaaaatagcgactttgaatgttctcaccacaaagaaatgataaatgtgtgaggtgatggatatgccaaataccctgatttgatcattacacaatgtatatatgtattaaaagatcacacttgtaccccataatgtatataattatttatcaaaaacaaaatacaaattaataagttacctgtttttgaaagctattatttttatatgccatgaataacaaattcaaaaatataatggaaagaataaatggcatgataaaatttaggaaaattttgagaataagaggaggggaaattattctatagatagtaatacatgttatagagttttaaataagaatgtggaactgccatggagacaaaaaaggcaatttaaagtctagaaagagatctaagtacatgtattaggaaggcaatagatagtaaaaatagtgcttctcattggtggggaacgaatagattattaagttgtgatgttcaacacctagctaactttatcagttagtggtttaggttgaaaatagtagaagttaatcctggcaggcttaagtagaagaacaatctataggaaaaatgttgggtagctcagagtcaatggaaagccgagctcagaagatggacaggaaccaaaggatgctaaggagctgggaacacagcctcccttgtgtcacaagaataggatggcactgtgctgcttttgctgctcaggactctagaccccaccactctgccaccacaactaaactctaatggtccctgtgtgtttatatcatttcctcaactcagatactgaggcaggattcaaacacagagcctaggtcatgggccttcatccttattgttgtgagggaaagggatgcctggccactttcagcttctgtggtgggaggcagggcactatagcatctccccaggtagtaggtgtccaaatcctggagccaaaaatgacagatttccaccaacatttggaatgactaaaattagaaccatactttatatcatagacaaaaataaattccacatggattcagaatttaaatgtaaaacttgagaccataaaagtacttgacagaaatatgcatatttatgtattcttggttcgagaaagttgataagcaagatataaaaataagaaagccattaaaaatattgatagagcatattaagtgactcagaaagagaattatgatctgttgagtttcagaaagtttacattaaaaatgggtataatgtgattacatttttaaaacaggatcacatttttaagaaaatacacacacacacacacacacacacacacacacacacacacacacacacactcctttccaaagaggattagaatggcatataccagaatatttcgagtggttctctggatgatgacactagagatgatttttccttccttccctcactatatggaagagggttttttttttttttcaaaagctgttatttctttttaaatctgaaacatgaggaatttggttggttggtttgtaagagtatatagtatctgggtctccatagataaattttatgctaaactctacaaaagcgaaaataacttctaagaccaggtaatgaggcagttgtgtttcaacaatcccatccatataaaaataatgttaaagtggcaattggaatttgctccatctggcggtccttcaaaagaaagaactggatagtgggtgatgactcaaagaataccctccagatcatgatgtttctctttcctcccccagtgtctttttttttcctttgatttgttttattttgtcttctctttaagagaacccatctgcttgactaggaacttactagttagtattcagggtatgtcatctaaaggacaccagatgcagagactctagagatattcgttatggcctatgttttatcactttacgctcttacctacaaaataggagttgccccagcatttcatgttttaacaacccttagattcctgatgtcttgttctctcttatctcagattgctgtctcagtaaaggatgcctaacctttatttcacatgagagacagagcagttcttgcttcctaaagtgagtcacccaagtagaaggactggctcttcacagaagtcttggtagtgtaaaggatgaggggaggcacttcatgttccagaaagactgatcatgagcacatcatagagagagaccaagagatctggagatagcaaagaaagaatgaacctaaaaatggtgacttgttcctattcttgccacttggttttctttcttgtaaaagaaaaggaatcattctggcttccagcttattttcctaaatgccattagcctatactagtaagaagatatgaatcagtaaacacagcttgccagaatttcccagttgtagtggtcatgttctaagagctcttcatatattttttcaaaagtcccctttttctatgatcatttccccagggggctcattggacatttctgtcatgtttcttagtcataaagaacatgactctgaacttctatagctttcagtatccatgtcttcatacttcatgttaatatggaaaccccattgctctggactggaattaaattagtattaacttggcttataacaaaatttaacaattaaatttaccaatttaatacttaataattaataagtataagtaataggtaataagtataagtaataatagttaataagtataagtaatacttaatacttaataagtaatacttaataagtaatacttagtaatacttaatacttaaattggtattaattgacttgtagttttcacctgtgtgggggttctgtagttttcacctgtgtggtattttgtaaataccacagctatagatagaaaacagcttgagcatatgtgtattttttgagctacacatttcatgagaacttttgtagttctctcatgttttcctctctttttcctcttaagtttattttgatgacttggagcaggtggtagccaggtggaagaaaatgtatatttcttttctctggtagaagctagaaggagctccttttatcctggtttccttggctttatagtgtgaggttctgttggttggttgtggaacctggtgatattctgatgcatggagtacaatacacggagtttagggttgggaagtggcaggtgctgtattgttgaggtacagtcccttccctctagctcccagatcctgtggacaaggagatataagcgcattggtaagaaggacacactctgctctgagtgatgatggtgcctgtaaggacaatccccttccagcctagcagtcctctaccacatctgggtacagtgagactcactccagtactgttcttgtttctttccaggagcggcctattgccaattcatggacatgctcttccctggctgcattagtttgaagaaagtaaaatttcaagcaaagctggaacatgaatatattcacaattttaaacttctgcaagcatcatttaagcgaatgaacgttgataaggtaggagacttgtacctccataaaatgtgttgttttttcttaaaattgtttttgtgcataaatgcaaaagtccaggagcataccaatgggatatatcttgatatcccaacagtaggctggggtctgtacctagcataaagcatcaccctaagttcttgtatttttatgaggttttcatttcagattttctaaacttgtagccagtagactaaaaactaacagggctcacaaatgttaaagtgttattagttaaatttagcattgcagatgagaaacttttaatgtttgccagatgccactgtggttctttgtattttgttcttttggagaaacatcatgtcatggcagaaacagcatggttttgaatcccagcttcatgacttgagcaagttatttaaattctgagtctcagtttacccatctgtacaatgggactaaaaaccccttattcatggttatgaagttgacatgagaagcagtgtccggtatagtgtgtgcgctcagattctcaatgtccataatttgccctttttttctcccatgaattatacttttgtcctggagtggtgcaaatggcctggagtactttttctctcaataagggattattgctaaaacagtctctttctgcatgtttactgctatttaaatacatacttaatctatattccttatttaggatatatctcttagcatgaatgagcttggaaagaaatgaattttgaataagggaaaagagataaaccagcaggggagaaatggaaaactgttctttgcataaacagaggtaataaataggctatggaaatgaaaaataaaatatcaggttataaaagacagagattaaaggaaagtttgataaactatgtattttgtaagctaaggcaattaatatcttcttgacattcttatcaatatattaagaaaatcctgacttctcattgtcttggaatttttatttcaaaacatacattctctttaacatcttagccctttggattatttccaactttatgtcctttgtcatggttaatttccaattagctctttccatatgtatttaaaactagggatatataggttctccttacttttataatacctcttgtgtctttttcattcatttctctatacatgcttctagattagaaagaaaagaaacaccttttcatatgtttattgatggaacttgtcatacatcaaattagtgggctccatatctctctagaagtatatacacacagaatggatgagcagttgttaagaatgttgaagaaaaaaattattgcagtggaaggagactggccatgatggcctttgttagcctttctagctttagtatgcagtgatgtgatccaaaagtacggtgagagacagcattaagtaccctcattcatgtgtgtcatagcctgatggcacaatggaaagttctatgcttttgcttgccacctaggattttgaacttttgccctgaagctttcatgttgatagagaatgcagaattaagtccacagaagtaaatgccttcttttaacagctaatgtaccaccagtgtctaaaactatttataaatgttcatgtctggcaatagacaaaatatagtagtttgttagttaaaagctttttatgctctaaaaagcctctaaaaagttgatttctaacaatcaatatcagcataaacaaaaattttaaactcagaagacataaaagtgattaaataatacaattaaaagtcaattgaggctgagcacagtggctcacacctgtaatcccaacactttgggaggccaaggcgggagggtcacttgaggccaggagttccagaccagcctggtcaacattgtgagaccccatctctacaaaatttttttttaattgccaggtgcagtggcacatacgtgtaggctcagctactcaggaggctgaggcaggaggatctcttaagcctaggagttagaggctgcagtgaggtatggttgtaccactgcactccagcctgggcaacagagtgagactctgtctctgaaataaaaaataaaaattttaaagcaattgagttcacatgtggcaggaattcttccttgtaagcagacaattcactgaagtttgggggaagtgagagaagagcaacatatcaccaccaaagtctattacccaaagaatcttcatgaaaaatatggtatcttccaaaagattcccttctctttattttgctttgtacttggtttagtttctattttagctgcataaaaaacatttgtgcaaaatttattgctaattatttagtttaatgcgtgcttcagttgcttttttcttccaaattttcattgatatgtaaggtctttctacattttctaaagtggtcctattgatacattttaggatatcaatgatgtgtagctcccacagtggcaaagccttgttcaaagtttaatttctatagcttccattcatattgtcacatagcaaagctgtgagctgtgtgcttgtctgaatcacatgcttacacactcacacacattcacacactcacacacacaatctgactcacactctagctttgtaactatcttgtgattcacattcagctagtattcccacccaaagatgtaaaaggtaagaatccagtgataatataattcacatagctagatacctttccattttctttaaaaaaacagcaaattacaccagtgagaatggctattactaaaaagtcaaaaaataacagttgctggtgaggttgtagagaaaagggaatgcttatacactgttggtaggagtataaattagttcattgtggaaagcaatgtggcgattcctcaaagagctaaaaacaactaccattcaacccagcaatcccattattgggtatatacccaaaagagtagaaatcgttctaccttaaagacatatgcatgtgaatgttcattgcagcactattcacaatagcaaagacatggaatcaacctaaatgcccatcaatgacaaattggataaagaaaatgtgacacatatacaccatggaatactaggaagccataaaaagtatctattttattgatttaaatcttattcatctccactctctagtaactataatctttatatgagtgtatctcaacacaactgggctacatattacaaagaaatttaaaaagtttatcagccaggcacagtggctcacacctgtaatcccagcactttgggaggccgaggcgggtggatcacctgaggtcaggagttcaagtccagtctggccaacatgtgaaaccccgtctctactaataaacaaaaattagccagacatggtgatgcatgcctgtaatcccagctactcgggaggctgaagcaggagaattgcttgaacccaggaggcggaggttgcagtcagccgagatcgtgccattgcactccatcctgggcgacaagagtgaaactccgtctcaaaataaataaaataaaaataaaaagcttatcagtcttgaaatagcacaacattccaggcgtctgtttttccagagagacgttttgaggataaatgtactatgagtgggaccagcccctcttgacaactaaggatattccttttgtctggcttgttcagaagtactaaatattccaagaaaatcaataatgatgttttggtttagttcttttttttctatttttaatttttgtatgtacatagtaggtgtgtatatttatggggtacctgaggcattttgatacaggcatgcaatatgaaagaagcacatcgtggagaatcagttatccattccctcaagcatttaccctttgagttacaaacaatccaagtacactctttaagttattttaaaatgtacaattaagttactattgactataatcaccctgttgtgctatcaaatagtaggttttattcattctttctaacttttttgtacccaatcaccatccccaactccccctttccagccactagtaactgtccttctactctccatgcctatgaattcgcttgttttgatttttagatcccacaaataagtgaaaatgtgtgatgtttgtatttccatgcctggcttatttcacttagcataatgatctccagtttcatccatgttgttgcaaatgactgcgactcattctttttatgactgaatagtactccattgtgtatatgtaccacattttctttatccattcatctgttgatggacacttaggttgcttccaaatcttagctattataaacagtgctgccacaaacttacaagtgcagatatctttttgagatactgatttcctttcttttgggtatatacccaaacgtgaggtttgtaactcacatagtgattttttattgcaggtaattccagtggagaagctagtgaaaggacgtttccaggacaacctggattttattcaatggtttaagaaattctatgatgctaactacgatgggaaggagtatgatcctgtagaggcacgacaagggcaagatgcaattcctcctcctgaccctggtgaacagatcttcaacctgccaaaaaagtctcaccatgcaaactcccccacagcaggtattgtcacaatgagattgcgggagttgctttcatctttgataatggctcagacccttctgttatttactgtgtgtttctgactgattcttctcaacagtcaatattttaatgccttcggatgatttctactgttgtctgtttcaccacatttatcttcctgtgacccatttgtcattagtctaaccatcttcatttaaactattaaaaaggcagagctatttgcattgtatcactgaagctggtagtgaaaataatgctcccaggatagatttctttttccttttagtttttcgagaaatttcaagtagcctgtttagattttgactgaagtatttttactgcttaattgctggcagtacagaccagcatatgaactgaactctgttgttaaatatggatcatcgtctctaacccttcaaaggaaattcgtgaactgtacatcctacctcctctgtaggcagtggcaatttttatgcagtaacattcagcaataccctatttatccagctttgtccaaaagtgaagtcgttgaggaaaaatatctggaacattaaaacttttaaaacttctgtggataaaaaaagaaaaaaccactttctaaaatatattataaacatccttgccataaacagcagaccttaccaagcagaatgtgttcttataaaattgggtcattattagaaacacagttgggtactgcacaattaagcatgaaatcatccaaaatcatgtttccatctcaattgtggaacccagtgttcaaacttgttaaatcagtaacctgaattttgtaaataaaacaaatttcttatttgtgcccaaactacaatctgaatgaagtagaaatggttaacaggaccacataggtggtaagagctttgaaatcacagttttgcttactgttaaacagcatttttatcatcttatttctggatttatggctgtattccaggcagactgaaaccattggaaaactggcattactttttgaaatttttttaatatttaaaaataaatatttttaaggataacatgaatactcatactcactagtatgaattagatgaattcttcatctgccttaaaatagtactcatgtagatgaagaggaatgaacaactctgggagagttgttaggaggcaaaatagactggatgttggtaatggctgaatgctgggataaaagagaaggagatgttaaacatgacttcttgtacaactggaaggatttggggttttgttcaagaagtgctgaaagagaaccagatttgggaagaaatcttgagtttgttttgaacatactaagtttgagattcttttgtgacatttaagagaagatctacataggcaatttttgtgttgggggtggtgcacatgtgtgtctggagctcaaaggagttataggctaaagataaacatttgtgattcttccacatattgatgtaatggaagctggaagcaaatactgaatgataaagggtagagtgtcttgagaaacttggacatttactggttgagtagaagaggaagggcttgcataggaagcagagaaggtgccagaaagaatgaaggaaactaggaagtgatgtgtcagggaagcagaaggtagggagcataatggtcaacaatgtctacatctgctgagaagtcaagttaaatgaggcctgaaagagttcattagatttctcaacttgaatgatttctccgttcagtagaatggtagagccaggaatggcttgaggaaaaagttggagaaaggaaattgagacagtggaaagatccaactttggagccataatgggtgagcctatatagaataaagaaaactaagcacagatctttggaaatacatacatttaagggggaggaggaagaagaggaagctgcaaaaaagatgaacatcaggaagaaaaccagaagagctcagcatcagagaacaaaaaccgtaggaaatttgtagaaagaggggtcaccaacagtgccaaatattaattgtggcgatatcaaataggatgaagcctgaaaaataggccaaagtctgactcctaggaggtgattaatagtccctcagagaattggtccattaaaatactgagggcataggcctagattgcagcaatttaacaagggcttgtggaagtggaggcagtaagagtagattcaacctttaacaaatgtgtcagaaaaaaatggaggaaaataaaaacatttggtttgtgtagggaaaagagtgatagtagcttcaggaaataagattggaaggaagatgttattttttttcaactgttcttgtttgcttttaggataaggcaatgtaagcaggtttgtaagatgggagacatgtctgtggagaaggaatcattgaaaatagaaaaagaggggaaattggagtatgacgctaaagctgaaaggaaaaggtgagatgtcaagggcatagataaagtgttagaaaggaaaagagaggatatttattttcttggagccaaagcgataggagaggctgggtaaaaattaagccacaaagagtttgggaaacaaacattgatggcagtttagataggccttcaacttttgtcagcagttttcatcagtctaggagctggggtggagaaaagggggatgttgtgccctctccaaagtctgggattcaggaggtatgtcgggtgggaggacaaaaagctaagaaaatcaagggtgtctgatatttctcatcttaatgtcattttctaaagctgtgaatgatggatagcttggactcgaaactcaactgccatttttttcaagttttctgtagtgagattggacagacctcagaatattttcttccacgatcataacctgtccttaatttttttctcattggtaccaatattcctccacacccaaatagcactgttactatgctaccttggcctcgttttctaggaattccctcatctgtctttcacaaaagctgcagataaacgtgtgccattttgatagaatgtccatgaacctgaaagagaaatatatattttctagagcttaacctcttgggtgacaatgctcaggaaacacattaaagtcaacagataataaattttatttttaatgttctggaaggcagtaatttcctgagaccatgttcctgataccttgaccatgtttacgttattggtcttaatcagggagaaatgatattttcagaagtcaaactgccattccctttctaataaaatatgctctgatttttgggcattgtagggtagtaaaactatactgggggtatatcacatatagagtgttattattaaaagccatgataggagaaaggctcctataaatgcattaagacctcattttttctagaagtcatatccagttattgggaatacagccaagataatataagccaaaatgtcttccaagagtcagaataggtgctataaaatgtatgcaccttagtcttcattcatgagtttctgaggtacttacccagagtgtgtttgctctttcttaatttagacataattgtaataaagatggggatgtggtttcttagcacatagctcattagggcaaggaatatacaggtatcaatagaaagtacaaacctcagttaaaaaaaaaaacttaaaaccttactaaagagcctcatagtatcctgggatctttattacaaaatcaaatcgttccattgcctctcagtagtctttagtatatgtatgacaccagcaggcagtcatcaatactctcataggtcccttacaattcttagaattgtcataattctctgtaatattgaccctgatttatttccctcatgagctctatttttacattatctaaactggcacccctgcttgtgggagtcactcaaagccgttctctttatacacagtctgcttttgttcatctgaaatttagagcaaatgaaaggtgatggtcagcggtctggaaaattcacatatctgtatcacatttatatcacagtgttgccaggtcactaacatgtagcagtaattttgttcccacctctaagccttggtcatttcttaattatctgcattagtggacgtaagcagtggctggtatcatcaaaaacaggtgatagtccttaatttttttttattttgagtttggaatacttgatttatttttttagtggatttatctctcccccaaaatttccttaggccaatattaaaattagcttgcatgtcctaactattatacagtaagagcagtaagtggcagctcccaaacattttgtatgacagagggaccagattagagtggaaaaagtgatcctggagtagattgtcaccatgaaaggactcagtctacattagcaagaaaaaaaattgtgcttttacattgtacagactacttatataagcatgcaccagagattgcttatgtataaaatagatacattctaaatacttggtgcatcctgtttttttaagaacatgctagatttttcaaccattttgatacagataaaagcttttctttatgattcagagaagccttagaatagtttggctgtggcttctctgtgtgtcgttggggactttactgtaacaagcttactgcataagcagaggctgtcacctaagggtaaatggctgcttggtaagttttattgtctacattctgaggagttgcatcttgaattggttttaatctaccaaccaggggcatgtattaaaatacacattttcacaatgatagatatataagtacatgcatcattgtgaatcatgatgtttgtaaatttattgctatgagccatatctgcaactcaagatagctgttggtggggattggtttttatgtgtgaacacttactaaacataaaaggaaattcaaagttatgtagttactatagcaacgacagctaagacacattgcagattcacatacattcatgtatttaaatcaaacgcccatatataaatatagtgtgatagatttagagttgctatggaaattgagtttgagctttctgctttccttagggacttcagtgttttagccttaaaatcagattaataggaatgccacaaaagtggtttcaaaaggaagcaacctaagtagaatagaataaagtatttgagcaatcataattaaatccctaaatgtagatttgaataaatcctaaggtgtttttcaagaacattgttgaatatttgaatattctcactcaacaattacccttaatgttgggttttctaaggctgtttgtatgactgtaaaatgtaatcatgtttattcatttatttgtttagcaatgtatgagcatttgttgagcacctgtcatctaagtactcatcacctctcaccttcttttgggaaataagaattgctttactttgttgggttttttgtttgtttgctttgctttttaagagaagcagtaaaaaatagcagtaaggagtggttttcatccttgttctgatcttggctttatggcccaggatgtagtcttttttggtcagcggaccacatgcacttgaaaagaatgtgtattctgcagtagttggttgtatagtgttttagaaatatcagttagatcaaggtgtttgatggtattattcagatcttctatgtgcgtttttttacttacctaataccagtgtcagagtaaacagatctgtattttatggatttttttgttgtccagttctaacatttgctgcagagtctgttgaattttcctgcattgatcatggaattgtccatttttccctttaattctctccatttttgtttcttgtattttagtgctctattactagatgtatatgtatttatgtatttacgagtgttaagtcatcctgttgaattgaccttttttgtcttcttctaaaaaaaaaaagggatacatgtgcagaacgtacaggtttgttacataggtatatgtgtgccatgatggtttgctgcacctattgaccagtcctctaagttccctcccctcacccacaacacccaaacaggccccagtgtatgatgttcccctccctgtgtccatgtgttctcactgttcacttcccactttgagtgagaacatgcagtgtttggttttctgttcctgtgttagttcgctgaggaagatggcttccagctttatccacatccctgcaaaggacatgatctcattcctttttatggctgcatagtgttccatggtatatatgtaccacattttctttatccagtctgtcattgatgggcatttgggttggttccatgtctttgctattgtaaacagtgctgcagtaaacatatgtgtgcatgtgtctttatagcagaatgatttatattcctttgggtatatactcagtaatgggattgctgggtcaaatggtttttctgattctagatccttcagaaatcatcatactgtcctccacaatggttgaagtaatttacattcccaccaacagtgtaaaaacattcctatttctccacagcctcgccagcatctattgtttcctgactttttaataatcactattctgactgtgtgagatggcatctcattgtggttttgatttgcatttctctaatgatcagtgatgttgagctttttttttttttcatatgtttgttggctgtgtaaatgtcttcttttgagaagtatctgttcatattctttgcccactttctaatggggttttttctttcttgtaaatatatttaagttccgtgtaaattctgaatattagaccgttgtcagatgggtagattgcaaaaatgttctcccattctgtaggttgcctgttcactctgatgatagtttcttttactctgcagaagctgtttagtttaattagatcccttttgtcaattttggcttttgttgaaattgcttttggcgtttttgtcatgtagtctttgcccatgcctatgtcctgaatggtattgcttaggttttcttctagggtttgggttttacatttaagtctttaatccatcttgagttaatttttgtataaggtgtaaggaaggggttcagtttcagttttctgcatatggcttgccagttttcccagtaccatttactgaataggagatcctttccccattgcttgtttttgtcaggtttgtcaaagatcagatggttgtagatgtgtggtgttatttctgaggtctgctccattggtctatatatctgttttggtaccagtaccatgttgttttggttactgtagccttgtagtatagtttgaagtcaggtagtgtgatgcctccagcattgttctttttgcctagaactgtcttggctatacagggtcttctttgattccatatgaaatttaaaatagttttttactaattctgtgaagaatgtcaatggtagtttgatggaaatagctttgaatctataaattattttgggaagtatggcctttttattgtatgaagtgttcctctttatctttgataatattctttgtcttgaaatctattttatctgacattaatctagctactccagcttttatatgcttactgttgcatggcatcatctttctccatgataagttaaatttctgcctgtctttgtctttataaagtgtgacagcatgtaatcaggtcttgcttttttattcattctgataatctttactgtttaattggagtgtccagcccatttacatttcatataattatgtaattattgatttggttggatttagagctaccgcattatcatttgttttctgtttgtcccctctgtttcttgttttgttgtttctcccttcctgccatcttctggatttttaaagtattttttagaattctattttaatttacttaccgccttttaaactacacctctttgcactaattttttaggggttgctctaaggattacaatatatattcttgttttttcacactatcctttaaattaatactgtacacctttatgtaaaatgtggaaaccctgcagccacccctatagttgtcatatgtattacatttacatacattatgaacctcacaagataatgttataacttttgctttaaacctacactgtctaatacacgttggcttttgaacacttgaaatgtgcttattcatcattaaaatgtgctgtgtgtataaaatgcgtgctgaatttagaaaacttagtatgagaaacagaatgtaaaacatctaataatttttgtattgactacatgtagaaattatatttcatatatgttgtatatgttttgcgtatgttaaagtcagtggagtttttttacctttttgatgtggctactagaaaacttatgtggttcacatatttctattagatggttatgctttaaacagtcatatctattgtagagaaattacaggaaaagttgtttatttcatatttttactattttcaacgttcttcatttctgaacacccaagttccctagcggtttcatttctcttcagcctgaaggacttttgttaggatttcttatcctgcaggtccagtggcaaaaattattttagattttctttttctgtaaatgtctttattttaccttcattcttaaagaatattttcacttgataaaggattcaagctgggttttgtttttccttttgttttattttttgcctgtaagcactttaaagatgttattccactgcatgtggcctccaaagataagaagtgcatactcattctaccctggaatggaatacatagtttttctctgagtgcagtcaaaattttctccttatctttggttttgagtagtgcgactatgatgtgcctaattatggttctgtttgaatttatcttgtttcagagttcattatgcttcctgagtctgtgaatttatgtctttggaaagattccaagcattattttttcaaatatttttttcagctccattctttctcctgtccttctgggacttcatttatccatatgttagagcttctgaaattataacacaagtccctgaggcacagttgattttcttcccagtacttattttctctcttctttagattagatggtttctgttgatgtaaattcaagtttaccctctctttcctctgtcatcttcattctactgttgtagaagtcttcatttttaaatttcagctattgtatttttctgtttacttttttttctttctctgctgagtttgcctaccttttcattcattatgagcatatttcctttacttcactaaacacgcttatggtagctgctttgaaagtttttgtctgctaattccatcattctggccatctcacaattgacatctgttgattttatttttctttgagaatatgtcacattttcctggctctttatatgtcaaataattttgggttatgtcttagttattgtgaattttagtgctctgaagactggattttgttatattgctgtaaagagggttgatgcttgtgagttaacaggcacttaactcaattagagtccaagggaaaaatactcaggaagttaactcccattcaaggggatcttcaaggggatctaaccttagcctcaggcctgtctgtgcctttatgcaagacttcgttttccttattattgcaaagtggcactaaatcttcatttaccttttgagaaactccttaatttaaccacaaatgttggtctttccctaaagccattatttgctctaagaaattcactttaggtcagtctatgatggcatttgacttaccggagccctgtagggtgggcacaggtactcttcttgtcccttgatggtcttgctatcaagatgagtcatgcctgtttattcttacaattttccagtagatgcctacttgatactgctattttacagtccccagtcacttatccacataccatcctacccaagtaccttacgtatgtctttaaggatcaaatattaattttagaaatcatgtaataatacaaggaaaagatgcatttttcttactagccccataattagcaagacttctcttcaaatagatgttagtacttctcattattatgcagaacactgtttctttctttctttccttccttcctttttttttttttttatggacggagtttcactgttattgcccaggctggagtgcaatggtgcaacctccgcctcctgggttcaatcaagcaattctgctgtctcagcctcccgagtagctgggattacaggcatgcgccaccatgcttggctaattttgtatttttagtagagatagggtttctccatgttggtcaggctggttttgaactctcaacctcaggtgatccacatgcctcagcctcccaaagtgctgggattacaggcgtgagctaccacacccggcagaacattgtttcttttacccaacccctaccccatattagcatggcatccttttgacctgttcatattaagaaactatcccgttgctaagctgcataccatttaatgcctactcccttagctacatcaagacttggagcaaatagaaagaaatattctaatggcccaactaattaaattattgtagaagatcccctactccctggaagaagagaggtagcagtggtttttttcttctgattacatgtgtaagatgtataaaagacactgctagacttttctcctcaaagaataactgaaactgcatttccctacattttagtctgttcaggcttctataacaaaatgccataaactaggtagctttgtataaacaacagaaatgtatttctcacagttctggggactgggaagtccaagaccaaggcaccagcagattcagtgtctggtgagagcctggtccacatacatggtgccttctcattgtttcctcagatggcagaagaggcaagcccccttaggcctgttttataagggcattgatctcattcatgagggatctgccctcacaacctagttacctcccaaaggccccacctcttaatactactgtgttggggattaggtttcaacgtatagatctgggggggaacacaaacattcagactatagcacctacctcttatgatgataaaaaccccagcataaaatatgagcagtgccctgccttgccaggacactgaatatttctgaatttaaactattgagcagagagaagagcagaaaattatgaagaattctggagtttcaaataggaatctcctggcagcgtctgtagaaaagcccaagggcttcttcctaggaagagccgtacatttttcattgccatcctaatttctttgcttactgaggtagcatttttgacagatgatttactaattcaatttgcaatttttaattattttggctttctgggtcaaagtatgtacattgttttttaaaaaaaaactagagtgttttaaagcttagagatcaaaaactacagaatgttgtgatactattactttgcaactcagaatctgaatcttaatatgaatagaatttttcatgaaagttaagggaaatgaaaacatttaaaatgtggaaggaaggccaggcacatgcctgtagtcccagctctttgggaggccaaggtgggaggattgcttcagctcaggaatttgagaacagcctgggcaacatggcaaaaccccgtcttttcaaaaaatacaaaaattagccaagcatggtggcacacacctgtagtcccagctactcaggaggctgaggtgggaggatcacttgagcctggggttcaaggctgcaatgagccatgttcatgccactacactccaacctgggcaacaaagtggaaccctgtcccaaaaaaataaaatatagaaggagtcatcagtaatattagcaaatatttattgagcacatattaagtgtcagctattatcctaagaacttaatatgtattcagcaattctaaaagacagatcatattattaccctccactttaaagttgaggaaactgaggcacggagaggtttagtaacttgccagggtcacacactagaaggagaggacttaagatttaaggcctgactctgtgattccagaatccatgctctttcatcattatattatattgcgtctctcatatgtcatggatgtggtcttgttttctcctcttacctcctccccacactatgctgaaccacggtaaatttcacaaccaaattcaaattacatggtgtatggaggatatacaaagctctgcaatgttgcttaggcttgagacagcagaacatatgctgttgtattgcgatgacatttttttttatcgtgatttttcaaaagttcaaaaacatttcctttcatccttacagtaggttctagggtgagagagagttactatactgtagagttactgtctacatttatagatgcaggaaatgttaaaaccatttgttccaggcctcttattagctcaaaagcagaagtgtatacaaagccaagaatattgagccctagattagtagaattactaatctctgatttcttaatccttcaagtcaattagctctccgtgtgaatggtctgggtgatttgaaagtgaaggatagatgcaattggcatgtatttgggcactcagagtctgttccttcacacagagctctgcagaggagggcgagggtctccactgttgtcctccctgcactggaaggcagaccatcctagccctttttaaaacagcattgggtcattaatcttatatagctgttcctgatatgtgttgaaatattaattctataactaaaccccatgtgctcatctgatggatcattccttttctctccataggaataatatcagattttacttctcagcctagctgtaaacctcgccaggccacacaagacagtgacttaggattcattcttagtttccacagcagaatatcatagattgtctgtgaacctatttttctttattattgatacttttttttgttgcttagtatattgggcaggaatcgaaaacagctttgacttgtagaattttctagaatccctttgaattgggtgaactacactataactcaactttgtcttgctcaatcattgttcccccattgcctggcctgtagaaggtcctcatataattattgagttgatgagtttaagttgaatcattgcagcattcatcttgatcaaggaagatgtagtactcagtcaacacatggctgtttttgaagtgctctccagtcatttccatcacctgagaagccccttacactgtaacttagaaagtatgctagtacactacacagtagctcagaaaatgtttccttttgaaattttgtttcaatagtttttggggtacagatggtttttggctatatggataagtcgttttatggagatttctgagattttagtgcacccatcacctgagcagtatacactgtacccaatatgtactcttttatcccacactcagcccccaaccttccccacccccgaatccccaaagtctgtcatatcactcttatgcctttgcatcctcatagcttagctcccacttagaaatgagaacacgcactatttgatttttcattcctgagttatttcacttagaataatggtctccagctccatccaagttgctgcaaaatatattatttcattcctttttatggctgagtagtattccatgatgtatatataccacattctctttatccactcattggttgatgggcacttaggttggttccatatctttgctattgtgaattgtgctgctataaacatgtgtgtgcatgtgtctttttcatataattacttctagaaaatgtttcttaccagttcctactttttggattccttgctctttttgtgaaagctttacctgaattctcagtcattcttttttactaattgatttagtttgtcaacaaatgtttgttgaagcactgtaagagattctggagatacatagtgattctgacaagacctgttttcaaggaaattaaatcctagtgggaaaatctgacaataaataggcaatagtaatagaggcgagttccttcagcatatataggaagaacacctgagctagtcttaaacatcttctataaaggtttctgaaaaaagtaaagttcaagcaaaacttaatgtataagtagatgttagccaaacggaggtgtattgaagagcattccaggcagaaagacaaggatgctgaagtcgaaagaatgtgctccattcagtaaagtgcatgttgttcagtgtggatgttgagatatgagactgcagagggaagcggggctcttcttattgctacaaaaataaaatcacaaacttagcagcttaaaacaacacttatgcattatttcacagattgtaaagtccaggcacaacttagctgggttatctgttttaggatctcaccagactataatccaggtatccactggggtggtggtctcatgaaaggctcaactggggaaagatttgtttccaagccccctcaagttgttgacttgaggctgcaggaccaaggcttcagtttcttgctgaaggccaccctcagttcctagaggccacttgcacctccatgccttatgggcttttccaacaaagatgcttacttcgtggcaactgcttcttcagggcagtaggggaagtctctctggtgtgtttgtcagcaagacagtcatgtagtaacataatggtaagagtgactcccattacctttgccatgttctgtgggttagagtcaggtcacgggtcttacatacactcaaggggaggctatcatacaaaagcatgaacaccaggaggtggagatcattagggtaaggggattactgtaggatttgtttgtcacaccgaggttacactttatagtagggagtcatggaaaagtttaagcagaagcatgctttgtattatagaaaacacattagagagggcacagttagaatctcgtaaaccagctgagaggctttgcagcaaaccacatgggagaagacagtggccttaatgaaggtagtagccatgcgggtgatggagaccgtaagatgatacagtcagcaaaattggatgattaatgggttatgggaagtaaagcagaggaggaaattggggataaatgttacacacatttctgacttactagtcggttgatagaagcagagatccctggaccaggagcctggtgagcatggggctcaccgcggagttctcccttccctgagctccagcctgccctgtggcctcagaccgtgtctctcttagccggagagtctggataagatggtgttaatggagcacaacaggctggccaccatcggaaaaacaaccgcaaacactggtcttgctagttattggtcaacaggggttctgactggagtctaaaggacaagacattatacacttagtacttacgttcccccaaaatgaccatcctagtgtataagctttttggttaaatgactgctgcgtaccaggagtgcagtagcacccttgatgtagttgttgtggtgacacctgtgtgtcgtctgcccagtgggctggctcagtgtgctgggctctgtcaccatcttcccctgttactgcagtaaacaggcgaaggggtactctaaattattgttgggatgtggtgtgtgtggttttcactggggtgagtgagcctcaccatttctgttgctctgagaatgatcaaaaaataatattttaaatgaagatagtgattggatgtgatacttaatgtgttttaaaggacacttaatattttaccaagatgcgaggggtgaaaagtcagtagtttattgaaagaaatagcatgttgaaataactatttaaaagagaatttttaatacttgagccattttaagatgcagaacgctttcctgcatttttccccctgtgaaaaattctctgaaaccagagtgactcaagcagagcctggaaaatactggagaatcacatgatggctaaaaataagcacatcatctctagcagggacagtaagcagcagggcagaagtaactcagtatgtgaaggctcacactcactggacatgctcaggagagtcaggccctctgtccttggcaggggcaggctttgagaccacaagtcagcgaagagaggtcctcaggtgctgaccactctgtgccacagcagccatgccctcggcaggcccctgacctgcagcgcgcctcactcgtatgctctcccaggggcagagccatttattttacactgtaatgacccctaaacagtggattgggagggaaaccggctgactcagctcttgttactgcccgttttctcttaagccctccccttggaatcaatagcacatgccattgatcacagaatgtctttttgttgctgttaacattgcaaaacataggttttgtgaaattgctggacatttggcgactgttctgtagggtacagaatagggtttcctaaactatagcattgcaagtactttaccaaaaacacaacaaatcttgtcttgggcactcactgctcatacccaggaaaattactgcagtagccacctagctggcctttctgcagctcccctcagcctccctggtctgttctcaacacagcaggcagagtgagccttttgaaagcaaagctagatcatgtcactctgttcaggatcctgcagtggcttcccttttcccttgcgaggtcctttgcgacctgcccttccagtacatctctgaccttctgtctacctacagtatcccattcttaccctgcctcacccacctgacctggctgctgagtggagaaggcagggcctttgcacccccattcagcatttcctctgcctggcctgctctgctcctggctgtccagacggccaccttcctctcctgcctcaggtcttggctcaggtctcacacttactgtgagagaccttgaagaaggaagggttactcctgcaactggcatgttccctgcagggaacctggaagttgtgactatggagtttgttacaagagctgttggcttctgtgaagaatgagacttttgagccccggtgaccccacacaggaggttctcgcctcccgtgtctgtgccagactgctgcaggactcccagcaagaggggcacctggcgctgccctgctggtgcttggtgttctgacctccgttcttctgggtggccttggtgtgagtgtggcccatgaaagtaccatgggtctgagttgaaaaactgaaactggaggaagacccatagtggatgcttaggccttccatgaaattcctatttaaaattgctacttacccacccgcagcccagctctgtctacccaaccctgctctgcttttctcttgttcatagcacttattttctagtttattctatcacttcctaatttatgttattatttattgtctagttcccctgttagaatgttaattccacaaggacaagcatcttgtgcgtttcattcattgtttgatctcaactgcctgttagcttcccaggtacataatagggttatggctcaataaaaatttgcacaaatgaatgaattaggataatttagaagaagcacagacggagatagatagggagtgcatggaatggaaggaacctatgccttggagcccattggtgggttatgggttaatcacattttttggttctaaaaacaaatttattgaagctgagcatatttacatgatgcagttgtgcatctttatacagtagttgttcactgtgtaaaaactgggttaatcaatttttataaaaatgttctttaaataaaaatgagccttattttcttagtatttcagctgtttttagtagtatctagaaatgggaaacaagtgcacttttgcatcatttgttgaatcaggtcttatttgctgagtaataatagtaatgtaagctaccatttattgagcacatgctgtgtgccagacccttgtgtaagcattttccatgtattaagtcatgtacccctcccaactctgagaagttggtgctgctcctcctttcttaaatgtaaagcaaggtggccacaaagccacaccagtcaggaagtagtggagctgggacccctaagaaggctctctggctgcagagcccccactcttgaccactgcactcactccctccctagaggcaggtgaaggatgtccaattccctaccaggtcttcattcccacgagattggtgtggctagtgcctgctgtgtggagctgcccctagctgctcaaggaggactgcccactcttaagagcctccactgaaaaggaagagctgcagacctcaccactggctgcactggtcagaacagaagtcctaagggctgtaaactgccaatttcagaattaaaaaaccagcctcctagtgatctcatgaatcagagcatcccagaaccctgttaaagtttcatttggatggaaatctgtccactgaggtgcttttttgccctcagctcagagcagattacagaatctacaaagtgacagtacggaggcagttttgaaggaaagactaggtcaatataacttgaatttgcagtaatcagaattctgtagggactggcaaccctattgcagtatgagggctgtggtgtcagttcagttactgaggaagtcctcttcctatggaattcactctcctcatcagtctagcccataccctttctccagcaatgacattacttttttttttaaccaagctcatcatctgttaaaaaatataatctctttgccaaggtgcaggggataagaaagtaatatcaaatccatccacaatgaatcaatacagatgcagtgtatcttctgccatagttgttcagctctgggttttcttcaattgagtgagaacggctagggggatggtttgggaagggaaggggctctcaaagtagagaaaaattgggattgaccatgaccagaagagtggtggccgcctgcatgtgtgtgtgcacacgctcatgtttttaatgtctcttgtcaacagtattaatgtcatatttttatctcctctgtttatgactttggcaaaaggaataatatggcagattatgtgaaaagaatttctaaattccagcagagtcttggccatgaaggataaagccaagtccagtgctttgatttgcttcatccttctgaatccattgggcctcatatgcccaacttgttgcagcgttttccataaacattaagcaagctactagttattgacattagacacggtaatgccctggcttcactaaggcagtgaatctgaccactccgaatttttttacaactatggttaaaatgtcagaatcatatttatacccccaaatcctaaaggcattaattaagacacaactgctcaaagactagcattgtaaatcatgtccagtgagcaaattcagagaattacagggacttagacagaatttatgcttttttcctctgcttctgagattcctttttattttgaaaggtaaaattagggaggtagaaaagcttgagggcaaaatggttacttgtaaacagggccactactaattatgttcttaggacatcctcaaatgcagcttgaaaaaaaatttgaaatgtttgaatcagctgcaagaaaaaaaaatctatatctgtattacagccaaagtaggtgcactctctgtaaaagctgttatgtaaatgttttccacataagcatcattgagccaagaggcctggtaaaggtacagaagtcaaatcactgatggagtggggcattctgggaagcaagaagatagctattgaggacttcagtatctaaaaccaggattggatgctgtcagagacatgtttggagcagtttacgagattggaatacagatggtagctcacataaaagtattctatcaatgttaagtttatgacattgataactgtgcagttttgtgagaacattcttgttctagtgcccaggtaagggggaaagagtatctggcagccccagaaattttagagtgtggttgttagaaggcagcgagacctagaaagcaaataaacaaaaacaagttcttaactctaaagagttatgctgtatgttaggatattgtcttttatttattctgaaaaagaaaacatgaaatcattgaatataatgaggacaaaaggtttcatttttatttttatacatttagtatttcttaatcatgtgacagctgtgaggggtaaattacttccgtttcaaattgcagcttgggatgatttaatgagcccactttacatttatttgaaaacaagcttttagtttaactgttaattatggggtttttttgttgtagttgttgttttacccaaacctcggaagatactaagatctttcccatgcctttcctgttctttaatttcttcacatttattcatttgaaggtaaaaatgtagttaagtaggcctgatctcacatatcctcatgcatcatttattttcctgttatcagtttttctccgaacaatagaatttcaagatccctctcattttaaatatcaaatactagttacctaagtgattgattattaaatgtttagaattttttttccatttcttccttcactcagcctgcactgtgtccccgttagtgaggcttaacggtggggcagaagcggtgcttccatcccacatgtgtgtaggtggtggagcagcagaggttgccgagcctgattttcatcgcctgcacctctctcatctcaaagggatccaggaggtgcacgtgtgtgtgccagtgggaaagccctggggccctaggccaccacctgacctttgcctgattcgtgagcacagatgccattttagggccgagactctgctgaaccacagcttggtgagtccaagccacacaggcaggttgaagttgggctctgttaacagaaagggatatttcctcaggggaagaaaacaaaacaaaacctgtttccccaagtggctgtgtgtggctagaagggggagagcatcagtaactgcagcagctgtgccctccctccctgccgtgagccatgctgagcgcctccagcggccggggattctccctgcgtgtctcactgctctcctggccagtgtcctctgcttcttcatagttgctcttccccgataacgtggctttgcccaggggtttggcttgccatgaccccttctacatcttatcaaacatttcagtttttttttcaagctctgtttgataataccctgagaatataattagtggtagccctttattgtaagcaatcagcttctgtttcttccatgattttttctttttaaattgacatcagactggataaggccagataccagaacatgagtgtgtctgatgatcctagctcagttattgcaacgacttttttgttgctgacctgcctatgaaagactgccagggtgggtgggtcatcacatgctatctagggaagccccctctgcaaggctgtgtccctcaggaggggccagtgagcatggcacaggcttggacagcccagcatagaccactcagagttaagcatatactgactgagtttactccacctctcctaattgtgtaggtaaggagcctaagtaatttacagaaggtaatcttaagaggaaaccaaggaggagctctctttctgggaggctgatggtttttatttggtttccttcttgtcttgctggttctttgtgtctgtgactttgacattggcatcagctcctcaagcttcccctggtgtccttaccctggagagatgcctctgctaggtcttatataatgaattataaaaactattattgaatttctctgggttaggcactgtgattggtggtgagagcataaggtgactaaaacagatgaaacacctatgtcctagggtttatgttcatgggagaagtagacattaaagaaatagctgtaccacaacagtggaaagtgttcagggcactgtggcctcccagacaaagtgacatctgagctgagactggcagggtggtagacctacttgctcagaggaggtaggggacaggaaggaggcagagagaatacagcctgacttgcatggtgtattagttcttacagtgccataaagaactgcccaagacaggataatttataaagaaaagaggtttaattgactcacagtttctcagggctagggaggcctcagaaaacttaaaattatggctgaaggggaagcaaacatgtccctcttcacacggcagcaggaaggaggaagtgccaagcaaagagggaaaaagccccttaaaaaaccgtcagatctcatgagaactcactcaatatcacaagaacaacatggaggtaaccgccccccatgcttcaattacctgccacggggtccctcccacaacatgtggggattatgggaactacaattcaagatgagatttgggtggggacacagccaaaccacgtcacatgggatggtcatggagtcatagaaccctggcttgttcctgagaacattgaaggtgccataccagaaattcttagatagctgttgctctgtgtgagactgagctagagaacaaagactgcatcttaggcatttttaggggcctccagtgcatggcccatggcaggcacttaacaaatatgtgtgtaaggggtgttgatcataggtagtcttcgcactgctttctgttagacttcctttatattaaaatatgaggtattgcttataaaaagatctgaaagaacttgatatttccgagctgtctccccagctgttaggctggtggctgcctcagagaagattctttgccagatcaggtgtcctcaccctgcctcccctgcctgcttgtctacttgttttctttacccagttggtttgcctttgggttaaagaacttggtcagcgggacatggaagtagtgttccaggagtgttttatatgggcttcaacagagctgaagcccatataccagtcacaaagcaaaacgtcagctctctggaaccctggggaagctcttctgcacagatttaccctgagaatattcaaactattttaagtctttcccaatttaaccattctcattttaaagtatattaggcacctccctgtgtttttaaagaagtttattttttaaaaatttttaacagaaaggcttatatttaaaggctgtaatgctgtcagtgcttctagggggtgtgacttgcatccggagctaatgaccccaggcacctgaagacacaaatataaattttatggtctttctgtttgctactttgtaattaggatgttggttgaaacttgtaactgctgtcacatacctgtctttataacccttcggctcttgctaatctcttggtactaataaactgtgaagttggaaataaactgtaaaattggaaaccgcatcactaaaagttttatttacttgtttatatagttagttaaacttttgctctttaagcaaatacatgttcagctgagcattgtgctacgcactggggttacaaagatgagtaagatgtgtttcttgctctaaataagagcaggggttggggaattaggccagtgggagcacagagaaggaacacctgcaccacactgaaggggtagtggaagacagagatgccacttcacagggactgtgttcagaggaaaagggaatggacgggcccccagtagtggcttggaatttcataatccatgaagtacactgcgtatacattgggacatctattttggccgcagaggccattcttgtgtctgcgcgttgttctaggtagtgagagtctattgtgacctgagctccagataggcgaggtcttacctgaaaccaatggtttttcttttttccacttcacaacattattagtgatgctaagtggatcacttccttaaggtgctgactctcagatctccccattgtaagggtgtgttttcccctttagagtaacacatgtaaatatcttgttccccaaaaccctctcacctaaagtttacgtgtccaatgacgagccctttgtgaatcgcttattagttacggatgttgcaaaattgtgatttattttctagttccagcatttcttgcatatttagtggctgccagtgttccttaaaaaggattgaaaagatctttatattcttttctcttccctctccctctccctgtcttccagcccatctctttttcagtcattatagattaatagatttttatttatccagtgcattacaataaatgaagctattgttcttcctgatattcagctgtcccaagtgtgactagttgagagccccttcaagctcttgatataaatcctggagcacctccttgctttttgacacaagatatcctaagcttaccctgaacattccctgcaccatccctagaatcagccatttctcaagaagcccttttattgcagaataacatttagaaaccaaagtttgggcatcaggagtgccactgctatggagatgtcattgctcttaggtactttagtggctaaagctaggaaatgttttaaaagagaaaaaaatacatttggattgatatttctgctgaagtattaattggttataagatcttttctcttgtttgttagaaattcaattagggtgatacttttaagtttatctaaaaacctttcctcttaaaaatcttaaaatccctttgttctcttactcttatatctccagagggagaagggacaatggcattaacctcatgttacttgaggaaaaaaaaaacagcactcacaaaggtgagataagttgcccaaaacaaccgtactttaactgtgtacactcctgctgaaatatttatactccttctatatgggaagggatcactggaggtatctcttatatgttgttgtaagctcttttcatatcattcattttctatgtatctaaaacacacttttaatattgccagtatttatcatttattctgattgctttcaggtgcagctaaatcaagtccagcagctaaaccaggatccacaccttctcgaccctcatcagccaaaagggcttcttccagtggctcagcatccaaatccgataaagatttagaaacgcaggtcatacagcttaatgaacaggtaatgcatcagctctggccacgcctctaggagcagtgacgtgtgtaagaggtagggggcctaggatcccctaggactggggtaagggagggaagggtaaggaagaatccttggtttcaagtaagtgagaataaaaagaattgttcgaagacaaaatcagtagcccatgatgaataaaaagtgttagtcacaaatctcaaagctgtacattaagatggggcagatggctcagccttgctgcagacttcaggctaccttcccctcccctgctcctcagggctgtcaagagctccaggctagaccgttgcccatcctgcccacttctggccattctagatagtgctgcattagggtgagtctgcctccctctctttttaaaggctgggtcagggttagtctgtctccctcccactctcttcttttttcccttcttcctttctttcttcagctattagtagttgagcttattctatatgaaagatattacgcttaatgctggtaatataaaggtagtaaaatagatacctttccttccttcatagaacttggagatagcagttgcacacagtaagttattacacaagcaaaacaaaaaacctgatacttcccacaatggcagaagttgggtgctgcaggagcaccgaacccaatatttgggggatctgaaaggccacaattgtgttttaagtagaagagctttccttttaatttaatatgcctcacagttatggtaaaatctaactagctccactagtctttgaaattttcattataaaatcttaggtactgctcatctttcctaagattatatgtagcttaaaagtaataaaagcaacgggtagtggagggcccatccaggagagccttttatcctggctaccctgccgctatgagaggagcctttacttcagggccccaggctgttcccagccgctcactgggcccgtcgtggtgattaatcttattcttgatgagccagcaagagtttaaaaacagcttttgtgataattgtatatttgtaatcaagaatctagtttaatggaggcagtttcttagctagggtgtttctttacaattctgatcactttatggaaaaaggtataaaaacaagccatccagcaggtaggacttggatttggaaactagaatgttctaattacctgctgattctcagtttgagccctgtttccaataatgacttcttctcaattaaaaggcagtaaggacagtcataatgaaccttggtccacatgcctcaggctccaagaaaatcagagtagacctaaaggctgtaatgccttggacctaaagttagtcctcccatatccatgggttaccacatctgcacattcaagcaaccaagtattgcaaatattcaaaataaaaaatagcaatacaaacataaaagctaatgcaaattaaaaacagtacaacataactttacattgtattaggtattataagtaatgtagagataatttaaagtatacaggagtatgtgcgtaggttgtatgcaaatacgatgccatcttgtatcgtcttatatcagggacttcagcatccatgggttttcatatctgagggacatcctggaatcagttcctctcagataccaaggcacaactgtagaactctttttccttaaggaacccaaattcttttggtatctttcttatcttgtgtttcttcatgactcctccctctcttccccgtctgccacacccagtgtcccacctctccagcccaaagtataaccacgtggaaaccttgaggttctctcccgcttatagcctgaaccgcccagccccacttcccctccttggggctggctgtaggctcccgctagctctccagatcacacacagagccccatccccagggaactcagacctctaaaatgcctccactaaaccatgctaccatccacaatgccactcagagaaccgagtgagaagagagaggaataggccagtgccgccttcctgttataatcctttcattacttcccaaaggcctgcctccccatttctgcccccaacaccttcacaccgaggaatgtgcctgcccctgtctgtccctcagaaggaagacacaccctgaattctgagtccttcaatcagtattactgagcacttactccaaatttatatccgtggttcactgttgacgttccctcctttttctgtcttggagccaacaggatgccccctgagcctggtagggggccccacaggcatcatggtgttggaacaaagaacactcgggcgaggagaggctgaggggagaccctgatgctgaagggtgaagcacagtcatcactgagaaagagacaagtgccataaacttagaggagtctcatttgcttggcctcctgcattttctcaggcaatttcccatgatgcactacagaagtaccactatgctagaccattcccatgatagaaatgaatcaaaagatttaggaaaagtcataaagaaagtaattagggactcgttctgtatagtgggttagccacccagaagtgggttggagtcagtggattagccaactggaagtaggttggtcttcgctcggagcgcgggtggggccacggatgggtgtcgattagcccaggcagagactatagccatcactgaaacagcaaggcctgcaggaacctgcagtctatggccacactgggaggagttggaagaatggtaagaagagtgctgcttctcattttctaagatcatctacagcatctccttcattgcttaagcatctgccataacccaagagggatgaggctggcattggtctttgtgagggggactatgacagtggaattttgcttgccaattgatctttcatcatgtaagttagctagtgttggtttttactagggaatgttggtagtggcagctgttacctaatgcatgtggaatatcactgaagcctgatttgcactaaagggttgtctggaaaagcctcagctatgtgttcattgtgcagaacaaagccctagggagccagacagacctattttcgtgggttggatgtgtccttgcctggtacagggggctgggggggggtggcacatctaagctgccacagatccatctgctggcactagcacagggttgagatggattttatgtccaaacctggggagaggttggtttgttttaaagcaggaaaggatttctagaataagagttttcttttttctggaatttaagctggtcaccttcagtttttttgtacatcttacaaatgtgcaagctatagtattaatagaaatgagttaaaagcaaactggttctccactgctttgcaagcagccacatgggggtgtcagtgagggtaaccctgaatctacaggatggatatggtttgccaggtgcacaggaagaggatggacactgcatgggctcagtgtgtgtttgaatgaatcagtaattccagatggataaagcatacacaaaggcccagaattattagaaggagagaggaggaaatttgcattccaaatgtaattttttgaaattctattaggggtgatttttaaggtaatgacagagagattttacctaaggagggccatgaaagacttaatttaccacctgaagcatataccctacataaaaataaacgaagggtttaaacaaatggggatcctcagagaccaggaacggggtaatagtttgggcctgagtgtagctgctgcgcctgtgggactatggtagactgagatttgaaaccagatctagtcacaaccccgtgagggtttctttagctctgggtgtccgagttcttggaccctcttttgaccactgcctcctcccttcacttggactgttctgtagccaccctgagaagctgcacaaccctggaaactctgaaccaggatcgaggggaagaaagaggaatgagggctactgtggtgagggaataggccttccttgccctcctgccttcccagtgacgtacccaaagcccgaactagagaaattgagacagatccactcagccaggctttgggtcttacccagttttcctcgtgtcacgaaccctcagtttctccctggagagcgtttgtctaatgtggctcagtatcatttgtgaaagggtctagctaagcgtggcttccatgtaagtgatctaagggacggagagtcctcaacataaaactaaatagccatgcttacagcctctctgttctgcttctctttcctcctcccattctccatttcctgcagaagatgaacaagtatttcagtctgttcaggctgctagagcagagtactgtagacagggtgacttataaacaacagaaatttacttctcacagttctggagactgggatgtccaagatcaaggcgccagtagattcagcgtctgcttgaggccccattcttcatagatggcaccttctcactgtcttcacatgctgaaaggatgaataagctcgattgggcctcttatcagggcactcatcctattcataagggctctaaccccatgacagccacctcccaaaggccccacctcctaacaccatcaccttgggtgttaggatttcaacatacacattttgaggagatacaaactttcagaccatagtaagaagttagaggaaagatgtgttccagcctatgttagcaggagacgaaagctcacttccagcctgcggggaaccgcacaagcagaaagaccactctgtccctggttaataaacgctcagttgcctgaagggaatgaccagagtgctgtggagaattggacgttttggcccagggtcaagctccagacaacagccctgttgtttctccctcagacttacacattggttatttctgcttctctctctctctctcttttgggttttattcacaggaattgctggtcatgtcttatactatattttgggtggttttttttcttcactctcactcccttgcaggtacattcattaaaacttgcccttgaaggcgtggaaaaggaaagggatttctactttgggaagttgagagagatcgagctactctgccaagaacacgggcaggaaaatgatgacctcgtgcagagactaatggacatcctgtatgcttcagaagaacacgtaagtgtgaggagcatgtgactcctgtgttctaaaatgactctcttggtcaaaacacagtagatcagcactccttagaatacttccccaggacctcaatgagaattactgctcagccaagtgcacctgatagtcccaaaggaataaacatcgttatcatcatgatctattgacccatgcctgtgggacaggcagtcataaattaatctgggaagagacaggtggggtggggaaggctttgacagaaaaatatgcttatgcagccaaactgcaagtggtctgcagctctctgagcaaatgagcattaagaatttgtatacggattcctccttcttcatgcaagtacagagtgtagttaaaggagaaaataatctagatgcttttcccatccccagaagccccataattgactgtttttatttcgtagctggttgtcttggttactcattgccaggacagactagagctgtgggacagccacatgcccatctcctttatggggaggagctgccaccagagttgctattcacaagtgctgctattcacaagtgctgctattcacaagtgctgatggagacccaggatgtggctgtgtcagggtgatgaaaagcagatgtgagaaatggaggaggaataagaatctaggaagcaaggagagaaagcggggcaggatgcatggcagagactgaggcaaggcaccccgggtctgccagtgccaggagagagaggcccagcagccagaggtggaggtgggagcctgatgtggcttcaccttccacagagccaagttgaggggttggggtgtccagcttctcttatgccaggctgatgctagtggaagtgtcccggtctctgggtgttctgagcctgtgatgttctgagggcctccagtggagttgtatgtgttgatatttctataggacatagcaagccatcagcaagtttactctcttattccagctgaatcccaggcaaatgtttactccatttatgcctcaaaatactagcagtgaaattctcctaaactgtaaggcactgtatctgtggtttggaagctctttatcacttttttttttcacttcttccaaatattttgatttaaattatttattggttatcaatagctcagaatttgaagccctgataatccacctggtttccatgatggcttcataaaatacggttctcagtattttcagatctgatggaataaaccagagactgatttgtagtatgtctgcagctgccacagtgtcacatatatgacgtcctgtgtgtacagagtgcttgccctctgtaagcactagatggactatggttattctcttcacaagcttatttgaggctaaatcagctgagatctccacagcgccatgagactgagtgaatggcgctgctgtctgcgataacgcctgctagtgggaataaggccggcgtgcaggatcaaatcttcttcccagccctgcacttcaaacggggaaaccctgagtctaacctcatgccagattttgtcccaagagggagtccatgtgcaggagcactgtctgacagtgaactccaaatgaagtgttggagaggtccactgaattcccggctaagataggtggacagcctcaggcaagagcccttgcctcctgggtgtgatttccagggggtctacctagatgaccgcactcagtttctgttctgccatacccatcaccacccgaccccacacacacatacatcccagcaccaccttgccaccatctggattcagagagccattcctgcaatgtacatgcaactaaaatgcaagcaccccaagaagaaataacactttaaggcctcatcattcattaagactaaataataagtttagcagacacctcttctgagacacctggttggggtttgaggtagaagggtctaggacttgacgtatattagcttattagctcctataattctctagagaatcctattaggtagctattgtcatcccattgtacagatgagggaaactaaggcagcagagaggttgaataactttcccaagtctaggagcagaataatttccatttgaaccctgaaatctgaatcctgagtttatgttctcccttctccaagtctgaggcaccttttaagtgctattatgacagtagtaatggctaatactgattgagcatttagcatgtgctagggattgtattcatttactacgtagattactgaccttaaccacatccctgtgaggtgagtaattacttatctacattttacagatgaaattactaacccaatggctcatagttaataagctccagcactaggatttgaacccaggtttatctaactcagaggctaaaatcataaggactgagttacctccctcgccgagtggtgggtaccatggagcagggaggaaacgaacatagtactagttggggaaagcctcaagattaactgtctacttgacagtcttcagttgaacacgccctgtgtgtgaagaagaaagtttccaaatttttacgtgggttttctctaaataactccccttacctcgttttgttgattttcaccttcgaaagcctagttgtggcctctttttcggggcattcatctgattttaaatgagcatccacaaagaacttcagttttcttctagccagtttgtaacttttttaaacccactttgttgttgtatctctggcactgcgctgacatcatcaaatagctttaagggaaggaagagagagggaaagagacagaggcattgccctgtaagtatatgctggggagtacccaaaattcaagaagagaattactcagagtaaccaggcagttgaatctggcagagaaaacagccttaacataaattgcatgtgtgggttaccagagcaagatgttcaaatgcagttactggcttaatttttctagttccaggatatttttattgcaactttgtgtctgcaaaactccaaaagagacacatcaggctatactgagttttctacagagagtaagccgtttgatctggaatatgccaggtgtccttatttggaatgtgacaagacccatttgtttaaaccttggtttttatgcagaaagaaaaggaaggctgcagtgggcctggatgccgtgctgggtgctttccatatcctgtgcatgcatgactctgccgagaggctcaggagcagctagatactctcctttctgccccctagcactccacctcccagaggtccaagaaatcatcctagatatcttaaagcctccaagcattttcatttcttcctgagaatatggaatctggtttctctggaaccacccagaagcacatagccagtcctacactgggggagtgagccttcctaaagctgtacccttgcctgccttcccctatgtctatggtctggaaaagcaacggttttgaaaaacaatgtgcttagtggttacgatgccatcatacaccactgcccccatctctgggaatcctgcctttgccccactgtgctttcccctgacattgtgtcctgttttctggccagccccacacttgtgtgatgggtagatttgcacccatgtgcagggatgatgtacatggcgtctgggaggaagtgccagcactttgttcatgatgctgttggtacagctgtgtgtacagagctgagatggcacagatgcctggtggtctgcctttcccagagccctcctggagctagaaggccaggttgcagcacatgctgttcagctaaacatagatggacatgctttgctttgacatttgaggtaggagtatttgctggggagatctcttcccctgagtgattacttaacactcttattttgtgatgattggcctctgattgttatatttaagccatcccagaatatggtgtttggaagatgtgaaaatccaggtgggagttttgagcagaaaatcaacagaggtggttcaattcccagttgtagagacctaatggaagtttccagagcagatacttattctcattatgttttcccctgatacgtaacttggagccacaggagtctgggctgaagcattggttacctgctccctgtggattctgtcagctgaagggcaccagcttatgaacagttacttgtttcctgcagggacaggctgtgcttctgtcactggagggcctcttgtcactggactaagtgctggctatagaaaaagacccaaccctacctcagaggagctcccagtcccagtaagggagacagacagggacatgactaactggaatatgtgtcagatgatgacaaatgtgataatggagacataaataaacttgtgtggggagcagataaaagccgcctggaggaccatgcagagacttcacagcgaagatggcatttgtgttggatgttacagggtgactgggaacatcaacagctctagagctaaggtagggagaaactgcatgagcaaagcagagaagaaagaccagcagccacagctggcaaggtggcaggagacaaggctgcagggtggtgccttccacagctaggaagccaggagctgttggagcttcctgatgggccttcctctctcctttgcccccattttcctcccacagtggcctagagccttcttcaataccatcttccagtttgcctctctatctaatgattataaggaaactaaagaatgatagttttcttacaatcactcacagctcaacggaaagatgtgaatagattgatacgcacatattagaattattaggtgatgctctggtgcattagtctcatatttggtataggttttgcctggcctcctacttagacatgggtttaagttcttcattctcgtataaggcatagaaaaagattgttttttcctgtgagcctgcaatagcattgtgtgggctgtgagctctcagttgtgatttgtaacaccccagaattacagatgtgttctgccagactctcagactgccttaacttgcaggccaagcatgagcaatccattgataaattgggagctttgctggtatttcccagtgagagttgtctggggtccacagttcctgcagatgcatgacatcacagaggggtcctgtgactgagatttaagctggatgtgcatgagaagcagctgccctgggcatctggaagcctcagagccatagaaaaggccagcaaacctgctgccttgttggatgtgtttggaaaggaggcctagcctagtggcttcctggccctctagtttattacaggctcaatgattacttgaatctaggtctttcaactttagctccattagcccacaataaactcccagttgtgacgtgagcaaatgagaatttctgcaaaatgtaaaacagttcctcatttctgaaatcttcttttcagaagtctaacatgcacagaaacaattatataaagaaaagcatactttagaccagctgaagtttgagcaatacaatatggaagacaccacactcacgttcaagagttaggatgctgaataaaacaatataactcaccgtggagggctcagagcccggctggagagacagatgtgtagccacccagcaagaacacacgcgggactgtggtgcgccctcccaccgaagcagaaactgaggataggaagcttggagagggaagccattatctcggggctgcaggcagtgagagaggcttcagggaggagtgactttctcataatttagaggagcatgtggcgggacagacagctgggagttcccagcccaccattcttgttaaactcccatgaatgttagtttcattcttctcccttggatgagaggagagcactggcttaggaaggccagtaactgtttcttgtcctgcgctggcccaagaagaagttctctcctgctcccctgagcatgtatggccacactgttggtgaggcactgactctgagctgagaggaccagcctcacatgtgccagacagaaggcaaagcagtgtgcagaggaagtgccaagagcacagctgctgtgatgcccaggggtctggggtcgatccggcagaaggggagtaaagaggggatcagggctctgagatctccctgaggtcaaagagcacctgcaattaaggaattcgggagtgcaagggtcaggaagacacatgatgtgatcagagagagcaagagattgggcctaacgttccagaagtggagctagttctaggtggtgaacacagggtggtcatggggtagggagagctcacatttgctgaataaggggcctgtcggcacggtaagagacaatgccagatttttccccaagttttcaacacaatgtcactgtctactgttggttgacacagaaagggttacttttttaaaaaaattacttgcacttctagaatatattccagagttctcccactaagaaataataatcacagctcacatttctatttaccatgtgccaaatactcttctaggcactttacctattttaactcattaactcctctgttggattcgaggagtcctttgattcattgactaatgaaaatgcattgaaaatgctcctacatggataccttatccccaactttacaggtgaggaaactggggcccagagcagttaagttctagacccaaacccacacggcctgtaaataacagagctgggatgtgaactcgagtccatgttgtaaccttgacattctacttactgcctctcagaaaataagtggctcgtgaccttggctgatagtctgatagtctcagtcatttatccttgaatccactgcaatttgttcctctcaacacaacatggattgagtcttacataagaaagatgtggcaccgagaatcctatccctgacctcagtaacctcagcatccagtgggtggggccaaaagggtcaagacaagattccaaatcagtgtcatagcagaggaagaaaacaaatgctgcaggagaagagagaaggaattctggctcagtgatcatgccatatttgaattggctaaagatgggtttgtcctaagctccaaggaagaggggcccgacagacagggaagggcttgggcagttcagtgctcgggagccagcgtgccaggtgtgcgaggcatgggcacttccatatgtcccagcacatgctccagactgcatcacagaagctgtgtgcccttactgagggaacagggaactcctttgattagccatgctccctcagcttgggtaaaaaacagcaaatagtttgtgtgagttcagaaaatgaatgaatgtacagatacggctgactgaggctagtgctccctggagttggtgttcatgccatgcttcactgggttagataaaggaataaatagggctgtttatttctaaatagtgggaagaacaattcacctatctgattctcagttgataaacataacgtaagccaaaagggccccaagcagtctaagtagatgtcccaaagtccttgagctaaagctcctgagctccctcattgggaggggcctctttgcctgggacaacccatgaaatgtggctgctgtcctttccttagcctgggaacctctaacactgctgctctggtatctaagcctacatcaggttagtaacataacaaagggtctccttcagggcgacactgccgagcaagaagaatgacagcaagggagggactaggaaatggagcaaaagcccacatccctatccattagtgaggagtgacaccccgcaccaaaataccatggaggccaggggtgctgcttttatattacagcagctttactcatggttgtcatgatgctcttggatcactgtgtttggtttactcttttacaaaggttaggaaagtatgccatgtattctaagaagatttccttccaaaacaaaatagttgggtgcctaaagcctgacgactgtgctttctagaatgatctgttctttgatcacatggggaagctaaggcgcccctgcatatgtatcagacaccggaagctgggagacgtttgcatggcgagttgtgcctaactaagcctggtgccctccacagccttgagacgccatgctggcagtggcaatgggctgggatgctgcagggccccattcccagtcaattatctcagctgaaacttctcccctgcccacaggagggccacacagaagagccggaagcagaggagcaagcccacgaacagcagcccccgcagcaggaagagtactgacccaccccggctgctcttgacacttccattgtgtgtgggaacgtttcttctggagaattggaacatgtgtggccccaagctcaacagaaaccagttgttcccaatctgccgttaccatcaacgcactgttgcatatgccagccactgcgcttggttcccattttctttgccaaggtgtattagcggacggccctctggccacctacccgagagatcgtagggtcacatacatccaacttcaccacttggctgcttgagattggttctgctcttttcttcatttctttccagaacaactctttcccaccccaacaccactgccaccacccctctttttatcctggtgtgaaacaatggtaatttgatatatggtatttatattggcatttttcaacccagtgtcactagatgtcacacacatttgtggtgctttgatgtttgcaagtctaacctctgaacataaatttggtcaaataattggaacaaagggaaacagatacttgatatgaaagccataatgacggtgacttgtgtcgtgggggaaaacataaggtcattttctccctctactcacaatactaaagggaaaaaatggattcaaagctaggatttcagggcccagcagtgttcctccatcagcatgttagacaactacacagtatgttgttagttttgaaagacattcactcaaggaaaacaccatctcaactttgcccgctcaccatgtcccttgcccccatgtagcccatttcccaggttatgctcttttctttctcagggtcctctttggtgggcagccactccccgagatgttgccatcagttttctgcagtccaaagagggtatggttaggtacgggtcttcctgcctcattcctcttcctctttgtgtaggtttcagccacaaaactgtcattcactctaggggacccctactaaagggtaacttcaggtgtgcagccctgagctccaaggctctgcaccatgccacacacttgctgtaaggctagaagtgaagaccttattaataggagcataattgcgagggagaatcatggttctgcagtctggtgtagacactggaataacagcacagaaaaatctatgactcccaatatcttctagaataaagaattttccctctttaacacaagggccctccttgtcattgaccttagctaaaccatggcaattcataaatagaggaaacattaatgaattaaaagcattccttattttttaactaatatttgtacattttcttagtctctttccaagtctttgcctcttttttttctttatttttattttttcctttgacagatggtatcccttcctggatcattcatttcaccttggtttctaactttaggtttactttcacttgttatttgacttagcaggtgcaacaaaaacaagaaacaaatgtgcccaccccactttccgcttaactgaaaagcttaaaataaatttctgaattatgtatcctgaagctttgaaatttctttattaatcgatgaaatatgaattctaaattctagcattgaagcttttcaccaaaagaagtctctccaaaataaatcttttgcagcaaagtgatatttattgagttatgtggaaaagatggcttgtatttttcagattattacaacacactgtgcagaattagacagatgttccgtggtgtttggtttccctttcttctctctcctgctcactctgcattatagcagcagcttatttctctaaggctggacagcctggctctcggcagtgacgtcctcccacacctggtcacaagtagtagtggctgtgctatacccagcatcatgcttaacagcgtgttgcccttctgagcctgttgtactcactgatctctttaaaaacaaaaaatagctcttgtaaaaggtcacaataactctatgcacctgatactgcagtggttcctaggccattcttcatctgctctggacatctcagtcatacccaatgctcagtggatcatgaccaaactcctgtcatgtggatgcacgtgagtgggtagcagggagtcaggatcctgccttctccagcaaccccttactgctgtataacttgcataagcctccctggtgactcttgcaggaaccactccattgccctccagctccccagccttctcagttataaacatgctggccagatctcttagcctgcaaagagaactttccccagtcaccatagaccattctccttcctgaaggcttggggcagaccattcgtttatttagagaagagctatacattcttctttctggtcccatcttaaacgtcttctgttgtgctgcaccccagatggtgtctcagatgctttggggaatctttaacagctgaatttgagtcagtcctcttaggctgcacctccagcctctgcagatcccccctcatttcccatggatggtgggaccccattattctctcatctcggcattcagggaacactttccttagcggcccctggtcacatgtcatcgggctgggcaggaagcgtccctgggtgcgtgctccacttctccctctcaggaagcccagtttcatccttagtaccccccctcgtgcccgctgtcggctggttatagcacttccactgctactgtcagataggaagtgatcgaagcagggggcaaagagaaagcccatatttgttctaagcagaaaagcaggaaaaaaaaaaaaaaaaagaaagaaaaacacctgttgacctgagagaagtaaattccagaagggaaccaagaactcttcccttccctggtgagtatttccattattccgttaaggtttaatatgcattcagattacttttactaaataggacaccataaagcttttgttatatattaaatgtaaactgaaaggaatgtaaacatatgtattgttaattataaatatagataagtaatgacataatagatgaaaaagtcttattcagatgtatcacattcattttacattacccacctattgtcgcatggtagaatagttttttgtctctgaatatgtgaataacttgacttgcattgatctttttacatatttaataaaaaaaaaagtatatgttaaaatctgcctggagttacagattcttaaatttttatgctgaagcttcccttttcagtcagcatgtgaataggaatagatttgtgtggatttacacatctacccacattttattatgatttccccggggcgggggttgtctttgtttttattgatggccaatgttgttaacaagagttacagactcgtatttgatatcaaatgtagcagctataataccttttaaaaactttaccaaaaaaaaaaaaaaaaaagacataaagagaaaacattcccttgggaaacattccacctgcaagcaaacagaatcctagctcctgcaggtccagcatactccatctggacaagacagtgctgggcaaataggaaactgtgggagaagcaggcagatgtttctaagtacagctttgtggcagaatgacctgcttgacaaaaaccctttgaataagtgtttgttgactttaaacggcaatgatttatcgacatgagctataattgtaataacaatttaacagatacaggaataggtgaaaagagaaatgtatttcaactggcccagtaatcacctgtggagactgcagagcaggccacactgggatgcagacgttaccctggagcctgcaggttactgggcttcagctaatacccttttcaccgtgaagagtgccagccttccctacgctgcttccaagcaccacctagaggccagtttggtttctctactgtcctttggccactattttccagtcacttgcctttaggcacatttctattaaaataagtgggaaaataacagaaagcaaagatgttacccctcttctccatctacattcatttcctcccaaggtacaccacttgtgacagaagtttgtgagccattacctgggtttgaaatctcatgctcaaagtacatgtgtgtttcccatttaatccacgaactctggggttttaaacacttgatcttagacatttgtgcacagacaaaaatacatgtgattcatcttacaaaatgtacactggtggactctagtaaatctgtcactgatggttcaaaggtggcgaaataacatgcttgttctattttattaaatctgacatcatttctaaaaatttgttgcttctggtactatggataggctcaagtccagagacaccccttctcaaaaaagttaatggaattccattgaatttgagttacaaaatgccagttctctaaaacacacacagacaacttggtttctgacttgttttattccttttaactgctagaacacaactatgatcattaattaaggctgctatcactagtaataacttttactgacccagtttctcagcactgaggcaatgttgccaaatagcacaaatgatggataaaaacatctccgtggatgtctaatagctcctgtcttgccaaactaggaactcataaaagatgttttccactcattagaggaatcctggctttatttgcctaaaggaaagcaaagctgaggagaaaatccattgatccctggaggaccctcacgtggcattggtactttggatcacaagactgccccacgggcagaccccccaactctgagccagaccccatgtcttgtatagattacgagtacacagaaggtgcatttactgaggctgtgcttctgttttgggtttacaaatgtcatcaaaatggaagacccagctgaagttaatttgttggatgcctttttctctcaattcactggaaaaaaaaaatgtttaactttttagcttccaagttttaatttctaaaacaggtttcttgtggtattttgcaacgattttatcatcaagcctggtgataaattgtttttaaagggtaatgatgtattaatgtacctttgaatttacgattctcagtaggaaactaacccaagacctaaatgttttcttttctagagaataaaaaagttaagtacatgtttccttctgtgtagctaacatccttcatatttttacactatggtatttctttaggtcttgaaggttatccatatacaataaaaaaaaatatgtttagtaaaatggtttttgtcaaatctgagagcttaaatgaaactttggaaattaaaaagtaatgaaaaggtctcataaatgtgtttggaacttactactaggatgctgtcttctaatctgatatatttattatgtagatgaaacatgaacttctaacggaacagtttttcttccagcttgaaagatcttttagaaaaagaccacagaaaaccaagccaaatgttagtttcttttaggctaagttatgtcaagataggctcagaggccatcctgtcctgcaaacaaagacattgtccagtcacctgagctttaaaaaaaaaaaaaatgcagagaaggaaaatgtgaattttaccccagaacttttttttttatattttactttaagttctgggatacatgtgcagaatgtgcaggtttgttacataggtatacatgtgccatggtggtttgttgcacctgtcaactcgtcatctagattttaagccccacatgcattaggtatttgtcctaatgctctccctccccttgaccccccactctgcaacaggccctggtgtgtgttgttcccctccctgtgtccatgtgttctcattgttcagctcccactttcgagtgagaacatgtgtttggttttctgttcctgtgttagtttgctgaggttgatggcttccagcttcatccatggccctgcaaaggacatgatctcattcttttttatgactgcttaatattccatggtgtatatgtaccacattttctttatccattttcattgacgggcatttgggttggttccatctctttgctattgtaaatagtgcttcaataaacatacatgtgcatgtgtctttatagtagaatgatttatattcctttgggtatatacccagtaatgggattgcttggtcaaatgctatttttggttctagatccctaaggaatcaccacactatcctgctcaatggttgaactaatttatattcccaccaagagtgaaaaagcattctcacttctccacagcctcgccagcatctattgttccttgactttttaataatcaccattctgaccggagcgagatggtatctccttgtggttttgatgtgcatttctctaaggatcagtgatgatgagctttttttcatgttttttggccatataaatgtcttcttttgagaagtgtctgttcacatcctttgcccactcttttttttttttttttttttcctgagatggagtttcgctcttgttgcccaggctggagtgcaatggcacagtctcggctcgctgcaacgtccgcctcccgggttcaggcgattctcctgcctcagcctcctgagtagctgggattatgggcacgtgccaccacacccggataatttttgtatttttagtagagacagggttttgccatgttggccaggctgctcttgaattcctgaccttgggtgatctgcctgcctcagcctcccaaagtgctgggattactttttgatggttttttgttttgttttgttttgtttttgtaaatttaagttccttgtagattcagatattagacctttgtcagatgggtatattgcaaaaattttctcccattctgtaggttgtctgttcactctgatgctagtttcttttgctgtacagaaactctttagtttaattagatcccatttgtcaattttggcttttgttgcaattgcttttggtgtttttgtcatgaagtcttcacccatgcctatgtcctgaatggtattgcctaggttttcttctagggtttttatggtttagggttttacatttaagtctttaatccatcttgagttaatttttgtataaggtgtaaggaaggggttcaatttcagttttctgcatatggctagccagtttttccagcaccatttattaaatagggaatcatttccccattgcttgtttttgtcaggtttgtcaaagatcagatggttgtagatgtgtggtgttatttctgaggtctctgttctgttccattggtctatatctctgttttggtaccagtaccatgctgttttggttactgcaaccttgtagtatagtttgaagtcaggtagggtgatgcctccagctttgttctttttggttaggattgtgttggctatacagatcttttctggttccatatgaaatttaaagtagttttttctaattctgtgaagaatgtcaatggtagtttgatgggaatagcattgaatctataaattactttagcagtatggccattttcacgatattgattcttcctatccatgaggatggaatgtttttccatttgtttgtgtcctctcttatttccttgagcagtgctttgtagttctccttgaagatgtccttcatgtctcttgtaaactgtattcctaggtatcttattctctttttagcatttgtgaacaggagttcattcatgatttgatgctctgcttgtctattgttggtgtataggaatgcttgtgatttttgcacattgattttgtatcctgagactgtgctgaagttgtttattagcttaagaagttttggggctgagacaatgggttttctaaatatggaatcatgtcttctgcaaacagagacaatttacaatttgacttcctctcttcctatttgagtaccctttatttctttctcttgcctgattgccttggccagaacttccaatattttgttgaataggagtggtgagagagggcatccttgtcttgtgccagttttcaaagggaatgcttccagcttttgcccattcagtatgatattgattatgggtttgtcataaatagcttttattattttgagatatgttccatcaatacatagattattgagtttttgacatgaagggatattgaattttatcaaaggccttttctgcatccattgaggtaatcatgtggtttttgtcattggttctgtttatgtgatggattacatttattgatttgcattatgttgaaccagccttgcatcccaggattgaagctgacttgatcgtgaggttgtaagctttttgatgtgctgctggattccatttgccattattttattgaggattttcacatcagtgttcatcagggatattggcctgaagttttctttttttgttgtgtctctgccaggttttggtatcaggatgatgctggcctcataaaatgagttagggaggagtcctgtcttttcaattgtttggaatagtttcagaaggaatggtaccagctcctctttgtccctctggtagaatttggctgtgaatccgtctactcctgggctttttttggttggtaggctatcacttcctcagtttcagaacttgttattgatctattcagcaacttgacttcttcctggtttagtcttgggagggtgcgtgtgtccaggaatttatccatttcttctagattttctagtttatttgcgcagaggtgtttatagtattctctgttggtagtttgtatctctgtggggtcagtggtgtgatatcccctttatcattttttattgtatctatttgattcttctctcttccttattagtctagctagcggtctattttgttaattttttcaaaaaaccagctcctggtttcattgattttttggagggttttttgttgttgttgttttgttttgttttttttgtctctatctgcttcagttctgctctgatcttagttttttttttttgtcttctgttttggatttgtttgctcttgcttccctagttcttttaattgtgatgttagagtgtcgatttgagatctttccagctttctgatgtgggcatttaatgctataaatttccctctaaacactgctttagctgtgtcccagatattctgatacgtggtctctttgttctcatgggtttcaagaacttcttgatttctgccttaattttgttatttacccaggaatcattcagaagcaggttgttcaatttccatgtagttgtgtggttttgagtgagtttcttaatcctgagttctaattttattgcactgtggtctgagagactgtttattatgattttagttcttttgcatttgctgagaagtgttttacttccaattatatggtcgatttcagaataagggccatgtggcactgagaagaatgtacattctgttgatttggggtggagagttctatagatgtctattaggtccacttgatccagaactgggttcaagtcctgaatatccttgttaattttctgtcttgttgatctgtctaatattaacagtggggtgttaaagtctcccactattattgtgagggagtctaagtctctttgtagatctctaagaacttgttttatgaatctgggtgcttctgaattgggtgcatatatatttaaaatagctcttcttgttgcatcgatcccttaaatgcccttctttgtcttttttgatctctgtttgtttaaagtctgttttatcagagcctaggattgaaactcctgcttttttttttctttttctttttttttttttttggctttccatttgcttggtaaattttcctccatccctttattttgagcctatgtatgtctttgcacgtgagatgggtctcctgaacacagcacaccaatggtgcttgactctttttccaatttgctagcctgtgtcttttaactggggcatttagcccatttacatttaaggttaatattgttatgtgtgaatttgatccatcatcataatgctagctggttattttgcacgctagttgatgccgtttcttcatagtgtcattggtctttatatttcggtgtgtttttgcagtggctggtaccagtttttcctttccatatttagtacttccttcaggagctcctgcaaggcaggcctggtggtgatgaaatcccttagcaattgcttgtctagaaaggattttatttctcctttgcttattgaagattggtttggctggatatgaaattctgggttgaaaattattttctttaacatgttgaatattggcccccactctcttctggcttgtagggtttctgcccagagatccactgttagtctgatgggcttccctttgtaggtgacctgacctttctctctggctgcccttaacattttttccttcatttcgaccttggagaatctgacgattatgtgtcttggggttgatcttcttgtggagtatcttagtgctgttctttgtctttcccgaatttgaatgttggcctgtcttgctagattaaggaagttctcctggataatatcctgaagtgtgttcattctattcttcctgtctctttcaggtactccagtcaattgtaggtttggtcttttaacgtattcccctatttctaggatgctttgttcattccttttcattcttttttctctaatcttgtctgcatgccttatttcagcaaggtggtcttcaaactctggtatcctttcttctgcttgatcgattcagctattggtacttgtgtatgcttcatgaagttctcatgctgtgtttttcagctccatcaggtcatttatgtttctctctaaactggttattctagttagcagctcctgtaatcttttatcaaggttcttagcttctttatattgggttacaacatgctactttagctcagcagtttgttattacccaccttctgaagcctacttctgtcaattggtccatctcatcctctgtccagttctgcacccttgctggagaggtgttgcgatcatttggaggagaagaggcattctggcttttggaattttcagcatttttgcactggtttttcctcatcttcatggatttatctacctttggtctttgaggctgatgacctttggatggagtttttgcgtgggcatcctttttgttgatgttgatgttactgctttctgtttgtttgtttttcttctaacagtcaagcccctcttctgcaggtgtgctgcagtttgctgaagatctactccagaccctgttctcctgggtatcaccagtggagactgcagaacagcaaagattgctgcctgctccttcctctggaagctttgtcccagaggggcacgggcctgatgccagccagagctctcctgtatgaggcgtctgccgacccctgttgggaggtctctcccagtcaggagtcacaggggtcaggaacccgtttgaggaggcagtctgtctcttagcagagctggtgcgctgtgttgagagaatctcccttgtcaggatcagctgctctcttcagagccggcaggcaggaaaggctaagtccactgaacctgcgaccacagccgcccctccccgcaggtgctctgccccgaagagatgagagtttttgtctgtaagcccctgcctggagctgctgtatttcctgcagcgatgccctgcccagtggggaggaatctagagaagcagtctggccacagccgctttgctgcactgtagggaattccatccagtccagacttcccagtctccttagcactgtcaggggaaaaccacctactaaagccacagtaatggccatcgccccgcttcccaccaaactcaatcatcccagtccaactccagactgctgtgccctcagtgagaatttcaagccagtggttcttagcttgctgggctccatgggagtgggacctgttgagcgagaccacttggctccctggcttcagccacctttctaggggagtggacggttgtcctgtctcactggagttctaggtgctgctggacaatgaaaaaatcctgcagctcagtgcctgcccaaacagctgcccagttttgtgcttgaaacccagggcgctagtggtgtagactcaggagggaatctcctgattcgtggatcacaaaattccgtgaaaaaagtgtagtaccccgggcaggtagcacagtccctcactgcttcccttggctaggggagggaggtctcgggctctgtgcacctcctaggtgaagcgacgccccaccctgcttctgcagctttcagtgggtcacacccactacctaaccagtcccaatgagaggaactgggtacctaggttggaaatgcagaatcacccccgccttctgcattggtctcgctgggagctacagaccggagctgtctattttcagtttttcttgggagaatggttttgaaatatcacaagatgtttcccagtcattacctaagacatcatcaccacagcacccagggttttctttagttttactttctcaaaagtttggataccatttacttctggatgagaaccattccttttaagccaaagatttaataggcacagagtgaatggttgtgtttgtcatatccacagtagatctaaaaaggctcaaatgtaagaatttatctctcctgagaagacggtggtagaaattgacaggcatatagtatctccaccattttttaactaagcaaatactttacagtgtgggtaactcctagttagaacacacgattttgttacataatagccagtttacgtacaacctaaaagcaatactttggaccacacagctatgcttcattgtgatgttctgtgacccaaactggtttccaagctgctgtgaatgcgtctcccattttcttgtatgactgtcctgcattccacaaagccaaaaaagaaaaaagtggatttatgtatagaagtgcccccaaacccaatatgtatgtgcttgtaggcctaaacttattataagctttggaaaacctagaatgagagctcctgaacagttgtagctttccaagctgtgccagtatgggcttccgctccctggttgactcccgttttccatgggagtccttttatgtagttttccttcttaaggaaagagagaggagaatagaaaaggtgacaatggtatgagacgtggtccctcttgccttcaagatattttaagaatattcatgtgtctgggcccgggtgcggtggctcacacctgtaatctcagcactttgggaggccgaggcgggcagatcacctgaggtcaggagtttgagaccagcctggccgacatggtgaaatcccatctctactaaaaatacaaaaattagccaggcgtggtggcaggtgcctgcaatcccagctacttgggaggctgaggcaggagaatcacttgaacccaggaggcggaggttgcagtgagctgagatcgcgccatcacactctagcctgggggacaagagcgagacttcgtctcgggaaaaaaaaaaatattcatatgttcttcaagtcacttgttcctgtttttaaaatagcatgctgagggatttggtcatatcattagcccagacatagcctgacaagaccagcccttgtgtaatgagattggtttgaggtaggaactgtacttgctttctatgatgggcaagaggagaccccaggctctggatgggaagctgaaggctgaccaagggtggatgaggcagagggcctgcgaaggggactccacagaggccacacgcaggacaagagcagcactctactccaggcttcatccatcgtatggaggtctgtggtcatttcacccattcatcttgctcctctggagaacccaaaccccggaaaccacaaagggaatcgactgctgcttcacaggaagggtttcattcatggtcacatttctttactgaaaaagatgggtatattgaagcgttgactgcctcctcaagaagaaacaggaagtgatcattaccaaacagaggctccctttaaatttaaaatatgtagccaagaaagaggctaacactacctaagaaagaccccaattaaatgtttaagctaaaaaaagcagagggttggggatagggcatgtttttgttttgtcttccaatttcagtgtttttaaaggctgagcaccaactatgggcgaagcacaggagtcaaaagtaactttactcctaaaatatcatatcattatcctttttttttttcttgctctgtcgcccaggctggagtgcaggggtgcaatttgggcccactgcaacctccaactcccaggttcaagtgattctcctgccttagcctcctgagtagctgggactacaggtgcatgccaccacacccagctaattttttgtatgttttagtagaggcagggtttcaccatgttggccaggctggctgaagtgctgggattaggcgtgagccatcatgcccagcctcatctaacgatctttaagttattctaatggagctctatagagaggggtattctgaatccattaagttaggtcttgccttaatccaaaaaaataaactaaagctgtctgcatatttttaaggcagtatattacatataaatgaggaaatcagcatgaagggaaagtaaggcaggagggaaaagacaaagccagaggtaaagttaggagccttacacatgccctgaggtcttctagactttactaggactaaaggagaaaaaatgacctctgtgcttcctagtagccaacagagaggaaagtacaaccagccctctgtatctgaagggtctacatctacagatcaaccatgtatcaaaaatatttttaaataaatagaaaataatacaaatttttaaaaaatacaatattagaactacatatagtccctgatatacaatggttaaacttacaatttttggtctttatgatgagtttatcaggatattgaatgcattttcaacttatgaaatttttgacttaaaaatgtgtttattgagaagcaacctcattataagtgagagcatctgtacttaacatttacatcgcattaggtattataagtaatctagatatgatttaaagtatatgggagaatgtgtgagggttgtatgcaaataccataccagtttttactagggacttgaacatccgtggattttggtatttgcaggagcagtgtgtgtgcggatgggggtgggtggaggaggggtcctgtttaaacaaatcagttacttgggagcacagatatttcttggcgttacctcctaggaagaaattgaatgatgtagggagcctgacctcaacaacatctcacagcaaatacagtaacactgtaataggactgcttccaactatccctgatgatataatgccaagatgtggttcagtcgaaagcaatctaccagggactggagctgtctgtgcatgtaaacagctcctgggaggtcaggcttcatcccaggataaactatagaatcatagggcagtgatgggggcgaggggaagggtactgcaagtgctactccctgcagcctaagtttagtaaatactgaatggcagtgtgaccttggcaactactaaaggacagacactgaatgctgctgatcaacacccggttcctttcccaacagtcagcacatggaggggaggggctgttctcaggctacaggctgaggagcccggccaggccacaagccacaggccaccccacccctggcaggtgggaggaggggtgccacggtccgggtcacacttttccccagaagcatcataagggtttgacttttgtgagtctgttttgcgtttggttttggtttttcaattatccttggcaattcactgatagggaaattttcagtgtagattatagatatgaagctattagctgttccacactcctgtaagccttaaaattgtcctggagaaagcccactgacagatggtatgcttcctaagtcaaaacacaagtctgtaggggaaaagagagtattttaataaaaatcttattatatctataaaaccctttacaggttgcaaaatggcttcaaagatgataattattagaggagaaagagaacaggctttgaaaattacctaactggattccaattccagctacaccacttctacctgtgtccttttaaataaattacacataatttctgagcctcagtttcctcatctgaacatatagatgatacctaccttgcacagttgttttgaaaaataagtgaagatggtgtgtataaagtaccttgcacatagtcgatacttaataaatggtggccaggcgtggtggctcacaccttaatcccagcactttgggaggccaaggtgggcggatcatttgaggttaggagtttgagaccagcctggccgacatggtgaaaccccatctctactaaaaaaataataatacaaaaattggctgggtgtggtggcatgcgcctgtaatcccagctactcaggaagctaaggcatgagaatcgaacccaggaggcggaggttgccgtgagtcgagattgcgccactgcactccagcctgggtgagagtgtgagactctgtctccaaaacaaaaggccgggcacagtggctcacgcttgtaatctcagcattttgggaggccgaggtgggcgaatcacaaggtcaggagatcgagaccagcctggccaatatggtgaaaccctgtctctactaaaaatacaaaaaattagctgggcatgatggtgggcgcctgtaatctcagctactcggtacgctgaggcaggagaattgcttgaacctgggaggcagaggttgcagtgagcagagatcgtgccactgcactccagcccaggtgacagtgtgagactctgtcagaaagaagaaaggaaaagaaaggaagggaaaggaagagaagggaggggaggggaggggaggggaagggaagggaagggaagggaagggaaaaagaaaggaatggaaaaggaaaaggaaaggacaaagaaagcaaagttagctattactactaattttggcttcaatagcaatcctgtgagggaggtagtacagatattactgatattataataataatcttcttagcctgatgctaaacatttcaacaccgcccactgctttcactgccctgcagcaagagcagtcctaggcagccacatgttacgtggttcagagtgggcgtctaacccagggccagtcagtattagggttttcaagtgaccacatggtctgcctctctgatggcaattagatcctccctctgctctccccttccctctcatttgcactaaggattgagaaccttagcagtgaataccagagcttgaaaggatgcacagggaacgaagccacgaggaaggatcacagcatgctgatgttatatatgagcagttgctctgaaatagaaaaaaggtgaaagtggtcaaaagaaaagagaggcctgggcacagggactcccacctgtaatcccagcactttgggaggctgaggcaggaggattgcttgaggctaggagtctgagaccagcaatgtcaacatagcaagaccctgtttctacaaaaaatgtaaaaattagctgggtgtggtgatgcacacctgtagtcctagctacttgggaggctgaggcaggaggatggcttgagcacaggagattgaggctgcagtgagctatgattgtgccactgcacttcagcctgggaagcagagcaagaccctgtctctaaaaaaaaaaaagaagaaaaagcaaacactcaggaaagaaccaaggaaggttttaaatacgattttctggaatctagttgaccagatttatagagctcacatttatgtgtaattaacataagtcagaggtaacttaaatgagttgcttccttgcaacccaagacattctcatgaagtgaggttctcgaaagggaataactttcccaagttgatagaacagaagggaccttcaagacaatccaataccaagcccagctgagcacctagatgacagctagcatcacctgccagccctgtgcgggaagaagccaacttggacatccagcccccttgggccttcagatgactccgagcatctgtccatctgacagcaaccacaggagagacctcaagcaagaactgccccgctatcccatggaaccataagagaataataaattggttcaagtcactaagtttagggtggcttcttgtgacacagcaatagataactagaacaatgtagttgacagtgaaggatagatttcattttgttattttatacaggcattttgcaaaaagaatgtgaattgagtcacatttatgctgtaacagctgtgaaataatttgagcatatcactttggtgagcttcataaaattaagtgtaaaatgagggaatgagactaggtaatctttgacatcccttctggcacttaaaaattctgattcccaataaactacacaatgaaaaacaacatggcccccaggggatagttacctgagctaggcagaactttcctaccctagaagcggaggataggaggggtggggagcaggaggataggaatcaaatgcaagtattttttataggctgcttcccagcacatagtagatgcccaaaaaagttgtttgaatgaaatgtccctttcctgggtgctttgatttaatttgtttttctcactcagttatttgatctgaggtcacttcccatgcaaatgaaataagaaagaggaatcagaaacacagacaggtcctaagtgaatttttgacataaatgagtttttaaatgatctccatgttgttccttcactctcctctatcgacttgtactgaagttcccagagtgttccaggcaatgggcatgtctaagtaacctgttgcctcttgggttatcccactcagggggctgagcaggtggaagccacagagaagtcacacattatatacaacactcattcttcatacaaccccgtctctgcaataaggaagtggccacatctgcctccacctcatctgtggcactttattttccacttcctgaaaagaaacaaagcatcatatatttaccatgcacactgtcatggccattactcagtttgtgatgcaatggatgggacaagtgtcgactcctccagcctttccagagaccctgtaactgcagagaggaccacagggccaggagaaacagggccagtgagagactctgatgtcactcctcagaccaacatcactctgcgctgttcaacagcaaacaagcacatactatgatgacaagggaggtaactaggctaaaagaagctcattaaaaatcaactttatctataaaaatttcctcttcttcctgccctgctctctccccacaacttccttctcctgaaaataccttcgttaaactaaggactagaaaacctgggttatttccaaagggaaggtcatgggaaacgcttcctttggacagttttcttcattggttataatttaaaaaacagctcaggggtaatttaaaacacatattttactggacatgctgttcactttcaacacagaaatcatgctatatacctttctccgtattcccaacttctgaatatccaaggaggaaatccagtcattgcctcattcatgaggataatggctcccaattgcccagtgagaacccatagcacactctgctttagccacctctaatgataactaaggcagtgacccactgatggtctattctctgctccttccgacatgcactgagtcattcttctaccagcacagtgagtaaggactcgtattttaagtgtgcaagttgttgggttatttactgaaacttactcagcttccttctctggaacctagagacaatagcagtagtcttgttgtatgcccacagcctggtatacaataggtgctcaatgaataatagtgtcatacatgtgcagggcacagtgtctcatgcctgtaatcacagtgctttgggaggctgaggcaggagtattgcttgaggccaggagctggccaactagcctgggcaacgtagtgagatcccatctctaaaaatacaataataataataataataatcaactagccagtcatggtggcatgcacctgtagtcctagctactctgaaggctgagccagaggttcaaggctgcagtgagccttgatcaagccattgcactgcagcctgagtgatctcttaaaaaaaaaaaaagttacatacatgagcacagtgtataattaactacctacatataattactagtgagattatttagctaatttcttttcttttcttttttttttaatagagacaggggtctcactattgtttaggctggtcttaaactcctggcctcaaacaatcctttcacctcagccttccaaagtgcagagattacaggtgtgagccactgcacctgacccgtttggctaatttctaaccttttactgctaaactccatgcaccatcaccatgtagactatgtctgcctggctcaccatcctatccttagcaactagcacacttaactaatacaaagaaggtgcacaatatacttatgaatgaatggaatgaaaagtgcctagatgtaaggttgctaagaggatgtaataaaataatacatgcaaagagcttattattgtgcctggcacatagttgtacattgttgcctactgcaattagtggtggtgatggtggtattggtataatttctctcagtccatacccaaactaaagtgtgatgtgcaagagagatactctctctgttctccagagacagccacccagagatagcccctattctactgctccttattaggcccccagcacaaccattagcacttctagctctaaattcctgcctccccttcccacagttcatccgcctgccatatattcaactttctaatgtatgttgagtccccagaagaataaagactttcatggctaactgctaggtggtaagctttctgcgcaacactaggcactggatctacagtgctttttggatctacacatggtctcttttgacagaagtggattggagatcatcagtcacctactattgttttagaagtcagaagtaccttgcctcaggtcactacacatttcttctgaaggggttagatcttctcttttaacacattatgttgtgattgctggtgctgaagactgtgttcaccctagggcatgattttaggggtgggaccattttgtccacgaatttaatgtccccagcacctagcagttttgagcacataacagaacttggtttaccaaataaaaataaaagagagaagggaaaaggtgcagtggtgaagtttaacatcagagttatttcctgtatattcatttttctctccattaacacagagaacaaaaatttaattttacatcagagaaaatttacaatccaggtggtcagaacaagagagatgaaaatgcagaattgcagagagccatgaagcgtaacttgactctcatgagcatggaagtttaacatcatgacttttaaaaatctgtcatttaacatatgatgtgttttcaagcttcagagactgaattccatcaatgaatattatattctgactgcatgcttgtgtttgattttgaactttccttatataaacctcaaaaccaaaattgaaaagccgtgtacaagaaaaataaaatgtcaagttagaaaaagatttagcaacactgtacatcaatgatttcaaatgtgattctgagacccttggggagtccccaagagcttattaggaaatcttccaagtcaaaattattttcccaatgagcctgagatgttatttgcctttttcattcttattctttcaccagtgtacagtggatcttttccaaggttacgtgaggtgtgatatcacagcaaatagtatgcagaagcagatatcacagtccaactgtctaacagtccaactggcagaaaagtagtgcttctagcagtcaagagcagccacgttgagattggtgaagtcaatgaacccagtgctggatggcaggtactaaaggtggagatgtcctgccgatatcaagatacagaactgcagtggaggtgagtggtcagaaccagtgatgtggatttaaaggttagtcctctgtaatgacaagtagcaccccagcagtgaataatcctacggagtaatgaatgcaaaacatggagctgtccaaggcagaagctgtgggaactggcacattttggagcaggagataaattagaacctagatgttgggaaagactcactgagcgaccagctatgcagggccctgaaaaaagtaccttggcatgacatagctgatagacagaaggaaggacaaaagagagaaagatggaaaccagaggggacagcttcaaggaagattagtcaacaatatcaaagtcacatgaaagacgcgaatggtaaattccgataagctaatggatttgacaagaattgggtcattgtcagcttcaaaagagaatttttagtaaagtaatgaggtcaaaacagcacatgaaaactgcatggggaaaagtctaaaagcagagcccagcacggtggctcaactctgtaatcctagcactttgggaggccgaggcaggaggattgcttgagcccaggagatccaggccacagtgagctatgatggcatcactgcactccagcctggacaacagcatgagatcttgtctgtaagttttaaaactttttaaaaataaaaccatctaaaagcaaaaggaaaaaaataaaagggatacaaaacccaggaaagaaagatttttggtttaaaccaagactgtatacggacatgaaggcaatccccaaggacctcagagccactgaaggtgctgaaggcaaagggagggtaccaaggtatcttgtgggtaccaggacacagactcttctcttaaaaacaccctgctcataagactacttcctggtccatcaaaacagaatcctaaggaatcctattattcaccagtcagcaaatattaggatgatgatgtaatggttaaaagatctactctagtcagatatcatttaaaaggcaacattcagatttgaataggtcttttcttgacatgaagtacaaataataaaaatccaagtatcagaatttcatgtaggaaaataaattgctatgacaaccacaactcagtctccacagaaaatataaataggaaccagaatgagaaaattatagagaattttttctgatttggaaacaatttcaactatgattctttaatgttttgctcatttggctctaatatgagaacaagaaaatattcttctacttcaatagcttctttgtattacaaattaaaatgaccagaccagcacatattggaatgaaactagaaaccaacaccatctagtgacttactccaccaagatacccctgttcccttcactgctaacttctaatatttaaaggaccacacctaaaattaaagaataacttgcatcaaatgcattatatttatattacaggccaaatagtaaaagcagataacaggggatatgaaatcaccgcatcttcaactgccaggttataaagcttcaagtcagttgtaaaggaccaaagtttcctaccttttctccagcatttgcctttaaccatgactattctggactcctgctatgaggtttgctattatttggatgacgagagaaggcagagtagggcagagtccaatattcccacttctctcaggataaccaaggcactccctggagcccactctcccgaagccagaacaacgagacctgcaagcccagctggggtctccagggattcgatcttttgcacagtgcttttgacttaagacattttcactgcaaagtgagtgagtgggttgcatatagctctgtaattagccaggttgtccaatgctgcccagggccctttagagttctgcctccgacctgcccttgtatatgccctctctcagtccagtgtcctcagatacagtgccctcgtttcaagcccagtttttctctccctccactggcatgcttctcatctggtctggcaccttactcaagctttggcctcgattctgtcatttaatcatccatggctctgtgctgtgcagctcacgggccaagccagccctgctcttcccctaaatgcatctccagctccaggaatctgtttggaacttcaagccacttccttgttgggtggagtggtttggacatggaacaattctaactacaggcattctccaacagtaccgagcttcctcccatggcgcccaagttcaacaccttcccaaacagaaggaaaatgattcactgattcagtgtgcctgacaaaaacaatcagtacatgagagaacttttgatgctgctattgaaccataaggagaatcatcccctgtattagccaaactaattaaaatctgtcagttatgccataataaataaattataaattaaaacactagtgtcaccatattcagagtatattttgatagatcttccataaataaacttacataacttgtaatcattagcaggtacaaatgtcaaaacatacaggtcatccgaattaagttcaagttctatgaatccaagatctttagttttgagaatcttctacataccaacccatataaactccaagtcttaatataggatcatcaaagctcagggcatcctaagataacttcagccatccctagcacctgaaggcctgggcaacatagtaagatccccatctttactaaaaattgaaaaaaaaaaaacacccaaatagctagttgtggtggcatgcgcctgtggtcccagctactcaggaggcagaggtggaaggattgcttgagcctggagtttaaggctgcagcgtaccatgacagtgccactgcactccagcctgggaaacagagtgagactctgtctcaaaaaagaaaaaagatagatagctaataaatatgcaaggtatattctgcctggatttatcaaagcaagcctggttcaaggattcacatcaaactttggaggagcctttgccagggaaatgacagtagtgaggccttgagatccttactgacattggagaaaacaacaccggatatgaatataaacatgggataaagccaaacataaagtaaggacaaaaaacaagaaggcaggagacaccaaagggagcaaagcttcctgcaacctatctctcttcaggcttttctacagatatgccctgcaaagagaaacatagaaattggcattagaagactttctagtgatcatgctaactctcagaagtctaacatgctttcacctttgccacacagaagtatttgagctaaataccatcttttaaaaacctcaggatcaggccaggcacagtggctcatgcctgtaatcccaacgctttgggaagcagaggtgggtggatcacctgaggtcaggagttcgagaccagcctggccagcatggcaaaaccccatctctactaaaaataaaaaaaaatttaaaaaaattacccaggcatggttgcaggtgcttgcagtcccagctacttgggaggctgaggcaggagaattgcttgaatccaggaggcggaggttgcagtgagccaagatcacgccattgcactccagcctgggtgacagagcaagactccatctcaaaaaaagaatcaagatccccattgttgagcatactccggttttcctgcctcagggctctttccccttccacctctgatctcctagcaaccagtgaacaaggtgcaagccaataatggaaaagaaaaaggaggatgggagaagttccgacattgcctttaatctgcttcactgctctttgttcccactaaggcagcaggcccggctgggaactacagtttgtcttatgaaagatccctcttactggacacagaacctatgtcaagcagaatttcatgagattcagtgtctttttttttttttttaaacacaccattgctggcttgaaggctatgtctttttccagaagatctaagacggaaactgtgccacacagctagtgagtttcacagctgagcttcaaattcagcccgatcagaaccaacagctcctttttcctctagtcccttctattttacctttttaggtttaaatttacccgtaaatgctgtgcaaagtctgcataaaggcaagaaatgcacagcaagctgacagaaaaaaaacagacatttataaatgaagagttgttttaattccacaataagttgtaccatagtaaaaacaacagaaatattttactgtcttattataacataatatagttcgtgactagacacactaaattgctccctgtagcagtaatggcatcactaacataataattggtggtgttatacatatatgttattttagaagtaccagctacaggttgttaaggttttttaaaaccagatgcccagcattcctaatgagaacatgatagaaatcttaaatttcaaagaaaatgtcaatgccaaaacaataaataattttaaatgttcctcccacagaatactgattctacataccatggccaagtgtacacatgtaatcattagcaggttcacgggcgcacaatggaccagatgcgaatgggactctaaatcgctcatttaagaattctgcacatgtaccccagaacttaaagtataataaataaataaacttaaaaaataaaaataataaaaaaaagtttttttaaaaagaatcaagctctccagatgctgttggtcctgaaagactgaatcaaatcaaccaatagagcacgtacagtgggaagggggatatggatgtcatccagaccaagtgcccattcggcacataagtctccttgtaagatccccaacattcagtcacctggacgcatgcgagagtgaggctagtcacccagtgacactgacgcggagctcagtacatcctggaagaggccaccgctccccctttgaacagctctgtttcataattcgttgtaaccatcagagtaaacaaatcagtgattggtctgagggcatggcattgagtttattttcctcagtaacacaaataaacaagaatgtctccaatcaagtaaatctaaaggtaattgtgacacgtatgtttagcctagttgaaacagatcaggtaactgggccagcgaagaaaggatacctaaaccatatgaataagctcacatgaagcatccacattatgcagagtttttgccctcttaaataaatttgccaccgacattttaaaaaaaaaaaaccctcagattgctgattcagtactgatcagcaaatgcagcatttcagccaaaggagctgggtttcatcgtttgtattagagtcattgggtatagtggatctttctccagccagctgacctagagaggggggatgtggcatggagctgaaattggcaacgtgaaagttgctgaactgctcatatggtttgtgcaattcgctgaaatagtagaagaactagctttctagatagaaaatataggcattgtgtacttggaatgcggagtgttaaaaagtaatatcttacccatattacaggctgcccaggtaataaactgacactcataccagttaaaaaaaaaaaaaaacacattttagagaaccactttttcagttcttaagcactattttcatctttaatattttcgtttgtttttcagtgtctttttctcagagggaaagtttctccctgaaatagtggaacagtttaagggtttgtaatctaagtaaataacctaaatatatcttctccacatgtacatgctcaagattacaacttgtattctctgagtttaataagcactacagtttgactgtttctcattaaaaagagaatgggagtaaggtagaaattcaataactgttcaagtaaaatacagccatcctaacatctgtattatattagaggagacacaagacaaaacattgactcttgaggttaaatctaaatttcctgctgcagtcctgaaagagtttgagaatctagatcaaaaaagcaacaaagaaaatgggactaaaaatgtcttcaagcatatttcaaaagctattaaatgcctacacttagttatttcctagaagcaccaacttagtcagcaactacccaatagccacaaacaaaaataaataaaaattatgtgccatgctcaaatccttttccaagtcaaagaatatgcacctggagtctgggtatcatagaggtgtcaaagcacctcctctgattctcatatctcttatgagatgttgttgaatttccacatcttcctctgtaatatatttttacatcacccttgaatttcaaaagatattatttcagcctccttttggaattgactgatctttaattttataactcacactgcaagaagaaaatccaagctctcaatgggtcagagggcaataagcaagacagactatcacggcaaaaactaaagagcacgaaaccatgaccaggattcaggatattctgtccttaagcctggcttgcaagtctacaacctcttccttgtcaaactggggaggtaaactgagttttaaggaagtaatgttgacctactgtgtggctatgtggaagcttctctaaaatgctgccatttatatatatatatatatatatatatatatatatatatatatagagagagagagagagacagagagagagagagagagccgaagagtttgttattgttatactgaactcagaatgaaatagcctctcataccaaattccaggggagagtgaggtgcatatttctaaaccttgcacattagaaaaattttctcaaccatgaagattctgatttaatcaaggaactgggattagaaggagagatttaccatgaagtcattttagacaagtcttatatcaatttttttttttttttgatggagttgttgcccaggctggagtgcaagtggcgggatctcggctcattgcaacctctgcctcccaggttcaagcaatactcctatctcagcctcccgagtagctgggactacaggcacatgccaccacacccgggtaatttttgtattttcagtagagacagggtttcaccatattggtcaagctggtttcaaactcctgacaggtgatccacctgccttggcctcccaaagtgctgggattacagacatgagccaccgcagccggctctatatcaatttatatttcagtttcagcatctaagaaatctagattctatgcttgatcttcaagaccttttactaatttatttattgtcctatctcaacagattattagctctccactggagtcaaacacatcctatcgctattccttctacctcactggttactccttctcagtctgttttgctggtttctccccttaatattggaaggtcccagggctcagctcttggttttcttctctgtcattactcacacccttgagagctcatccaatctatgtatgcccagactctcaaatttatattttcagctcagacctctctcctgaactccagacttccatcaactgcctatttaaaactccaattggatgtgtaatagacatctcaagcttaacatgtcccaaattgaactcctgatttctccctaacccatcctgcaaacatactacccctacaggcctcctgttctcagctgatgacagctccatccttatagttcctcaagacaaaaaccttagtgtcacgcttgactgtcgcactccacatctgatccatcagaaaacctgttctggaggccagaaatctgaagtcaaggtgctggtgttgctttaagccatccagtttgttctgttgttacagcagccctaggaaactaatacactcattatttgggggccatagattgagctgagacctggttagatattcacattttgaaattatgcaggttgtaacacattccctgaaactgaagttcttcaactgattgtcttatttctgaagtgactttgtaattattactttagaatcatttcattgataaaatgtatcattgggaataaaggaattgtctttctactacagttatcataaagatcctctcattgcagagaaacaggaacacttatacactgttggtgggagtgcaaattagttctaccattgcagaaagcagtgtggtgattcctcaaagagctaaaagcagaattaccacagcaatcccattactggatatatacccaaaggaatataaatcattttattataaagacacatgtacaataatgttcactgcagcactattcacaatagcaaagacatggaatcaacttaaatgcccatcaatgacagattggataaagaaaatgtggcacatatacaccatggaatactatgcagccataaaaaagaaggagatcatgccttttgcaggaacacaggtagagctgaaggctgttatctttagcaaactaatgcaggaacagaaaaccaaatactgcatgttctcacttacaactgggagctaaattataagaacttatgaacacaaagaaggaaacaacagacacgggtctacttcagtggggagtgtgagaggagggagaggaataggaaagataactattgggtactgggattaatacctgggtgatgaaataatctgtacaacaaacccccatgacacgtgtttacctatacgacaaaccttcatatataccctcaaacctaaaaaccaaaaaaaaaaagtttaaaaaaacgaaaaccaaaaacaaaaagatcctctgttgtgagtccaagagaggatgactaaacagccttataatttctacaggcaagctggcccacaaagctgaaggttagaaaacattctgtactattaattggcaagtacatgtttgaactggattcacaaagggggagaaactttggaaaatcattcaaattttccaagtatgactaaattcaacctaattggatcaaattttataaaaatgtctggcttgagttacctggaccagctgcctacagttccttactttctagaataatatgcaactaagttcttggctttgacagcgtggtacaaaccatattctaaaaggtaacaaacaagagctactgttttaaagtttatacttcaggaataaactcagttcctttgcaggctgagcaactcagcttattagacctttcatagataggaggatgagaactgagtcacatttgggcatgaaggactttgaattgttttcttcctgctgtgccttcagatcagatgacatctgcccagcctcatttcttcctagagctaaatgtcaataactaagtatttccatgactgcactgtacaccggtctaaaaagagaatagttaaagtttaaacacgcctgttagttactggatattttccagcaaatgaagaatcacaattagctaatcagataaacaaacgtcttactaacactgcaaattacaatattagtctatcatctattgagcagtcttactaaagctccagatgttttttagacattatctctaatcatcacaaaaactatgcgaggaagatgttattctccattttactagggagaaaatgaagttcaaaaggctgactggcagaattagggtttaaaccgagaccagcctggctgcagactaagccactgaacaactgccattacaaacagctagttcccactactttccagagctttacctgtattacctgggtctttagttttcagaataatcctcacagatgggtattgctatgatcctatgtcacttatgacaggacaggagttcaggaaggttaagggactttctcaaggtctcacagctagtgggctatggaactcgttgaattccaaagcctttctttcattaatctaaatacttccctgtattgagcattggcctaagctacttagaaccattataacccactctacaaggcagtccgtcttctccccatttgccatatgaggaaggtgaggttcacagcgaagactggactttttgtgtcacaaagccatcaagtggcagagctggggtgagcagctgggtctgaggattccaagcccatgctcctgccactgccccagggtgccttgcacaggacatttaataattaagccagtatcttgtagaacaccaggctaactgtcaagggcctattaaggcaaaggagagcacttgaggtagcataaaggattcaagtgaaacaatttgatgatacagtaacaggaagaaaaagtaagatccaaggcagcaaaaggcgagttcacactgccaatgcacagagcagcaaacattctctattttccaagtaatcatgcttttaatttgatttgcataaattcaaataaataaataaataggtaaacatacatgagtagaggaggaaggtataccttgcaagaaatgagcttggtatcaagtgagagaggccaatatcaagaatttctatttgttttattgattttacttcagtttcagaggctcatccctgcccgtattccaactcttgttttcagtaacagaattctcctgcctctaaccacaatgttggtttggcaggaaatgaggagaaggttccttttgaattcagactattgctctatgataaactcttctcccttgggtgagaatctgaagtccctttgccaaaaaggcaaagaaaggataagtttacaagacaatactagtctttctgttacatattgcagtgttacaaaatacttccacatacattctctcactggatacatcctctcactttagccttaggaggcagacaaaggctatatcataatcctcattttactgagaataaaactgaaatccgattaagtgacttcttcaagatcatactgccagtaaaacccagactgggacccagatattctgttactaaatctcaggtccttcccatcccataatgtcactaggttttgttttgttttgttttgaggcagggtctcattctgccgcccaggtgggactacagtggtgcaatcaccactcattgcagccttgagctcctgggctcaagcagtcctcctgcctcagcctactgagtagctgggactacagatgcacactaccatgcctggttaattatttttatttttatttttggtagagatggggtctcactatgttgttgcccagggtggtctcaaactcctggcctcaagtgatcctcccaccttagcctcccaaagtgctgggattacaagcataagccacaacacctggccagcatcacactttaaattacctgtgaagtatctataatcatgattactttgggaactaatgttacctaggtctctgtcctccaccactacatccaccagcctcttcaccccaccgctcactgagcatggggttaccagtcctcttagttctgtctaaaccctcactaaatcagaatgcatagttcaggccagactgattggggaaactgagacacatttctaacaggactttcgcttttacagcctcataataactactattgcaacattatactaaaaacagtgctgatgttaataataatgataataatttattaagttctgattatatgtcaggtactttacatatttaatcctctccaaaactttatgatagaaggtccacaatccttatccacaattctgaaatacaaaaagctctgaaaacccaagtatttttccctaagtatatggcaaactcttcttgtggtaaaacttgacctgaaccaacatgaatttttaaaaaataatcttcatttatccacttagagtgaacattcatacattttgctgccacacaggtcacatgtttgaatgagggagtgctgtcctaggccctcctgtcatgtcacatcttatgttctttggagtatatacactttttttctttctaaaatcaaaattatctgaataccaaaatacatctggccacaagaatttcaaagatccccacttctcagataaataaactgagattcagaaagaatacatttttagtacacatctcctctaagtcatcagagcccttttactaatgtaatagtcaatacttgttacaggctgaattgtgtcctcccaaaagtcatatgttgagaccctaatccccagcatgacggtatttagatatggggcctttgaagaggtaattaaagttaaatgaggtcataagagttggggcttaatccgatagggcaggtgtccttataagaagaggaagtgaaaccgtagcactctctctctctccctccctctttatccccctccccctcccttcctccttccctccctctctccgtttcccgccaatccctcccccacccactccacccccatccccactgtcttcctgcacaaacacagaggaaaggttgtgtgaggacacagcaagaaggcagccatctacaaaccagaaagagaggcttcaccagaaaccaatcctgattttgggaccttggtcctggtctcctagcttccagaactgtgagaaaataaatgtctattgtttaaaccactcagtctgtggcagtttttttttttttttttttatggccgctcaagcaaactaatacaaaatttatttatttttttaattgggaaaagggtagctattatgtcttcatataagctaatagttgtagttaagtggaccacttcaatgtatacgcccttcaaactattttaaaggccactggctcatggctgatctgagagagctgggattgcatttatcatctgttgtcaccctatccagtctttcatgagaaaaattcagcaaacagcaatgatttactatgtgccaggcactgttctaagtgtttcatgtatattaacatgttcagccttcacaacaaccccttgagatagacactattatatccactttacaaatgatgaacttgaggcacagagaggttacatatattgtctcgctagtaaaactggcagagcaagcatctgaatctcagcagaaaccaaacaggaaaaaatccttttcctcatagtgcttatagggaaaggtagggcagaaggcaaataaataaaataaataagcaaattatatagtaaagtaaaaggttataactccaatggagaggaattatctaagcgtttaacaactagaccgggcactgtggctagctgggcacagtggctcacacttgtaatcccagcactttgggaggccaaggccagtggatcacttgaggttaggagttccagaccagcctggccaacatggtgaaaccccgtctttactaaaaatacaaaaattagctgggcgtagtggtgggtatttgtaatcccaggtactcaggaggctgaggcaggagaattgcttgaacctgggaggcagaagttgcagtgagccagaattgcaccactgcactccagcctgggcaacaaagtgagaccctgtctcaaaaaaaaaaaaaaaaacggtctcacactgaatggaataccaggtctggtgtctgaagggtaaaagagaaatttcagcacaaatatactaaataataaactcaaagcaatcaaaacaatgcctaaaaataaatgtatttgtttaaaaaatacataagaacattatgtaaagctacagaagaactatgatggagtcacagggacccgattgtcccctcctacctgaaggaataaaaatttttaaaaaccagactatatatatgaaacgatgattctcaagacatactggatatcaggtgatgaaggacagtgatttctgagagatgagaaacaaatgaagtgagccctgtgatttacccagcctactggcttgagagaatttgcaggccatggtgcagggatgcggaaccacagtagaacccattatgagatgccattaaagcagtatttgaagacaaatgtgtagctctaactgcctacaagagaaagagaaaagaagaaaggttttctttgaaaacctttgaatcaataacctcagcttccaccttaaactggaaaaggaagagcaaattcaaccctaagtaagatgaaaaaagaagatgataaagaatagagttgaaaatgataaagtggagaatggaacaacaataaagaaaaatagatgaaaccaaaacctggttctttgagaagatgaataaaattgataaatctctagccaggctgatcagggaaaaaaagagagaagaatcaaattatcaataatcaggaatgaaagtggggctatcactacatagtctacatatatttaaaagattataaggaaatattgtgaacaactttatgccaataaattcaacaacttagatggaattaacatactccttgaaagacataaactaccaaagctcactcaagaagaaacagataacctgaatacccctataactactaaagaaatttaatttatagattaaaatgttctgaccaaaaacaaaacaaagaaacaaaacttttcaagcccagctggcttcactggtgcacaggtggattcaacattttctcagctactagggaggctaaggaagatcacttgagcccaggaactcgaagctgcagtgagtggtgattatgccactgcactccagcctgagtgacagagctagacagtatctcaaaaagaaagaggtatcatagaccaaaatataaaaccaaaaactataaaacttctagaataaaacatagatgaaaatctttatgaccttgaataagacgaagatttcctagatacaatactaaaagtattatccataaaacaacaagttgataaattagacttcacaaaaactaaaacctgttgagattaaaagaaaagccacagacttggagaaaatatctgcaaaacatatatcttataaaagatttgtatgcagaacataaaaagaattctcaaaattctaaactgagaacacacaaaccaaatatagatatgggcaaaagacatgaacagacactttatcaaagaagatctacgagtagcaaataagtacatgaaaggatgctcaccctcattagtaattagagaaatacaattagaacaacaagagatagcactacataccaaatagaatggctagaattacaaagacccacaatagtgagcgttagggatggtaatgagtacctttcatacactgctggtgggaacgtaaaacagtatattcactttggaaaacagtttgttagtttcttcaaaagtaaagtatatacctaccacatgatccagccattccactcacaagtattaatatttatcctagagaaaagaaagtgtacatccatacaaagacttatccacaaatgttcatagcagctttgtttgtaataactaaaaactggaaataatttagatgcccattaacaggtgaatgattaaacaaattgtgatatatgcagataatgaattactcctgaacaatgagaaggaatttacttatgatacacataacaaccagggtaaatcttaaaataattatgctaaataaaaaaagacaaaaaagctttcatatatatgaaactcaagaaaatgcaaactaatctacaatgacaaaaagcagatcagtgttgctgcctgagctgaggaaggggaagattagggtgggaatcaagaaggagcaattataaaagggcaccaaggaaactttgagggatgatggatatgctcattatcttgtgttgatggtttcatcagtgtatacataacaccaaaacttacccagcactatctgcacatactgtaaacatgaagtttattatatgtcaattgtaactcaatagatcattttttaattaaaacataaaaaactaaactgaatttttctgtcaaatttagtgatattatattccttttacagaaaggcatgactgactgcaaataaataagtgggccctgtacaaaagctaggaaggatttcaagttcttcaaaagattgttattaatgggtcagattcagagacaatcaactagttgattctagttcaaggaggaagagatttgctatctttctttgccttccttataaaaaaaaatcaagatttcaaatattttataaacaacttttagcacattcaataaatttgtttattatgtattctgattatctactgctgcatcaaagcccactctaaaacttggcgtcttaaatgcagtttgggcagaactcagcaggaacagctcatctctgcttcactcagagcaatttagactgggagctggcactatctgaaggttcactgattcagttctgatggatgaaactggctgtcagctgagacctcagctggggctagacccacaacaccaagcctctccatgtggcctgggcatccttacaacatggtgactcatcccaagagagagtcagtcagaagctgtgtcacctcttttaacctagtcttttaagtcaaagaatttgcagacagttttttaaaccaccatactgtgcttatcaaaaatgcagattcctcaccattcctttcaaatacatggccgtatcaggagcgttaataaaaggagcactgcaccaagactctgggaaactagattcaaattctgatacagattcaagactttcaacatttatggatgttaattttccatgttcagaatagggactagaaaactggtgtgttacagatgaagttgaagtgggacagaagaacagagagacgcaaggagacagattgcacagttcaagtatttagcagagaaaggtagtgaaggcaactggcaaaacgctgtatctaaactccagtaagatgcttaaaaccactgatgggtcaatcccatgaaagcagagtggagaagagtggtaggcctgtcagcagccaccagcagtgacatcttgcagcagatagcagatggctttgaggccacaattgggttttggtacccctgtccctgggcagaactgtgcttcctctggaccctgaactttctgctattattgaatcaaatcatacagaactatcattgcatgcttatatgaccaactctcctgctaaacaaatatgctgcatataggcagggaatgtattttattcatttttgaatctcagcacctgtcacgttaccttcattgcctgggactcagcaggtgctcatgaacaaatggaactgaactatcaaggtcagaatggaaaaccagtctcaaaggagtaagagtttagggcaggttgtcaggccaggatttagaactcaaggtaataaaggcccagttattagatgttgtgttggtctaaattctataaccaagacagaccatcagtgacctgattcagtgctgaggtcctgagtatgagtggcaacaaggccaatctgcctgaactcttaaataagggctccttaatttcccccaaaatgaatcctaaagcctggggtataagccctcaggaagggaacaagtagtagggataggaaggtctgtagctatcccatgtgaaagagagcagcaggcagcctgtgaggctctttctgctctttgcttctaagatcattctgcttggaaacggggctgcctaagacccagtacactctgggtaacatgcctgggcatctcccaccgtgccatgaggcttctccgggccagacttctctgccgtgagcccatctatctgactgcttctagacacccacaggcatccaatagagctcatcgtcatcccccaaaccagtgtgctcctctgcattccctgacactgactccgagcaacagaatcgtccccaaccagctggccaagcagaagccaggccttgatcatgacttcttgcctcactcattcccaacttgcagtcctgttctttatcatcactcaacatggtctcctcttccaagacacccttccctgaccctgaaagagttgctctgccctctctcctgtcttcccatggcataccttgatcataacctgccataccttgatcataccctgccatacttccaacttccccactggaccggaagtatcttccgatcctggaccatgtgttactacactgaccaaatgaaatgtttgctcaacaaatatttgttggccaatgaa

SEQ ID NO: 92 - DNA, 3540 bp, Homo sapiens
agaggaaggaggcgacagcgccggagcagtgtcctgtttcccagaggaacagttcatttcaacagccagggagaaagcctggatgctcaagttggggaatggcggtcaatgtgtattctacctcgataacccaagagactatgagcagacatgacatcattgcatgggttaatgacatagtatctttaaactacacaaaagtggaacagctttgttcaggagcggcctattgccaattcatggacatgctcttccctggctgcattagtttgaagaaagtaaaatttcaagcaaagctggaacatgaatatattcacaattttaaacttctgcaagcatcatttaagcgaatgaacgttgataaggtaattccagtggagaagctagtgaaaggacgtttccaggacaacctggattttattcaatggtttaagaaattctatgatgctaactacgatgggaaggagtatgatcctgtagaggcacgacaagggcaagatgcaattcctcctcctgaccctggtgaacagatcttcaacctgccaaaaaagtctcaccatgcaaactcccccacagcaggtgcagctaaatcaagtccagcagctaaaccaggatccacaccttctcgaccctcatcagccaaaagggcttcttccagtggctcagcatccaaatccgataaagatttagaaacgcaggtcatacagcttaatgaacaggtacattcattaaaacttgcccttgaaggcgtggaaaaggaaagggatttctactttgggaagttgagagagatcgagctactctgccaagaacacgggcaggaaaatgatgacctcgtgcagagactaatggacatcctgtatgcttcagaagaacacgagggccacacagaagagccggaagcagaggagcaagcccacgaacagcagcccccgcagcaggaagagtactgacccaccccggctgctcttgacacttccattgtgtgtgggaacgtttcttctggagaattggaacatgtgtggccccaagctcaacagaaaccagttgttcccaatctgccgttaccatcaacgcactgttgcatatgccagccactgcgcttggttcccattttctttgccaaggtgtattagcggacggccctctggccacctacccgagagatcgtagggtcacatacatccaacttcaccacttggctgcttgagattggttctgctcttttcttcatttctttccagaacaactctttcccaccccaacaccactgccaccacccctctttttatcctggtgtgaaacaatggtaatttgatatatggtatttatattggcatttttcaacccagtgtcactagatgtcacacacatttgtggtgctttgatgtttgcaagtctaacctctgaacataaatttggtcaaataattggaacaaagggaaacagatacttgatatgaaagccataatgacggtgacttgtgtcgtgggggaaaacataaggtcattttctccctctactcacaatactaaagggaaaaaatggattcaaagctaggatttcagggcccagcagtgttcctccatcagcatgttagacaactacacagtatgttgttagttttgaaagacattcactcaaggaaaacaccatctcaactttgcccgctcaccatgtcccttgcccccatgtagcccatttcccaggttatgctcttttctttctcagggtcctctttggtgggcagccactccccgagatgttgccatcagttttctgcagtccaaagagggtatggttaggtacgggtcttcctgcctcattcctcttcctctttgtgtaggtttcagccacaaaactgtcattcactctaggggacccctactaaagggtaacttcaggtgtgcagccctgagctccaaggctctgcaccatgccacacacttgctgtaaggctagaagtgaagaccttattaataggagcataattgcgagggagaatcatggttctgcagtctggtgtagacactggaataacagcacagaaaaatctatgactcccaatatcttctagaataaagaattttccctctttaacacaagggccctccttgtcattgaccttagctaaaccatggcaattcataaatagaggaaacattaatgaattaaaagcattccttattttttaactaatatttgtacattttcttagtctctttccaagtctttgcctcttttttttctttatttttattttttcctttgacagatggtatcccttcctggatcattcatttcaccttggtttctaactttaggtttactttcacttgttatttgacttagcaggtgcaacaaaaacaagaaacaaatgtgcccaccccactttccgcttaactgaaaagcttaaaataaatttctgaattatgtatcctgaagctttgaaatttctttattaatcgatgaaatatgaattctaaattctagcattgaagcttttcaccaaaagaagtctctccaaaataaatcttttgcagcaaagtgatatttattgagttatgtggaaaagatggcttgtatttttcagattattacaacacactgtgcagaattagacagatgttccgtggtgtttggtttccctttcttctctctcctgctcactctgcattatagcagcagcttatttctctaaggctggacagcctggctctcggcagtgacgtcctcccacacctggtcacaagtagtagtggctgtgctatacccagcatcatgcttaacagcgtgttgcccttctgagcctgttgtactcactgatctctttaaaaacaaaaaatagctcttgtaaaaggtcacaataactctatgcacctgatactgcagtggttcctaggccattcttcatctgctctggacatctcagtcatacccaatgctcagtggatcatgaccaaactcctgtcatgtggatgcactccaactggcagaaaagtagtgcttctagcagtcaagagcagccacgttgagattggtgaagtcaatgaacccagtgctggatggcaggtactaaaggtggagatgtcctgccgatatcaagatacagaactgcagtggagacacccacaggcatccaatagagctcatcgtcatcccccaaaccagtgtgctcctctgcattccctgacactgactccgagcaacagaatcgtccccaaccagctggccaagcagaagccaggccttgatcatgacttcttgcctcactcattcccaacttgcagtcctgttctttatcatcactcaacatggtctcctcttccaagacacccttccctgaccctgaaagagttgctctgccctctctcctgtcttcccatggcataccttgatcataacctgccataccttgatcataccctgccatacttccaacttccccactggaccggaagtatcttccgatcctggaccatgtgttactacactgaccaaatgaaatgtttgctcaacaaatatttgttggccaatgaa

SEQ ID NO: 93 - protein, 284 aa, Homo sapiens
MAVNVYSTSITQETMSRHDIIAWVNDIVSLNYTKVEQLCSGAAYCQFMDMLFPGCISLKKVKFQAKLEHEYIHNFKLLQASFKRMNVDKVIPVEKLVKGRFQDNLDFIQWFKKFYDANYDGKEYDPVEARQGQDAIPPPDPGEQIFNLPKKSHHANSPTAGAAKSSPAAKPGSTPSRPSSAKRASSSGSASKSDKDLETQVIQLNEQVHSLKLALEGVEKERDFYFGKLREIELLCQEHGQENDDLVQRLMDILYASEEHEGHTEEPEAEEQAHEQQPPQQEEY

SEQ ID NO: 94 - DNA, 746 bp, Homo sapiens
agaggaaggaggcgacagcgccggagcagtgtcctgtttcccagaggaacagttcatttcaacagccagggagaaagcctggatgctcaagttggggaatggcggtcaatgtgtattctacctcgataacccaagagactatgagcagacatgacatcattgcatgggttaatgacatagtatctttaaactacacaaaagtggaacagctttgttcaggagcggcctattgccaattcatggacatgctcttccctggctgcattagtttgaagaaagtaaaatttcaagcaaagctggaacatgaatatattcacaattttaaacttctgcaagcatcatttaagcgaatgaacgttgataaggtaattccagtggagaagctagtgaaaggacgtttccaggacaacctggattttattcaatggtttaagaaattctatgatgctaactacgatgggaaggagtatgatcctgtagaggcacgacaagggcaagatgcaattcctcctcctgaccctggtgaacagatcttcaacctgccaaaaaagtctcaccatgcaaactcccccacagcaggtgcagctaaatcaagtccagcagctaaaccaggatccacaccttctcgaccctcatcagccaaaagggcttcttccagtggctcagcatccaaatccgataaagatttagaaacgcaggtcatacagcttaatgaacaggtaatgcatcagctctggccacgcctc

SEQ ID NO: 95 - protein, 216 aa, Homo sapiens
MAVNVYSTSITQETMSRHDIIAWVNDIVSLNYTKVEQLCSGAAYCQFMDMLFPGCISLKKVKFQAKLEHEYIHNFKLLQASFKRMNVDKVIPVEKLVKGRFQDNLDFIQWFKKFYDANYDGKEYDPVEARQGQDAIPPPDPGEQIFNLPKKSHHANSPTAGAAKSSPAAKPGSTPSRPSSAKRASSSGSASKSDKDLETQVIQLNEQVMHQLWPRL

SEQ ID NO: 96 - DNA, 3748 bp, Homo sapiens
agctgccagagggcggggccgcaggagggcggggcgcgagcgagagctgggagaaggcagtgagcgagcaggcggcaggcacggtccgtgcggagcaggcgagcgagcgggaagacgcagccaccttcctcaccagccagcccacagcggtttgttccccttctcgggagtgcgccaatgcctgggccgacccaaaccctgtccccaaatggcgagaacaacaacgacatcatccaggataataacgggaccatcattcctttccggaagcacacagtgcgcggggagcgttcctacagttggggaatggcggtcaatgtgtattctacctcgataacccaagagactatgagcagacatgacatcattgcatgggttaatgacatagtatctttaaactacacaaaagtggaacagctttgttcaggagcggcctattgccaattcatggacatgctcttccctggctgcattagtttgaagaaagtaaaatttcaagcaaagctggaacatgaatatattcacaattttaaacttctgcaagcatcatttaagcgaatgaacgttgataaggtaattccagtggagaagctagtgaaaggacgtttccaggacaacctggattttattcaatggtttaagaaattctatgatgctaactacgatgggaaggagtatgatcctgtagaggcacgacaagggcaagatgcaattcctcctcctgaccctggtgaacagatcttcaacctgccaaaaaagtctcaccatgcaaactcccccacagcaggtgcagctaaatcaagtccagcagctaaaccaggatccacaccttctcgaccctcatcagccaaaagggcttcttccagtggctcagcatccaaatccgataaagatttagaaacgcaggtcatacagcttaatgaacaggtacattcattaaaacttgcccttgaaggcgtggaaaaggaaagggatttctactttgggaagttgagagagatcgagctactctgccaagaacacgggcaggaaaatgatgacctcgtgcagagactaatggacatcctgtatgcttcagaagaacacgagggccacacagaagagccggaagcagaggagcaagcccacgaacagcagcccccgcagcaggaagagtactgacccaccccggctgctcttgacacttccattgtgtgtgggaacgtttcttctggagaattggaacatgtgtggccccaagctcaacagaaaccagttgttcccaatctgccgttaccatcaacgcactgttgcatatgccagccactgcgcttggttcccattttctttgccaaggtgtattagcggacggccctctggccacctacccgagagatcgtagggtcacatacatccaacttcaccacttggctgcttgagattggttctgctcttttcttcatttctttccagaacaactctttcccaccccaacaccactgccaccacccctctttttatcctggtgtgaaacaatggtaatttgatatatggtatttatattggcatttttcaacccagtgtcactagatgtcacacacatttgtggtgctttgatgtttgcaagtctaacctctgaacataaatttggtcaaataattggaacaaagggaaacagatacttgatatgaaagccataatgacggtgacttgtgtcgtgggggaaaacataaggtcattttctccctctactcacaatactaaagggaaaaaatggattcaaagctaggatttcagggcccagcagtgttcctccatcagcatgttagacaactacacagtatgttgttagttttgaaagacattcactcaaggaaaacaccatctcaactttgcccgctcaccatgtcccttgcccccatgtagcccatttcccaggttatgctcttttctttctcagggtcctctttggtgggcagccactccccgagatgttgccatcagttttctgcagtccaaagagggtatggttaggtacgggtcttcctgcctcattcctcttcctctttgtgtaggtttcagccacaaaactgtcattcactctaggggacccctactaaagggtaacttcaggtgtgcagccctgagctccaaggctctgcaccatgccacacacttgctgtaaggctagaagtgaagaccttattaataggagcataattgcgagggagaatcatggttctgcagtctggtgtagacactggaataacagcacagaaaaatctatgactcccaatatcttctagaataaagaattttccctctttaacacaagggccctccttgtcattgaccttagctaaaccatggcaattcataaatagaggaaacattaatgaattaaaagcattccttattttttaactaatatttgtacattttcttagtctctttccaagtctttgcctcttttttttctttatttttattttttcctttgacagatggtatcccttcctggatcattcatttcaccttggtttctaactttaggtttactttcacttgttatttgacttagcaggtgcaacaaaaacaagaaacaaatgtgcccaccccactttccgcttaactgaaaagcttaaaataaatttctgaattatgtatcctgaagctttgaaatttctttattaatcgatgaaatatgaattctaaattctagcattgaagcttttcaccaaaagaagtctctccaaaataaatcttttgcagcaaagtgatatttattgagttatgtggaaaagatggcttgtatttttcagattattacaacacactgtgcagaattagacagatgttccgtggtgtttggtttccctttcttctctctcctgctcactctgcattatagcagcagcttatttctctaaggctggacagcctggctctcggcagtgacgtcctcccacacctggtcacaagtagtagtggctgtgctatacccagcatcatgcttaacagcgtgttgcccttctgagcctgttgtactcactgatctctttaaaaacaaaaaatagctcttgtaaaaggtcacaataactctatgcacctgatactgcagtggttcctaggccattcttcatctgctctggacatctcagtcatacccaatgctcagtggatcatgaccaaactcctgtcatgtggatgcactccaactggcagaaaagtagtgcttctagcagtcaagagcagccacgttgagattggtgaagtcaatgaacccagtgctggatggcaggtactaaaggtggagatgtcctgccgatatcaagatacagaactgcagtggagacacccacaggcatccaatagagctcatcgtcatcccccaaaccagtgtgctcctctgcattccctgacactgactccgagcaacagaatcgtccccaaccagctggccaagcagaagccaggccttgatcatgacttcttgcctcactcattcccaacttgcagtcctgttctttatcatcactcaacatggtctcctcttccaagacacccttccctgaccctgaaagagttgctctgccctctctcctgtcttcccatggcataccttgatcataacctgccataccttgatcataccctgccatacttccaacttccccactggaccggaagtatcttccgatcctggaccatgtgttactacactgaccaaatgaaatgtttgctcaacaaatatttgttggccaatgaa

SEQ ID NO: 97 - protein, 327 aa, Homo sapiens
MPGPTQTLSPNGENNNDIIQDNNGTIIPFRKHTVRGERSYSWGMAVNVYSTSITQETMSRHDIIAWVNDIVSLNYTKVEQLCSGAAYCQFMDMLFPGCISLKKVKFQAKLEHEYIHNFKLLQASFKRMNVDKVIPVEKLVKGRFQDNLDFIQWFKKFYDANYDGKEYDPVEARQGQDAIPPPDPGEQIFNLPKKSHHANSPTAGAAKSSPAAKPGSTPSRPSSAKRASSSGSASKSDKDLETQVIQLNEQVHSLKLALEGVEKERDFYFGKLREIELLCQEHGQENDDLVQRLMDILYASEEHEGHTEEPEAEEQAHEQQPPQQEEY

SEQ ID NO: 98 - DNA, 3992 bp, Homo sapiens
agctgccagagggcggggccgcaggagggcggggcgcgagcgagagctgggagaaggcagtgagcgagcaggcggcaggcacggtccgtgcggagcaggcgagcgagcgggaagacgcagccaccttcctcaccagccagcccacagcggtttgttccccttctcgggagtgcgccaatgcctgggccgacccaaaccctgtccccaaatggcgagaacaacaacgacatcatccaggataataacgggaccatcattcctttccggaagcacacagtgcgcggggagcgttcctacagttggggaatggcggtcaatgtgtattctacctcgataacccaagagactatgagcagacatgacatcattgcatgggttaatgacatagtatctttaaactacacaaaagtggaacagctttgttcaggagcggcctattgccaattcatggacatgctcttccctggctgcattagtttgaagaaagtaaaatttcaagcaaagctggaacatgaatatattcacaattttaaacttctgcaagcatcatttaagcgaatgaacgttgataaggtaattccagtggagaagctagtgaaaggacgtttccaggacaacctggattttattcaatggtttaagaaattctatgatgctaactacgatgggaaggagtatgatcctgtagaggcacgacaagggcaagatgcaattcctcctcctgaccctggtgaacagatcttcaacctgccaaaaaagtctcaccatgcaaactcccccacagcaggtgcagctaaatcaagtccagcagctaaaccaggatccacaccttctcgaccctcatcagccaaaagggcttcttccagtggctcagcatccaaatccgataaagatttagaaacgcaggtcatacagcttaatgaacaggtacattcattaaaacttgcccttgaaggcgtggaaaaggaaagggatttctactttgggaagttgagagagatcgagctactctgccaagaacacgggcaggaaaatgatgacctcgtgcagagactaatggacatcctgtatgcttcagaagaacacgagggccacacagaagagccggaagcagaggagcaagcccacgaacagcagcccccgcagcaggaagagtactgacccaccccggctgctcttgacacttccattgtgtgtgggaacgtttcttctggagaattggaacatgtgtggccccaagctcaacagaaaccagttgttcccaatctgccgttaccatcaacgcactgttgcatatgccagccactgcgcttggttcccattttctttgccaaggtgtattagcggacggccctctggccacctacccgagagatcgtagggtcacatacatccaacttcaccacttggctgcttgagattggttctgctcttttcttcatttctttccagaacaactctttcccaccccaacaccactgccaccacccctctttttatcctggtgtgaaacaatggtaatttgatatatggtatttatattggcatttttcaacccagtgtcactagatgtcacacacatttgtggtgctttgatgtttgcaagtctaacctctgaacataaatttggtcaaataattggaacaaagggaaacagatacttgatatgaaagccataatgacggtgacttgtgtcgtgggggaaaacataaggtcattttctccctctactcacaatactaaagggaaaaaatggattcaaagctaggatttcagggcccagcagtgttcctccatcagcatgttagacaactacacagtatgttgttagttttgaaagacattcactcaaggaaaacaccatctcaactttgcccgctcaccatgtcccttgcccccatgtagcccatttcccaggttatgctcttttctttctcagggtcctctttggtgggcagccactccccgagatgttgccatcagttttctgcagtccaaagagggtatggttaggtacgggtcttcctgcctcattcctcttcctctttgtgtaggtttcagccacaaaactgtcattcactctaggggacccctactaaagggtaacttcaggtgtgcagccctgagctccaaggctctgcaccatgccacacacttgctgtaaggctagaagtgaagaccttattaataggagcataattgcgagggagaatcatggttctgcagtctggtgtagacactggaataacagcacagaaaaatctatgactcccaatatcttctagaataaagaattttccctctttaacacaagggccctccttgtcattgaccttagctaaaccatggcaattcataaatagaggaaacattaatgaattaaaagcattccttattttttaactaatatttgtacattttcttagtctctttccaagtctttgcctcttttttttctttatttttattttttcctttgacagatggtatcccttcctggatcattcatttcaccttggtttctaactttaggtttactttcacttgttatttgacttagcaggtgcaacaaaaacaagaaacaaatgtgcccaccccactttccgcttaactgaaaagcttaaaataaatttctgaattatgtatcctgaagctttgaaatttctttattaatcgatgaaatatgaattctaaattctagcattgaagcttttcaccaaaagaagtctctccaaaataaatcttttgcagcaaagtgatatttattgagttatgtggaaaagatggcttgtatttttcagattattacaacacactgtgcagaattagacagatgttccgtggtgtttggtttccctttcttctctctcctgctcactctgcattatagcagcagcttatttctctaaggctggacagcctggctctcggcagtgacgtcctcccacacctggtcacaagtagtagtggctgtgctatacccagcatcatgcttaacagcgtgttgcccttctgagcctgttgtactcactgatctctttaaaaacaaaaaatagctcttgtaaaaggtcacaataactctatgcacctgatactgcagtggttcctaggccattcttcatctgctctggacatctcagtcatacccaatgctcagtggatcatgaccaaactcctgtcatgtggatgcacgtgagtgggtagcagggagtcaggatcctgccttctccagcaaccccttactgctgtataacttgcataagcctccctggtgactcttgcaggaaccactccattgccctccagctccccagccttctcagttataaacatgctggccagatctcttagcctgcaaagagaactttccccagtcaccatagaccattctccttcctgaaggcttggggcagaccattcgtttatttagagaagagctatacattcttctttctggtcccatcttaaacgtcttctgttgtgctgcaccccagatggtgtctcagatgctttggggaatctttaacagctgaatttgagtcagtcctcttaggctgcacctccagcctctgcagatcccccctcatttcccatggatggtgggaccccattattctctcatctcggcattcagggaacactttccttagcggcccctggtcacatgtcatcgggctgggcaggaagcgtccctgggtgcgtgctccacttctccctctcaggaagcccagtttcatccttagtaccccccctcgtgcccgctgtcggctggttatagcacttccactgctactgtcagataggaagtgatcgaagcagggggcaaagagaaagcccatatttgttctaagcagaaaaaagggaaccaagaactcttcccttccctggtgagtatttccattattccgttaaggtttaatatgcattcagattacttttactaaataggacaccataaagcttttgttatatattaaatgtaaactgaaagg

SEQ ID NO: 99 - protein, 327 aa, Homo sapiens; identical to SEQ ID NO: 97

SEQ ID NO: 100 - DNA, 4252 bp, Homo sapiens
agctgccagagggcggggccgcaggagggcggggcgcgagcgagagctgggagaaggcagtgagcgagcaggcggcaggcacggtccgtgcggagcaggcgagcgagcgggaagacgcagccaccttcctcaccagccagcccacagcggtttgttccccttctcgggagtgcgccaatgcctgggccgacccaaaccctgtccccaaatggcgagaacaacaacgacatcatccaggataataacgggaccatcattcctttccggaagcacacagtgcgcggggagcgttcctacagttggggaatggcggtcaatgtgtattctacctcgataacccaagagactatgagcagacatgacatcattgcatgggttaatgacatagtatctttaaactacacaaaagtggaacagctttgttcaggagcggcctattgccaattcatggacatgctcttccctggctgcattagtttgaagaaagtaaaatttcaagcaaagctggaacatgaatatattcacaattttaaacttctgcaagcatcatttaagcgaatgaacgttgataaggtaattccagtggagaagctagtgaaaggacgtttccaggacaacctggattttattcaatggtttaagaaattctatgatgctaactacgatgggaaggagtatgatcctgtagaggcacgacaagggcaagatgcaattcctcctcctgaccctggtgaacagatcttcaacctgccaaaaaagtctcaccatgcaaactcccccacagcaggtgcagctaaatcaagtccagcagctaaaccaggatccacaccttctcgaccctcatcagccaaaagggcttcttccagtggctcagcatccaaatccgataaagatttagaaacgcaggtcatacagcttaatgaacaggtacattcattaaaacttgcccttgaaggcgtggaaaaggaaagggatttctactttgggaagttgagagagatcgagctactctgccaagaacacgggcaggaaaatgatgacctcgtgcagagactaatggacatcctgtatgcttcagaagaacacgagggccacacagaagagccggaagcagaggagcaagcccacgaacagcagcccccgcagcaggaagagtactgacccaccccggctgctcttgacacttccattgtgtgtgggaacgtttcttctggagaattggaacatgtgtggccccaagctcaacagaaaccagttgttcccaatctgccgttaccatcaacgcactgttgcatatgccagccactgcgcttggttcccattttctttgccaaggtgtattagcggacggccctctggccacctacccgagagatcgtagggtcacatacatccaacttcaccacttggctgcttgagattggttctgctcttttcttcatttctttccagaacaactctttcccaccccaacaccactgccaccacccctctttttatcctggtgtgaaacaatggtaatttgatatatggtatttatattggcatttttcaacccagtgtcactagatgtcacacacatttgtggtgctttgatgtttgcaagtctaacctctgaacataaatttggtcaaataattggaacaaagggaaacagatacttgatatgaaagccataatgacggtgacttgtgtcgtgggggaaaacataaggtcattttctccctctactcacaatactaaagggaaaaaatggattcaaagctaggatttcagggcccagcagtgttcctccatcagcatgttagacaactacacagtatgttgttagttttgaaagacattcactcaaggaaaacaccatctcaactttgcccgctcaccatgtcccttgcccccatgtagcccatttcccaggttatgctcttttctttctcagggtcctctttggtgggcagccactccccgagatgttgccatcagttttctgcagtccaaagagggtatggttaggtacgggtcttcctgcctcattcctcttcctctttgtgtaggtttcagccacaaaactgtcattcactctaggggacccctactaaagggtaacttcaggtgtgcagccctgagctccaaggctctgcaccatgccacacacttgctgtaaggctagaagtgaagaccttattaataggagcataattgcgagggagaatcatggttctgcagtctggtgtagacactggaataacagcacagaaaaatctatgactcccaatatcttctagaataaagaattttccctctttaacacaagggccctccttgtcattgaccttagctaaaccatggcaattcataaatagaggaaacattaatgaattaaaagcattccttattttttaactaatatttgtacattttcttagtctctttccaagtctttgcctcttttttttctttatttttattttttcctttgacagatggtatcccttcctggatcattcatttcaccttggtttctaactttaggtttactttcacttgttatttgacttagcaggtgcaacaaaaacaagaaacaaatgtgcccaccccactttccgcttaactgaaaagcttaaaataaatttctgaattatgtatcctgaagctttgaaatttctttattaatcgatgaaatatgaattctaaattctagcattgaagcttttcaccaaaagaagtctctccaaaataaatcttttgcagcaaagtgatatttattgagttatgtggaaaagatggcttgtatttttcagattattacaacacactgtgcagaattagacagatgttccgtggtgtttggtttccctttcttctctctcctgctcactctgcattatagcagcagcttatttctctaaggctggacagcctggctctcggcagtgacgtcctcccacacctggtcacaagtagtagtggctgtgctatacccagcatcatgcttaacagcgtgttgcccttctgagcctgttgtactcactgatctctttaaaaacaaaaaatagctcttgtaaaaggtcacaataactctatgcacctgatactgcagtggttcctaggccattcttcatctgctctggacatctcagtcatacccaatgctcagtggatcatgaccaaactcctgtcatgtggatgcacgtgagtgggtagcagggagtcaggatcctgccttctccagcaaccccttactgctgtataacttgcataagcctccctggtgactcttgcaggaaccactccattgccctccagctccccagccttctcagttataaacatgctggccagatctcttagcctgcaaagagaactttccccagtcaccatagaccattctccttcctgaaggcttggggcagaccattcgtttatttagagaagagctatacattcttctttctggtcccatcttaaacgtcttctgttgtgctgcaccccagatggtgtctcagatgctttggggaatctttaacagctgaatttgagtcagtcctcttaggctgcacctccagcctctgcagatcccccctcatttcccatggatggtgggaccccattattctctcatctcggcattcagggaacactttccttagcggcccctggtcacatgtcatcgggctgggcaggaagcgtccctgggtgcgtgctccacttctccctctcaggaagcccagtttcatccttagtaccccccctcgtgcccgctgtcggctggttatagcacttccactgctactgtcagataggaagtgatcgaagcagggggcaaagagaaagcccatatttgttctaagcagaaaagcaggaaaaaaaaaaaaaaaaagaaagaaaaacacctgttgacctgagagaagtaaattccagaagggaaccaagaactcttcccttccctggtgagtatttccattattccgttaaggtttaatatgcattcagattacttttactaaataggacaccataaagcttttgttatatattaaatgtaaactgaaaggaatgtaaacatatgtattgttaattataaatatagataagtaatgacataatagatgaaaaagtcttattcagatgtatcacattcattttacattacccacctattgtcgcatggtagaatagttttttgtctctgaatatgtgaataacttgacttgcattgatctttttacatatttaataaaaaaaaaagtat

SEQ ID NO: 101 - protein, 327 aa, Homo sapiens; identical to SEQ ID NO: 97

SEQ ID NO: 102 - DNA, 237452 bp, Mus musculus
  misc_feature (1)...(237452): n = A,T,C or G
aaaagctgtacaactccagtggccgagatctaagaagggcccttttctcactgaagcagatatttcaggtaaaaaggaaaaacaaaagccaaaatactacagtcctggttttactttgctagagttagatatataaaaacttatacctgtgtttattataaataggaaagtgtgttttgaggacattacaagttaggtcagggggttgaggagacagaagactgagccatgggcttgctgagcagaggatagaatcactttggatctccagcatccagataaatgctgtgtgggcatgatggcctatcaggattcccagtgctccagaggtggagataggaatctagggcaatctgaataactactctagctgagccggtgagctctggattcaggtgagagaccctgcctcaatacaaaaggtagagagcaattgaggaaaaccactgatgtcaacttttggcctccacatgcacttgcacacatgtgcctgcaaccctcccacatgtgtccacatgcatatatacatatcatgcacacacagaaaaattagaacagaattctcgagaatattttatgtcaaatatttcaagtataaaaagtaaggacaacttaaggaaataatattttattctatattccatttttttaagaagaaaacccatttgattgtagttaaagacctgtgttctgttgccccaccccaatcactaacttcttccacccccatgtctcctctctatcagtagttgtatttagtgttgtgtatattcatgtttccattctagtggtagatacccatagtgtataccatagtgtatagcacagagtattaacttcatgcatgccattatgctgcatgtagcctacttcggcttattcatggagagtgactgggagtgggtgtgactatctctgactcgggttgtcttgtatgcagtgagctcaagctgttctgctcattcttctttgggtagatggtttacttaatcccaattttgttattataaatcctgcaattgtaggtatgttccttcacgtacatgcaagtctctcaccactagtttcatgttaacactccatgcacatcaagcctttccttcatccctatactgagagaagcccttagtgaagggctaggtcaggcttcagatacccatgagacagcaatgggcagaggagggctgtggggttgagaaggtgacccttgtattgaggattgctctctaggttcattattttttccattataattttatacacataccactttcttctaattcttgtcttatccatgtctttaaaagattttctttgggccagatgtgatagcgcatgcctttaatcccagcacttggtaggcagaggtaggcaaatttctgagttcgaggccagcctggtctacagagtgagtcccaggatagccagggctacacagagaaaccctgtctcgaaaaacaaaaacaaaaaaattctttgttgataattttagccagagtgagtttcttcctattaagaggcactaggcaaaaaggctgggtaaaccaaacaaagaaagaaagaaaaaaaaccaacaaataaccctctaacttacccccatattcttacccttttctttaaacttgttcagtcgtactgtctcttctttccagaatgggacccgttttctggtggaaagttctaaagttgtgccctctttcctcctacacgccaagtctgttgccgggggcatggtttctttgtcatgttataagagcagggagctatcagataactctaagatattctccctcagaagcaagctgaagggttgcccaatggttgtccagagatggaacaacacacatcaatcaggatgataattgctatggatctaaacacactgagtaagtttgaactgatggacacattcacacggatactaaaacctaacaatgatggacaagatgaataggcagtgggtgctggtgggccagttattttgagaagggcaaactttaaaaaactttaaaaaatctcacattcatcttgctttttcacattgaattttaaggtaaaaggacatctcttttaaaaatgaaagtcgttgtaggtaataaagaatagaaagcctgtgtttttttggcctttaattaatccattaatgaattaacaacaaaacaaaagttgctaacatgccagaaacaaggtaccactagacattaggtacctcctaatggaaatataacatatgatgtagtcaagccaacaaatcaaccctgggtttagatgtgactatagctacaaataattaaagacagaagcacacgctagacatcactttagggaaatgatctgccaaatccagacagagggctgctctaaaggatggttgattttcttcagtacatatgttacgcaagggtaggggcattatcttccattaattagttaataggtgtttctgagttttagacccatataaatgaattgccatatgtggaccttatttggatctttttcttggtctgagctctgtgactctaataaaacactctgaccaaaaggtaaggaaatgtaggtaaagaaagggtttatttcagcttacatttccagttcacagtccattgatgaaggaagtcagggcagggacttaaggcaggagcctggatgtctgaaccaagctgtttatcttggcttgatctctggctcatgtttatctacctttcttatacagttgaaacacacctgcctaaggacgctgctgcccatagtgtcctgtgccttcatatatcagtcatcgatcaagaccatctcttacaaacatgacataggtcaatctgacctggttatttctttagtgaaattcctcttcccaagtaacacttaagttgtgttaaattgatatcctgcataaacagtgatgaaaaagttgtaaatatggacactgactaaatgtttgctcctttttaaaactttgatcctttgtaaaacttgcttataaatacctatttttacaaggtctctatagttggaaactatatgtgtgtggagaattgcttcaggttctataacaggagaagatagaatgataaaaacaagactcttgtgagttcatttacacctgtgttcatgggactatttgttttacatacagtaagatttccccaaattgaaaacatagaaagaaatccagaccaacttgttcagacttttcatatagtatttgaaccaatatactccttgacttgtgtcccttgagtttctcctgctgttttatgtaatgggttttgaatagctaaggtagtactatgtagacaagcatgaaggaaggtatttgctaccaggagtggggacaaaaccatactcaagatcagccatgctggcagttaactggccctaacaggcagcatgttgggtaaggcttaggctggtgcattctatatgtctgggtctgcatcttcatcagatctcatgttctctaggcatggaggtactttttgagactcttactttaggagcttaaaaaataaaaacattggtcacttggattgagtcagttactaacaataacaacaagacttaagacaagaccaaaccaaaccaaaccaaaccaaaccaaaccaaaccaaaccaaaccaaggctgatggctctgagggtaagggcacttgctgccaagcttgaaaccctgaattagatagcaaagagtcacacaatggaggggagagccaacttccacaatctgcccaaactgccatgtgttccaacacatgtgcatgttcatacacatgcacacgtgcacacacatgcaagcacacacacacacacacacacacacacacacacacacacaaagtaaatgtaaaaaaaaatcacaagccaatgaatagctcctccagaaaattctggagtgtggcagcaatcctttatcagctggtgagaacatctcaatttcataatcatttaaagccactgtcttaagactcatgtgtcagtgcctatatatttccaggatatgtatttaaaatctaggacattgccaatttggaaaactttctctacatttattatccacaagtctctccttccctggtgccttatctacacgggcccatgcattttctcgaagggtctgagttattctcatgaacactgtctcgcctgtccagtgcttttttccaagtgcctttgccagacactcagttctctggtatattaatattagtgattagcttgactggtttcttgagagcttgttcgcactttttcaccatgaagtcatgtgtgaatctagttttagttaaagcaataaacatttgttacatgcttagaaaaccctcctgactagacatgagctcatctgcatgtccagttcacatatgctgctgggaaaggggacagagagtgggagaagtattttttatttcctttatacctaccagtgtaaagtaattttccgaagactcatgatactgtcccattttctctttcttcctcagccatgattatctcaaattctgagttcacacagctgtctttcattatgttcagtcttgctccgcccctgcccccttactggcgctgaccctgccttgctacatcgcttccagggacctgtactatgtctgcccacatttaactcaaagctcccatccatataattgaaaaatgtcatataataaagaaaggggctgattgcatgtcgagacaggagaattgtgccaggtcatctattttctctcttcacgataatccatggctgctgttactataccagtcctctgtcactccattggctttctgtattcccattgttggggattgcttgtgaattcctgctctgttgtctgttatgacaaaatacggatcttcctgctgtatcttcactgggttggaggcaaggtgctgtctattctagggagtctgtagctatggaaatgtctgtttcacagggctccccagagtttggttttacagcaactgcccacgttgagtgatggccaaatgtagttcagtggtcctggacaagtgtgttttgtttgttttcctgccctcttgaatctcagacaatctgtaaagagagagttgttgtatgagatagatagtgtttctatcttgcccctttggaaattgagcagcagagcctgggttcggcaatccctatctggtgcttctgcatagtgtatatgcaggcttcctgtcttctcaaagttccctagaaggtgaaggtgtggaggggtccctcttagaacctctgtcttacctggaaggaagggagctttgatattcacagccccagagctctgtccactgagacttcctgatccttaggcaggggatggctaggcagtttgcatgtgtgagtctcccatgaggctctcaaatgggcttgcaagggtcccttgccctgtcgatcaggatggttctctttgagaagcactagcttagtggtatactgagcttctctctgtgtcctgctgccagctgaccatggctggctgctgcaggttaatggctgctccggtacccagctcccttccctgtgctgccagccatgcaagggaagtgacgagagaagaggcttttttaggttgacagagtgttcccaagcctcttgttgaaactgctgtccctaggctgtctgttgggacaggggtgtgcttttcatgacaggatgcatggtcactggccagcacattgggtcctgtggggtgtgggtcctgaggagcctgaagaatgaaaagcagaacactacagtctctggacaggcaggagagtcattgacttcatctttattaggttgtgcagaaggcaataattggtctttggcaaatgacagtgtgaagacttgtaaaatttctttggcaagagttagaagctcgctcatgtgcttgctctctttctctctctctcatctcatctctctctgtctctgtctgtctgtctgtctgtgtctctctctctcaaaaaaaaaaacttcttaaaattcaaaacaaaacaaaaaaccagaggtgaggaagatctgggaggaattgggggaagggaggaaacataatcaaaacatattatctgagaaaacttaaattaatatttaaaaagagttagatagttcatctgaacaaagcagactctcctatggggtcattttgcttcaaagatccctgcatagtttgaacaatgcagcttgcatataaggtagacagagacctatttgaacactttaaaaaatttctttaaattttatttcatttttgtttctttccttcctacccaggatgacaaggatttggtgcatgaatttgtcatagctgaaggtctgacctgtttgatcaaagtgggagccgaggcggatcagaactatcagaactacatcctgaggggtgagtcatggcagcccctctgtgcagaggccaggagctcacgtgctgaaagctttgtaagaaatctgggataatggaagaaagagtccctgtggcaactcatagcattttttatcagttcctcagctcttagcaggtagctggtgtcagggctgacttggtttcatgtaggtcgctaagaacaaagaatggtgactcactttttaaataaacccctttaataaggaggggtacacactaattgggctcaagtagactcttcattttagctcaaagctacccaaaactaaaaccctgatgtatttctaggatggaaaaaaaatagtttctagacttgagttgttccgcagggggggctgtcatcaaaccgtacaatcctcaccagccttactgcttctgattcatgcatctcaggtggacctgggaacttgccctctaagatgcaattacaattgctgccttataatttaatgtgcaaattagtgtaagggcggctttgaagccaattcctgtttccattcagagctaatggtctcttatgatggtgatgattcaggttgtctgttaattaatcttgctttctcctggaaataataaccccaaacctatgtccaggtgggccagaaacaatagttttgaactacaaaaggagacatttcatataagtcaacattatccccattttatagttgaaactaactgagactcaaagaagtcagtccttgtgcctaaggatgccacattccgggcctggcctgcgtgttcctgtcccttcagtgtgaataactgactccacaaactgcaagctgattttcataaaaaagaaaaaaaaaacccacagatatcttttccttttctctttgggtgaagggaaagtatacaagctgtgtgattgaatatcggcctcccatggttagagttttgactgaggtggcagctgggcactggccctgaggatgcttctttaagtcctgtattgttatgtgactcatgttagtcaagctttccttcttgtctggtgctaatgaaaacccacagagcagaaggcacaacggaaaaccccctggggtcacggagcacatcctccagtcagtgcttgctcctttggtttgccttcttaaatgccatgtgtgtagcagagggcatcttctttaccctcttcctttgctctgtggtgtatctatgtctgtgagatagcaggttggctccttctgttaccttccatctttccttgggcttgttacagatttgaatcggttttcaggaaggatgcctggctgttgagaggcatggtttctgccctccaatatcatttagtcattaacttggaaattgtgatggtgtgtaaagacacacagacctcaagctgcatgctctattgtatccaaagatggcggctgtctctgtgttagaaggaacaagtccacatagaagaaaaaaaaaacttaataaggctgggaagagctcccttaggaagcagcagttagtgccaccccatagctagccttggtgttgcccagagaatctttgcacagagtgcaagtggacatcagtccttgcacaaggccctggtgtagagtattgtgaattctgctctccagcaactgtaaatggggttgacatcatgagctccatttaggctctctgccatctaagtgtttatcctgaagcttgcagtggtgagttaatttataatgttctgatctggaccaaaaagatgctaatagtactttgccagatgataacaagcaaaaatgcccactcatgcccagagagatcctggaaagcacctgctgccccccacccccaggccacccccatagaaaatgtctgcagttaagaccctcttaggcagcacttgtaagatgtgaggtgtaatgcttcattctaccaccagggcctggtcttcccactttttcttttcgatagcgcccacgtattagagactataaggcttgctgtgcagtcagttcctggaaagtgaggagttgctcacaccactcaagccacttcccagcatgccgttttccatgggaaggtgtatctgtgtctgccctgaatctactgagtctcaagagagtcacctcaaccagggcaccgtgctcactcagcggcacactgtgacgtagcttgctgaaacctgtgccaagaaatgtatcttctgggagcatatgaatgatgtatttcttggggtgtgactttttttttttatacaaggaaacttgtttttcctaacccacgtgttgagtcggtcctctgtgtcttcaacagagttcttgtgagcactgttgccattgccagcaggcaccagacattcacagtcaagagtaaccttccatttgcttctatttgcccagccatgttttgaccatattacattggagtggaaatagtggaagggcaggtggagatcaggaggacaaggtcttcaaatgttttctagtcatgttattaattttgggagagagcacagcaagacacgcagggccaggcagagcacaccaggggcctgtccagcagcagcgggaatggggactgtggtcaaacaccctccatcatagtttctgagggaaagactagccggagaaaataagcagggttgaaggtgtaatggttaatcttcaccgtgaccatgaacgggtttagggccacataggagacgtgcttctaaaggttttcccaaggggagaaaaccttctctgaatgtgggtggcattgccctgtgggccagggtcctagatgaaataaaaagaaggaagcaggttgactgccagcatttctttctgcttcttgactggtgcagggtatccgagagcctcacattgctgctgcaatacctagagatccacttcccatcacactgtgcctgctacaaaggactgtgctcttgaagcgagccatgataaaccctttcttccctaagatgcgtttcaccacagcaatgagaacactggagcaggacagggctggctgtttacagttattttaacaggctctaaggcccactggtgtcctggagtgatcagatcttgtgtgtagtgacttcgggtgtgggacactaatacagaagtgtttggaagtgatgggttacttaggaaggggaactgactggcttcaaaactgggcctagcagcatttagggaacagcactgcagatggtaaggtggctctggcctatgctctgtgaagttacctgtggggtcacttaaaagctcagcttgatgtgacacctgtggcccctcatgcctgaggagcagcatacggataagtctatatctgcatttagaagactctatctgtgaagaaatttgatgggattattttctatttagtcctgttagccagtggtggtggtggcggtggtgtgtgtgtgtgaagcttttatttttttgtctacatgcaaaccacatgtgaacccaatgccctcaaaggccagaagaggatattggatctcctgagactagagttatagatgatcaggagccaccatgtcattgctgggaatcgatcctgggtcctctggaagaacagccatagctcttaaccaaccaccgagccatctctctagccccaatgtctgaggttttttttcttcttcttttttaatatagaggttcaggccttggttatgttccattcagtgtctattggccgaggtaaaggcaggtttgagttccacggcagccaagcgctctccacaagtgtgagcaaactgctgggaagaggtcctagctgcacaacacggagaaataatatttatctgagttgttattcttggatggctatagcttatgatctacagtgtttcaggatagccagcgtttaatataaatgtaccgtggaattttatacctcacaattatgcttatggaaggaggacctagagtggtatattcctgggaacttaaactttccacaaacattacggagcctttgctgtgggccatgtgccacatagggccctgaggctgagatgatgagagcagcattgaaccccgctctgaagcagatgcccagcacactttagataccgtattccagttgcacatacataccaggttctggaaggaaagagaatgatgtggaaaagcccaaaggccagctgtatatgttggcagaaccccaagagaagcctcctttgattggcaggtttcatgcaaagaaaaaaagtttttcaaggcacggtctcgcttgctatgtgcttctggctggcctggaatgcactgtgcgcatcaggccgacctcacaggcacagagttcccccgggctttgcttcgtgagtgctgggatcaaagaatgcaatttcatacctggctcatgcgaagaaatttgatttgatcattttgctgagagcaaagcttagtcttgaacactgtggttattatcagagctatgatataaaacccatgtagctcagaccttttattgtacaagaaaaatagattttttttacctctgttgtactttaaaagagatgctgtaaatactgtcagcattacaaaatgcagatttgatatttaaaagtccagaattcgatgactgaagtttagacgtgtaacctatttacatgatggagtttgattcagccataaaggaaaacaaaatggtgtcatgcgtagtggagcggatgcaactgaagatcccattctgttggatgcaaataaggcagacacagatagacaggcgtcatgtgcttttccacaatacaccgcctagatgtgtgtgtgtgtgtacatgtgtacacatggattcatgtctgtaacatggaatggaagggagatgggggaggaagttctaagaggaggtcagagaaacaaatagagaaagacaatatatcgcagaatctagatgtaaccgtgtgtgaaaacacaatgaggactctctggcttgagggaggagtctggtggggagaatgggctaatggggggagcgtgggggatgggaggagtagttccaggaagggaaagagttggagaaggcagtaggggctggaaagtaggagcaaagtatcacgataacccacaaaaatgtcatgatgaaacccattgttctgcattgagaaatttaatttaaaggaagaaaggaaaccagagttcatgcttgatatctatatatatctatatctctctatatatacacatacatatatatatatacacacatatacatacatacacataatacacatacatacacatacatacatacatgcatacatatacatacatatgcacacacacatacatatacaccggagctagccttcactagattccactataggaaaaagaaaatccgaagcctcttggccatgaggggattctttttgagtatcagggtgtggccaaatggtgtttgtcagcatctacagtggcagaggcagaaaacctgaacatagatgacagaagtgacagccacactagtatctgcatgagcattctctaggccagaaaaatacgcaggtttgcagtttagtgtttcagagcagaggagccaaatgagaagtagggttccaaaggcacagagatgggcagaggaggccccaaagtgatggttaggagaagagatggaagcagaggggcatggctgcttgattctgagccaaggtgaggccccgggtttctgggcttcctgttgactagtgggcccctcctcttcctcaccctcgtcctgatccctctgctgggctgggcactacttactcttcctgctgagtaggcttcctgtgcctgatctagattttagaaacatcacggtggctgcagacttgaccagatatagatgacatcactgcacactgtgtcctgtagtgtgaagcgaggccagtgtctgggatgaggttcctttttgcttgatgtcactcttcttgttgagtgggtctggcagtgggggacccttcctggtagggagtcatgcctactggcccaaattggcagcctagggaggaaagtagggcctgtagttcattctcctttacttagtatgtttaaacttaaaaaaaattaattgtgagtattgataaatttgatttgctatgagccactgagttcaagcgcagcactgggtcctcagtgctgcatggctacagttagagaaggaagcagctgctcccggtagcccaggcaggcggctctggcttctttatgatttgccactcctgatgcgttgccctggaccttttccagttcattctgctgcctctttgctctctatgcacttacacttgagacctctgactaatgacatcatagtctgtgaagtgagaattaccaccgtctacagcagaagagccgggctccattccagaagttatgacgtcattgttacttcttgcactgggttctcaagtacaagccacaactttatttgctcaattttctctttagcaattttacaaattgttcaaagctcagcactctagtatgcctcttccccatcaatacatgtcatgaatttgtaagggcaaaaaggtgtcactcaaaacccacagtaacttacagtcgggatagtgcagcttgggaaatgggcagggaggaaggagagactaggatgtgaggatggaaggtcctggttggaaacttgctacattagctgaacccgagttggataacaggctatcatctcagttctaagccttgtacctcacatacacgtctgtcttgttgaccaagtcctatctaaaataagatgtccatagagaggcctgtggtataaaactgtctcaagtcaggcacatctcaacagctagctacagggctggagagatggctcaggcagaagagcactggctactttcccagaggacaggggtttggttcccagcacccatagggctcacatctgcctctaactccggctccaggggatacaacaccctcttctggcccctgtaggcactgcacacatatgatacacagacacacattgcaggcaaaacatccataccatacaataataataaattaaaactttaaaaaactgtctataaaaaaataataaaagacagccacttaaatatggaatcacacagatgtttttcttaaaaaattgcaagtagcttttaaggcttttttgctttactgaataaactgtgaaattaaatatttggaactacaactatcacataaaggccaaacaggggctgtctccacaccctatgcttgcttcatctgtgactttcataaaaattgatgtctttatattgtcagccagccatgtccctgaaggatgtggctgaaaaatgtggccctgggataccagttgtcgtggtgtgacatctcttagatctttgcacagttgtttctttaagccttagcgtccttatatgaacaggatagtactcactgtgttatgacaactgatgggtaggtaaaaagcttatctgaaggattcattggcagctctaccctttattgtcagaggcagtcattgacgtcatcatactgatcatgtgatctcggctgaatgcttccatccaggttcatatgctgaggttataacctgccacacctcagggtgggtctccacttagaaactgggactttaaagagttagctggagtggacaccgacccattgtggctatgattcttatactaattggaagtaaagccacagacccatattaaaggaagaccaccttctacaagccaaggagaagagagctgagaagattccagctcagctaaacttggatgtctccatctggaacttcctatgtacaagtctccttggagatgaggtagcttgtttgctttaacttcccagtctgtgatattaatatcacagactaattaatattaatattaatattgtgctaatgtgccaatcttatacagaaacctcaggaagccatttaggtcttttccaatgcagaagttccagggatggagttgtcacaccagaaggcatgtgcatttccatattgttttagactgaacaaattattagaggcctaatggcttcatcagtcttggccagtcctggtaatttgggtataatttttcttaccaatgtattttcacagtcattaacaatgattttgaaattttggttgtcttgcattgaatatgtcaacttgatttgtaaggatattacattatttcctgaaggtttttaagtcttgtctccatggacttctgtctcttgggattttcaatcacatgttgaccatgtaacttttatgtgctgttgtgggacactatgttgtaagcatagtggccattatcatcttagttcgagtggccaaggcaagtgacccttaagatggggtctgcttctgctcctttatagaaggcgagggagggaagattccagccactccttctatctttctccttgctgtgaataattctgttccagctgtgcatggttccagggactctggaggtgatacaatatgtagagtgtgtaagggtaagtgaggagggattccatctaagcagctatcctggatagtgttgctgatattgttgttgctgttgtgttttaatcaagctgatgcaagatagagttatttggggaagagaaacctcaattgaaaaaaatgcctctattagattgcaagaatttagggcattttcttgattaatgattggtgtgggagggcccaactcagtaggagtgtttgctacctcctgggtgctgctacatggtactgggtagactggtttgtgttttatcacagcaatagaaagcaaactaagatggcagccataaggaagtcgaccattctggtttgggggacttttgatgatgtggctgctttggggtcagccatgctcttataagaaaccttttacttagctctgcaaggaaactgataccttaatagttcaccaagctacacttgaatttgctctgtggttggtgctgtctctgaggccagcaaatgttttatctcccagtgaaaacttagcttggtagctgtgatgttcttctctccccagcctcagcttagcacctgttggagatgtgacctgcaggcataatcagctacctgctgagaggtttggttttgtcaagagagccacagtttgctctttctggggacagagagatgtgaagtccctctggtggttgctgggtatccatggtgacagaaatgcttcttgacagtcttcagagtgtttgttaggtctgtggcccctcccctctccctgcacctccttagaaaactgtcttcagagactggccagcccctcctgtgtctttcttctttcaatcttttcaagaacaggggcaaaatttggattcaagttagaatggttccatctctctcctggtttctccagactgaagcacagtgtaccctcacccgactctgctgcctcaatatctgcagggttctgtttccagaacaggaagccacctgctgcccagtgtcttccagagccagctgcagtccctgttgtgtctgggtgggcctgctggagtggaggtagctgtcatatttcaggtgcttggcttctgaacccttcccacttgcccttgtcatgggacatccgagggaacttaagaggaggtggtttggaggctgttgggtttttgtttgattgattttgtttattttggaagttctgagttattggactcagcatagcttgtggcctgtgcactaaccatctcccaccagagggggcaagagagggcagagacagagccatgccttcgatacaacaaaatgccttttctgccttttctaatctgaggtcagagagcatgcttgaatagtagggagggcagccccagctcattagcccctcatatgcatgagtgagtgtggtatggccactctctttctgactccaggttgttgccatctttaagggtggttttgctttcctctcctcctgtcttcttaagtgagtgctatttatcctataattacagaatgcctaagtctaaatttcagatctataagttaaaaacgcctttgttggaagtagcaaacattaataaatggtagcagataaagagtctacagagacatacagagctgggtgtgcctggcaaacattacctccaacattgcagcatcgttaggcagggttgtgtgaacttgctgacgtcggactctttttaaacggtggaaatggtaaagctatatgcatcacccagtgctgctgtgtgttggcttgattgagaacgtcttccataggcttgagtatgtgaacacccgactcccagtactgtttggggaactttatgtggtgcagccttgctggaagaagtaagccactgggatcaaagtaagctttgagattaaatagcctgtccttccttccttccacttagcgcagcctgattcatgatctctgggcttctgccatccctctggtccagaatgcttcactcatccctctggaaccataagccaaaataaactatcgatctttaaaacctgcttttaggtatggtgttttatcaaggcaatagaaaagtaatgaaaatacgtagttctagttaagtccaaatgactcctttctgtgctgttgggtgtgtgcttgggatcaaacctgggcttggtacacactggaccagttgttccaccattgagctgcacctcattcttctaagtaggttatttatagcgttcccaatgcattctatgtagaatcatctctccagaaattcaagctgtctttcagacaagagtaaatacataaaataaaatgaaacttcttataaccctatgtcatcaagcccgtaaatattttacttgaaggaaggctggtaaagggctctgtgatcatccttttatctgcttcaaaacagaaggaagagaaacatagatgtttggctcttcctatacaaagtgtggcattgtacccagacaaatcacattacaatacacaggaatattcctttatacttaaaccacagctgtgtttcagcaccatgtcctttcctcagtcagggcttttctgcaggagctatcgactaggtgtctctcagagcacagtcattgctctcttggctgtttattacttgaccttgcatgtggttttctttttacacagttttgaattacagatccaggattatggttaaacagcatgtttgaggcaaactttaatctattttcttggctgggatttgctagacagccaattggtatgttcatagatttcttcaccttggagtttgcagaactaaatgaacagggctacttcccagggtcactgtgttcttgacattgagtctttgcctgtaatagatattttcaggatattttctgacacctctgatctgtgagccatgcatgttctgggtctctctagtcccagaacaccacatcccaaacctggtcccaacttcattttactcagtgagccgccccaacgtctctgcacgccattcccaccaagagcatcatcattcatcatgtttaaggtggtgaccgagggtctcctaaacctacttcccaggtacctgtaatggcgagccatcaaatccagacttgtctgcctctcctgtcctttcatattgctctgtatcttcattcacagttgaccttgtgacttcagaccaacactttttctttcctaacctgttctcccaccatctcccacttcctagtggatctcagtgttttccagtcctatctatctttggtcccttttgtacccagtgtcaaggcttaacttccttcattgttgacctgctcttctcagttcctgtcttcagttgtccccctcctctttgacatccatgaagtcctgggatttccatgtggggagaccccaccagaacaatactctgtgtcttcattgcctgtctaggccatcatgaatgaacatctgctgccccaagggggattctcttctctgcttcagcttatgagctgcttgtgtatccccattgtgggtttatactttaacatctgcattctgcttttccttcaaggtggtagtcaggtattataatcccaagaagactgtcggaccctagtgttttggtgttctgcatataacctggtcttcacacatcactgacaacatgtggtgaaccacaatccttagggtgtgccaaatggttaaaaacccttgctgatatgtttgctggatcagttgtttatgatggtatctatcttgattttgtgtgtcatgattttaccagatgggatgcacagatgtgggctgtactgcatatagtctgttttatatgagagatagttattttcctgcttctgaaacaggggacaagttctttggtgacagaatgatgtacaccatcctttgtagccccagcactggcatctttgtaagtatcttggatgtttgacaggtaaagacattgaatgaatgagccacatgccttgtccctcttgttttgtccactgtacagtgagggactttgaccaagtgttaaccttatgctaaggacttcatgcacacaaccagaaggtgtgaggctggagcattgagtgcatgctgaaaggtcgatgtgttttggaggggttttatttgagttagttttcagcattctttctttatctctttctttccttctctacctcttctgtctcttcttacaatgagactctgtcaagggtcacgctcactttctcctgggaacagttcacacggggagcatagggctctgctgcttctcagctgcacagtcacttctgtcacttctacgatccccgagtcttctggaatgatgcacccacttgctcctttccttcccaggtaacccatgggcttggcctcgagcctcctaggatttaatcagtgggtgagtttagatgtagttagctaagtaagtggttgtttttggaagaagagaccccccttttttttccttttaaagatggattagaagcagtaagtagaagttgcaggaaagttgatttttgacggcagacaagctccaagagttggaaaatgagtttctttctcctgccaacacaaactgatctgtggtgccattctggaacagtctttgaggattctgaagccacatccagcatcagcaggaaagagcgccatagctgattagtgatgtctgtcagccgctctcagcagggagggcgcaggagctctgcctatttgaagatgaggggctaggaggcagtttgactgcagagttgatttcaaacaggtgtgtggcaattaaaacctcctagtcataggactcattgtgtcgccttagaaacaagctggctgtgaccaggtgacaggggtcagctgttattggatggcctttgtaaatcccttctctctctaaggttctaagtaaaatataaaaggctgaaaggagaaaggcggagctgttcgcatcctcctctttgggctgtgtctctactgctctaggatcccagactgtctccaaacagctgttatcctgcttcaactcccaggaaagccagctgtgctcaagtcatatcgagtccatctgtgccattggcatggatgaggaactactgctctttgtcatcagaaatgtttgtacagaatctttttaaagggttcagaaacttgacaggttaggtaagtgtagtttctattcaggtgagtttctatatatggtgaggccagtagcaaaggttcaggagtaggcgtcctgtcttacagaacccaagggctgagacacaggggtatgctcagaaattccatagggcttgggtttattggtgaagccaaactggagtagagagatggttggtgtccctggaaaaagagttacagccaagactatgtttgggggtgaggtggggcttccctatctttacttgtatccagccacattcccaacgttgcccaaagagtttctgtccagccaatgtcttactggctctaataaggagtctctacagggacacagctgctataacataataagggtggggaggagggaggcttacagtggctactgggtaatcctctaaagtgcccaatccagtgagtgtgccgccccagtagtcatatttagcattaaacgcctgaagtatttctagaagttgctggttattcaagttcatattgacagagcagagaagctagagtccgaggccagtgggcaggggcaggtataatcagtcgcttagcaaagacggctgattgtaagctaccaagtgccattagccaactccacttttcattcagacagtcaatgcatttcaaggtactgtgtccattcagggcagttaaatctacttctcctagttaaatccactcttcttctaagtgcagtcattacactggcccgcacctgcctttgtagattctctttcttgctttaacatctccagatcttaacgagaaggtttcattaacattgatctcttcaacattgatttcattgttaattttttcattgtatttcattgattatttttgtcaattcacactctatccgactgttctatgattaaaatccttaatagataaagacaggctgatggatctattcactcaatcgtgggttttacttggtttttgtagcggtttgaatatgtttggcccagggagtggtactgtttggaggtgtagccttggagtgggtgtgtcaatctgagcttgggcttccgagctgcctggaagctagtcttttcctgtttgcctttcgataaagatgtccaactcagagctccttctgcaccatgcctgcctgtacactaccatgctcctgccttaatgataatggtctgatcgtctgaaccttaagccagtcccgattaaatgttgtttttataagagttgccttggtcatggtgtctgttcacagcagtaaaacccaaactaagacaattaattgctttgtaagattcagtcattttgaaatagaataaaggaagaagaaatcacagcaaactatgaaatacaaagatgttgcaccaagctcaagaataatgtgccatggtgactggtctccattgtcactgtggaagcctagctctggcatgtgtatggggggtgttgccagagctttaactgagcagcaactgttgctggcaccatcccatgggctggggtcctgcactgactgaagaggaagaagcagcctgaataccaccattcatttttctctgcttcctggctgtggtctcttgtgacgagctgcatcctgttcctcccaacaattcatctttgccatgatggactgaaccctcagagaggaagccaaagtaaacccaccttcccttaagttggggttatcagatatttagttacaacaatgagaaaagtaattcatccaggtgctaaggactgtgtatttagaaggcagtgggggaagtttgtagcagatttctgatggcccagaagaatgcctctcctgatacacaacctgtatgaccctttcctcttaaacgcaggccagacctgtgagagtgctggggttgtggctgtccttagccataaagaggttacattagcaggccaaggtgaacggattttgcagacgtagttaagcttctcaacttgttgattctcggtcaaagggaagacgatctgacttaggataagactcttcaagtaaaatctagaaatcccttttctgaccttgaagaagcaagtcaccatgagctccacagctgcaaggaaatgaaatctgccaacaaccacatatatctggaagaggatcccaagcctcagctgagaccacagtcccataggcttgattacagcccggggagaccttggtcaggctggggccccataggaactgtgagatgatgcttacatgttgttttaagctgctgaattttgtggctatttgttatacagaattaggaagcagatgtaaccccatgcaaaggctcacaatcctaagctatctgtggctcctacaattggcacaaagcaccatgcaacgtcagaagagacagcagtcctggagaaagggaggggttggtttcacaaggacagtgacttggatttacatgctgggctttttgggcaactgtagaacaaccactgaagctgaagtccatgccactgctggcatgcatctctcacatgccttggcggtcctctgccacaagagacagaggctcgttggactcactgactcttgctcatgtctatctctgttcaaacaaaggactgtcacttactgtaatgacctccagctccattcattttcttgcaaatggcagcatttcattctaatgtataggcgagggaaataatatgcatctaaggaccacatttcctccattcttctgttggtggccatctagatcgatttcataacttggcactgtgaaaacatagcatgctctcaatatgtggagtctagatttaagtgcttgaatgtgtgtgtgtgtgtgtgtgtgtgagagtgtgtgtgtgtgcatgcacacgcatgcacacatttgtcttagggcactcttgtgaagacagacagggccctcttccagacatgatcttacttcgtttctgtgtccccattcaactctttcccctacccagtataaacccaatgtacacagatggagtggagacaggaggcctctggctgaggcctcttaccacaaggaacttggcagagctttaggatagccttctagtaagagtggatagaccaagaaaacactgtattaagttaggatttggatgaaaatcctgactgcctccatccccacttattttctccaatatcagcattattatgcctccaaagatagtcaataaattttaagtagttcaatcctatatcatccctttcaaaaactaggaactagctttttgggctattctttgcatggttgttcaagatgtttctttttcagaattaattttttttcctttaaaaaggaatcagcttagtgtatcacgtttcttgggaatttcataaaatgtgaaatgtgctcaagccaaatactcattgttgtgtggacaagtgatagcacacaggtttctggtgatatttgggctagaagacaggaaatagcaacttttctgttccatatagatgacaaagttgactcggatcagttgatgtattgatgcaaaaggtgcttggggccaaaaatgattagaccattttgtacattgtagctgtagctgagctgttacccttgcctagctatgatgaagccctgcccctccctactctgctgtgaaagcagatgtgtgggactggaagctggatctctgcagacagtggactgctcatctagtacctggtggtgagccatgggactgttctccagcctacatcccctctggccactatagacatgtggcaggaccgagtgttgacttatgagcaaggtcaccccaggtacgtgtagtgggtcaaaggggagacctagctttttaaaactgtggccaggaccccatgtggggtggcataattgcatgcaaaagttatgaaaaattgtcaacaattaaaggtttctgaacttgtgataatcaaaatttaactcaacattgaatatgccatgaatgtgaaggaggcatttctgatggcatgtgcctgtgttacgtcacgtgatgtcactgtagcctcggttccgagcacacgggtgtcactgcaccatgggcactgacatacatctgctcagtctgacactattgtttgttacgaattacaccgttcttcactgttcacagaaagttttctgctcttgagctagtgagatggttcagtggataaaagtactgttgtgtcagcctgagtttggttcctgaatctcacaatagaaagagagaaccaatgtccaaagttgtcttcagacttacatacgtgggccctgaccagagcacacatgcatgcatgctcctctgatcatgttcactctcttacacacctcttacacacacacacacatacaataaacacaattcaaagaaagatgtctacttttgtagaaacataatggttgaattatagaaagcaaaggccttaagtatttttctattattattccttactacataagtatcaaattagttatctttggattgcattatgttagagtatttgattttaataattgctgtccttgagtttcataaaattagaaccattaaatgaacgttgtcttggaatcaggacagaatctccaactttatgaaatggtctgaaacacacttctgctattttatactatgtatttgcatgaagcaatgtttcaacactgacagttattaaattaaaccattgatcaattctgaaaagtaatgaaggggctctgtatgctgaagtttttctgaaatattcagccaaggtttaattctttatgtaaaaataaataaacacattcatctcattggtattcagatttgctttagtcatcaataaatgtcaaagtaacatgtataccaaagaattattttaattatttttgacatttattgtctcagaaaatggggttgtatccctgttttacatgactacctgatgacctgacaaaaatgtctgaaggaaggcaggcttacagttctagggaatacagctcagtgagggtgtggtggtaggagcaagaggcagctggccacatttcatccaccatcaaaaaggagaaagtgatggctactggtgttcagtacactttcttcatctgtctgtatgtctatctatctatctatctatctatctatctatctatctatctatctatctatctttttgttgattctttgagagtttcccatcatgcaccccagtcccactcatctccctgtccctttgtacccaccctcttcccttgcaacctttcctgcaaaagaaaaacatatcgtgtggtagctgtagtgtgtcagtgtgtcccacagcattcccttttgttcacacttctttacttgcaaatggtcactgcaatgagtcattagtctggttcgaggcctctgacttctactacaccatcaatactggatcctcactgtgatcctctcagacatcctgttgttgccgtgggtcatggagatcctgcagctttggattacaggaccagccccttcatgtgtgccagcagttcatcaatggggtagatgttggagtgggctcactcacagccctggatcttggcctgagctggtcagaccactgactcttcccacacccacaccaccagagcaggctctccaggtctgccctggctagctcattcaatggagtacagtagctaacaaggggcagggtcagctctcctactgtcatgcccttgggactggctcaccctcacccgcagggccagttttactgtgctgcccaggtgaggtgcagggcctactccctagagtgctgcagccaaggaggagcaggaacagttcttccactctcgtgaccctggggccagctctcacgtttgtccaggtggtgaggggtgggggtggaaggagcatctcccttccatctatgctgccacacagcagacaggggcagctttccataatcacacccttgagctggctcacctacacctctaacaaccagggctaagtgaggcacagtgcctgcctgctttcttgctctcatgcttttggagccagctctcccatgatgcccagatgaggggtgaaggcatctctgcacagccctcagacatcaacttggccctgggcagcagcccaaactaggcatgttcacctggccttttgttgtaacagaccccaccccccatcccaccgatcccccactgtagcaggtccacatacccagacatggcccacagtggtagcacaggccagggccttaccgtggccttaggtggcctcattggctactcacatgaggctgttccttactacccttgagtcttctctttactgtgcactcatctttctgcttttctttctcttccatctctccaccacttacttgctcatctgtcttagtcagggtttctattcctgcacaaacatcatgaccaagaagcaagttggggaggaaagggtttattcagcttacactttccacattgttgttcatcaccaaaggaagtcagaactagaactcaagcaggtcaggaagtaggagctgatgcagaggccatggagggatgctacttactggcttgctcagcttgctttcttatagaacctaagactataagcaccactcatgatgggccctcccaccttgatcactaattgagaaaatgccttgcagtttggatctcatggagacatttcctcaactgaagctcctttctctgtggtagctccagcttgtatcaagttgacacacaaaaccagccagtacgtcatcttagtagtgccaagggcctctgggtgtctggggtcacttcaggagtggtctaggagtgctatgtcccaaccatgtcatgtggagccaagctggggttgtcttgggtgtcatctgcttgtctgggcctgcatggcacagggcaagggttgtctcaggcttgctctgccacctccacccccaggctccacggtgctgaacacacacacacacacactctctctctttcttattctgtccccacatttagtatgggtcttcccacctcaagtaaccctggatgacatgcctgacactatctctttaatgagtctagatcttgtcaagttgaaaatcaacattaagcacaaaaacttttgggatcctcagtagaaatatttaagaagcattggtctgagtcagtcatctggcctaggttagatttctgacaaatcatgtgttcttatagaaagggattgagtccaaggtctacccctgtgcccgtgactgtcctgtgtgcagagggatatgagcatgcattcttgcactctgtcatgtaacccagtgggtttcttgacagaaacaactgggtcttctctgcttgcttttggctctgcagctgtgtggtccagagtcagtcttgcactggctgttgtttcttactcagccttatactgactgacaagagtggtggccacagagcagcttcctgagccattgttctgtccccttctggtgaccatgttgtcctctcactgggtcaaatactagagtgcatttgttaagggttctcaccatgagcacaaattgtctataacatgcaggccttcatgttacattcatgttacatgggtgggggccagatagatggtggggaaagtgagaagacacttgcattgccattgtggcggggacatcctcctggctctgtgtgtgttgtgtatgaaactgagctactttctaaaatcttccctatactcagccttttgctctgtgtgctgccttagctcactatagtgtatctctctgcctgtgctgctcttgtgcggtgtggcttccccattgtatagagtatctgcatttgtcatgcctctctaaaagaaacagagtaaggagggacaggcagagggagagagagagagagagggagagagagagagagagagagagagagagagagagagagagagagagagagagagagagagagagctatggatatggaaactttgttagaatggcttacgggctgtggccctgctagatcaacagaggatttctcccagtgaaaaggccaaacacttggcagttgttaagttcaggagactggatttttcaagtcttccaacatctgatctgatgctggagtctcgaggaatgctgggcttcagtctacactagtcctgaagaaacaggttctcatattagtgaagaaatgcctgagggacaggacagacacatgtgacagacagagtgagggcaagcagcccgaaagctaaagtttcctcttcctaagcccttttatgtggcctctgccaccagaaggtgtggctctgatttaggcaatgtcttctgacttccaatgatccagatttagggtgagtcttctccactcagtagatccaattaagaagatccttcctaggtgtgcctggctgcttgggcttttgtcaagttgacagctgagattagccactgcaatacccataacgatttgtctccccgacaagttaccgccctctgtgaggactgcacccttctcttatttgcacccagaccctccatgtccaattctgagcagaacttcatatagtacctggcttatggtagactctacaatgaaggaatctcccccatggtccaggaatgtctgcgagagaacggaccctcggtacaatgctaagacagagaagtctcaaaaaatcaaagactcccgtgatagagcctgtcatatgtgaagaggcccatggcattttagtgttcttggcttgtcccttccaggccgctaaaccggagactgaaataatcgagtgatttgaaacgggctgctgggaacagtgctccgtgtttctgatcgtaagatcccaagtttctcagccttcctgttgggcactttcttctttcctgcacaaagaatgagtgcagaatgtcctcaccccctcttactgcacatccctcgcctggtggtgctgtgctggtgtcctgcctcatttctcctcttttcctttcagcctcagatagcattggaagatctaccgcatggtcctctgggcaaagagtgatctcattggctcaggggttatccaaagccagcatcatatgcaccattaaattctatgagctttctgccaattaaacttcttattttgactcttttatcagattacccttggatggttttgagtgctgaaaaggttgacatcactgtccaacttctgttcatttcagacagctggcaggagcttggtattacacacatccctacaacttgctctctgtcagtgtgctctgcagacttctggctcatcttacttctttacgcaaactccctcatgatggatttgtcttagctagacagaatggaatatctagtgcctaatagctcagtgtccctgggaggacctcagacaaatcttactaggttttgctataaagagggtgtctcctgggcatttgcacacacatgtattgcacatatagtcaagcaagcacacacaaatgcacataaataaaaataatttaaaattatgtctcttaccaagcatgttcaataaatccattttaaatagcttagactttgtaatagtttattatttatatctattgataaacagcattttcctagtgtgatttttttttctttactgacaacccctaccccctgctcttctctctcttttgattaagaactgggttgtgggcatgggtggggtaagcggttagttttctgtgtgttattctgcctcccgggatccctctgaagcagaaatggcccctcagtcaaaggtcttgcattttcacccatgacatttcaggcttacatttgcagagctcatttgaatggttaaagcaacaacagcattcttttgtgaaagagtttgttactaaagctaaatgcttacctgggaaagagacagtttcacttcatcctggtgttcaaagctcttcataatgttatcctcaccctgctggatcatcttactggcccctccgtaactgacaccagcttgctggtctgcccactgaggcttagcaagcccatgtgagacactgagaagttggttctatggtcagtaggatgtacaaaggggagcttctgccttaaaggaactgtgtagtgtacttattcaagaactcgggtaactgtgccagcctgcaaggatgcctctgggttttttcaccgaaagcatggggagtgaggactgaggactgagagggctcgggtgggagaagactggtccagactcagtgtggtgaggtcgctctagggctgaggagacagtcagttgagcaaaggaaggatgtggggctgagcagtagatgagaggagcagtggttgccagaagtctctgtctagtctctgcaagatgaggcctaagagggctggcctcgtctgacatttccagtgaggtgaagaaactcggggtgctgtcatttaaggaggcacatgggtagtattctttgaggcctgtagagtaggagctgctcctggcagcatggggtcgagatactataacttacccctgaggtttgggcagcataaagtgttatctggagacgcagtgttatctagatagccttgagagatgctctgggtctgaattggcctaggctctgggtttgggtagaccattgctgcttctgaatctcaaggattgaaggacatgggtgtggccactttggcacagggtcagcaaagccattgcccgagtcaggcacagtcagaaactgtgtgtggagctctacagtagagttgggtacaagggtgcagtctggtgaccctaacacacaaggggcacaggcagatggcagagagaagccaggagcagcgggaggacatctgaggcacaggtgcacagtgtcacctggattcacgagagtgagcagcacctgaagcccaaatcccaggctcatcccaagtcccagggcagcagctcaaaggatatttgcctcagtggaagtggagactgtggaccattaaagtctgagtgcaaggctggggaataactcagttagtgcttgccttgcaactgtgagaacatgaatgtaatctccagaatgcatgttagaaaaaagggaaagctaagcatggtcgctgcctgtaatctggaactgcaaaggcagagacaggcagatctttgggatagcagagcctaattggtgaattccaggccagcaagagaccttgtttttaaaaaagattgggatagtcagtggtgaagaacacttgctactctttgcagaggaccctgatttggttcttggtatctacatgatggctcataacttcctgtaactttagttgtagagggattcaacatctctggcctctaagaacactgacacacaaacacacacacacacacacacacacacacacacacacacacaattttttaaataaatatttttatatgaaagggtattttttatattattttcctacataacatcttaatgtatacaccattttgctttgtctcagctggtaaataagacataaagcgaaatttctttgatactcagaatcaagagcagtcatctgtcttttagaggattccctttcttatgacgtctatattagtgtctgtgcaggtaccagcgatgctttgtagtgaagaacaccttaccaagttgttctatcatgagtcctggctcacattgtttcctcttttcttttaacttggtgttcagcacttattcatgtatttcttcattattatgcaaaagatctggttgagggatgggtttggtgtgtttgaatgggatgtcctcagaagagtggtagtacattaatgtcctggcattggatgtcaaagtgagctctactttgcagttgtagtcatctggaaaagaaggatatgtagatttgtgacacactgtagataaattttcattttggaatggaaataagtgcttccagatagttctgtttgatatcacccattttactgctgctgccatgatccatgggcctaccatcttgtttctaaagtaaatcttatataaattttaaaaaatatataaaacatctgtgatgcattacgtgaactacctgaggttgttctctggcctttacatgtagtgtacacaggtacacataaaaatgcacatttgaattgtgctggtttgttttaactgtcaacttgatgcaacctataatcacaaggaaaagaatcttaaagaggaattatctagatttagtggtctctgggcatgcataggagggtaggagttgttttgtttgttaactcttataggaagacccagcctactgtgggtggcaccatgccctaggcaaggggtcctgagtatgtgaagaagaagttagttgagagcaaacacggatccatgcatttctttcctctctgctcttggttgtggatgtggtactttaaattcctgccttgtcttccctggcctataacctggagttgtaagacaaataaacacgttaatctctaatttcttgctttttatcaagatattttatcacaggaaccgaaatgaaactagaatacatggcgcacgcacacacacacacacacacacacacacacacacacacacacacctttcagggaaactgtttaggactaacagcctgagtttaataccaggagctaaacatcctcaatgcaatttgctcataggtaaaccagggactaggaagcatctctttcataggctagggtgggattaaatggcagaagcatgtgtgatgtgtgtggtcttgtcatagcacacagtgagatctctgaaggcgcttgctttgctattggcatgacaggaaagaagggacaggagaggaccgaggaggctctggccagcacaaagatgccagtctgcttgccttaggtgctggctgagtgagtgctctccacagggcacatagccagagtagcttccctctacaaacacttgtcttcaaagaggaatttagccatggctctgtaagtgacatggagcagaagggactcaattaaactaatgccagggttgggacttccaagtgaggcctggaagctgtgcacttgctgtgtgactaccctggggttactggtttctgagtactgtgttgttatagctcaggtctagtcatgacatgaatgcatttgagttggagacaataacatcttgcttatttggaattaattgtttcctgtcatcaaattgactgcaaagcttcctctatggaaactgttctcagcttgccgactgaggtggtaaaccaggtttggtaccgggtctctgctttgccagccccctagtttacatggaattggctaggaacgttcttctctggtctttaccagtagtaatcctaggcaagtatgttttttttaaatatttttttttattacatattttccttaattacatttccaatgctatcctaaaagtcccccatacccttcccccaactcccctacccacccactcccactttttggccctggcgttcccctgtactggggcatataaagtttgcgtgtccaatgggcctctctttccagtgatggccgaccaggccatcttttgatacatatgcagctagggtcaagagctccggggtactggttagttcataatgttgttgcacctacagggttgcagatctctttagctccttggatactttgtctagctcctccattgggggccctgtgatccatccaatagctgactgtgagcatccacttctgtgtttgctaggccctggcatagtctcacaagagacagctatattagggtccttccagcaaacagttgctagtgtatgcaatggtgtcatcatttaaaggctaattatgggatggatccctggatatggcagtctctagatggtccatccttttgtctcagctccaaactttgtcaaatctaactacttgtataaactcttccttaggaccaaagagggaggctgaaggaagggcccatctgttttttcacttcatagctagcagggtctgaggggtgatccagaggttctgcatggcaagaacacaggcagttgggacacacttcctaggctggcaatcctggccctagtacaaatgcccaataaatattcccttttccccttagttcagctgaaacaccatgatttgtcaagtggaactttttctagaaataacaataaaaaggaaagaaaaacaaagtggaaaaaaaaaaagcaaactcggagggctccagtgcagagcttgattggagggctccagtacagagcttgatgagtgtccaaatctgacttaagctgaggcagctgtgggctcccccaagcggactactcaatctcctgtggcttacaaccttggtttctgttcttgctgcctggctacagagtgatcagggtttcaggtatagcatctggaatacagctttgaggatctcctgtctttacttcaaaggagacacctctgcccctccatcgcatcttcacttctgggtgaaaatgtcttatagaaaggttacttctcacgttgttgacagaatctccaataattcacgtttgctgttgagcaaggaccccagctcccatggcttcttgacacctacatgtcactgttgctctgggtctccctgttgccacacttggccacctcttggtggttttccatgctggtctatgtaagcaagggatcagtgaaaccataaaactagaccactctgtggatagaaagaaacattaggggaacaaacttccaggctgcctttgagactagagggcagcaatttttcgggaaaggaagcagattgtatatcatagtcagtggaatgtgggtcttggagccgatacaggttgtttaaattaatcaggatctagatgccctcgcctgaggtagctggaaggaaggtcaggggagcagtggctttcctgcaaaacagaaagcctgtcttatgagatctgctgtcctggtaaacagaaatgaggtaggggtttcccaaggagtgctggatttaggcttccttttacccaatcttttaagtcctttcaaatgatccttctgtttacatttagagtccttctgtttaggacattgtcaccaacactgccatttgggggacccgctttggacctaacaatctctaacagtgatcttgcccctgactgtaagtacatcatcagcctagactacgcaggagttagtggagaccatacagggaacctggactttgcctggacctggtgacaatgaggatatctttgacttctggatgacatggcaacagaggagaccagaggactattagaacacttactattgagcagctaaagtaagatgacagtgtataaggatgagatagccgcgtagaagccattcatagcaattgtaaacacacaccaaataacagaaccaccagacgtgttgggcagaaactgctagagccaaagagagagacagagaaaggttggttagttatgtctgctatgtctggagatttcaatataccactttcacaacccacagaacagctggaaagaaaacctcagtaacatctcaccaggagcttgatagaatatgtcacccaacaacagcagactgtatgccattgtattcaaattatcttttctttattatggctattcttagcatatgaaacaatgggtttcattactgcatccccacttatgtagactatactccattcttaactgctcctccatcgcctgctttttctttcccccgggaccctcataccttttttcttacctcaagtaatcttccctctgtcttcatgtgtcttgtctctctgtctcttgcatcaaacctacatttcacacatgagagacagtgtgatatttgtctctctgaccctggtttatttcacttaatacatcgactcccactttcacccatttccctgcaaataactcattttttttcattctttttgatggcagaataggtctatacccaccagttttttttatcccatctgttgaatgcatgtagaccaaacctgtgtcttgactactgtgagcagtgtcgcagtgaacttgaatgcacagatctttgaggtgcatgcacaattagatccccgagggaatacacttaggagtgatgtagctggatcagatggtagttctgttgccaggtttgtgttgtttcattttctgctacattcactttgctgttgtctgcattaaatacattcacggcagcagtgtttaagagttcataatacaatcgggccatggtggcccacgccttatcccagcactcaagaggcagaggcagatgaatctctgagatggaggccagcctggcctctagatctgaatctcaaaattgaggtctacagagtgagtttcaggacatccagggacacttagagctaccctgtcttgaaaaacaaacaaacaaacaaacaaacaataaaaactcaaaacaaataaacaaagccaaaaagcattcagaatagatttttccccaaagccccccccccaaaaaaaaaaaacatacaaagacttactgagccagtacagatctcaataaatttacaagaaccaatcccacactggaatgtgccttttactctagcacttgcaaagatgaggcagcagggtcattcgtttgaggatagcttggtctatatagtgagttccaagccaacctgagctacataatgagacattgccttgagaaggcataccattcagagtatctgatctctacccataatagatcaaactagagtccaatagctgggaggtaataggaaaatctccccaatcatttggaaagtaagcaatatcttcctaaatgattcatcggtcagacattctcaaaatgaagtttaaaagcatcaaagaaaaagaggtataagaaaactgtaacatgaaagctcgtggcatgcaataaagtcagacctggtgaggacatggggcaaaggaagatagaaacaatctaaaatgattagcctcagttcctggagaaagatgaaccaagtgaatctaaaataaacacaaggaaaagccacgctcagaatcgaggccgctgatactgagagcaatggcaaaaagaaaaccagtgaaatgggaattttgctgttccaaaccagcagttaaaagctgtagtaagaattacagctgtagtttgaaatagagtttctaatgctggtaaggaaatgggggttatgcctatagaagctttagacatcaaatgagtaccacagtcaatacaatgaataactcataggatttgatgacttcagtgatggttaagcaaatggtggcccatggtggcatatccatctatgaaaaagggaagagctgtcggcatgcttagcttagatggctcacatgggctaagggtgtaaaatgtcatttcctagtggtcatatgttgtaagagaccgtttatgtgatgttctcagaacaacagcactatacagatgaaagccgtggattagagaggcacgtggttatggggtgacctgaggtggggttttgtatgacggattgattctccatattttagttttgtttacttatttgcttttttgtattcttttaacaaaagtatttaacattttaattgggaagacatgcatgaagttaaaagaaaaaacaatctgcattatgtgtgtaatcttaaatactagcagggaaataatgcttacatagaataataactgtatttcacagacaaaaacatcccaatctactataatatgcataaaactctggaatcctttgatttgggctgtttttctccagtaattttaattttttaattcactttacatccccatcacagccccctccctcctctccttccactcccatccatacaaatcccttgatttgttttttgagacaagctcttactatgtagcccttaccagctttgtgctcgctacatagacaagaagagcctcaacctcagagatctgtttctgccttccaagtgtgaaattaaaggtctgcacaatcacacctgtctaaaataatattttgattttaattatgtgctcatatatgtgcctgagtgtgggtttgtgcatgagtgcaggtgcccctggagtccagaagagggcatccaatctcatggggctagaggtacaagtgaaaaaccctgccctggtcctctgtaagagtgatgtttattcttaaccatgcctggtacctgtgggtgccagaagatggcatcagatcccctagaattagagctacagatggtggtgagttgtcatgtgggtgctgagatggagccctggtcctctagggcagcaggcagggttcttaacagatgagccatgtcttctgctctgtcacatcacactgctatgtcatggtctctgtgtttctatgatcagtagacactgactaccaccacacttccataaaacattctagttactctgcgtccctcctcagcacccacaatctgtgtgaactgcattaaaaatctgttgtatgaaatgctggcatgccgaggtctgctggcgtttagtgcattctgcactcacggcaccattgtgtgctttagagtcagagatgagtggaatccagactggtgagcacctgaggaaggtggggcaggatgtgataagaaatctgtgttgtgactgtgcctaagcaattcacagagactggagacagtgattgtctatggaggttcagaggtcaaaaccagggcttgtgggtagaaagaattcagactgactccaacgatcctgactccacgtaagggaatccctatctctgtccagatcagaaagaggcctggcttttctctggttcatgtgggcctggcgtggtgagtggagacttgtgatatttgtctgggtctggagttggggggcagctgagtggctgaagtggggcctctagaggacctttccatggtggacaacaaaaatgatggttaggccaacatgaggaaagcctagccccaggtagatcagacctaacaaataacttaaaatgagctagttttctattatgtcgtttttctatctatttaatcttaagaaaattaaactgaacaagatgacttgcattgtaaaatatacgttccagggaattaagtaagccatggggattttagggtggtgggttttcgtgaagtctctcaggatgaaaagtggtgttagatcatagtaggtgcctcctcagagaggccaggctctgatgtggccataggggtgaagccttgaacatctgggagaggccccgaggatccagtgggttcccggctacccctggcttcaggttgcctgcatttaaatcataacccctttcattatgttgttccagcaaatgtgctttctgcagatcaaagcaggttccttgatgacacttgtcaaaactgtgggtgtggggtggcgtgggcgggaagcattcagcagctttgtagggccattcccagggtattcccacgttggcttgcttgcctgtcgggattcaggacagcctggtgcagttgccttccccattttttggaatgagttgagaacataggctaacttgtagaataaatgcctcatggacaaacgctgggtgcttttgccacgggcatcatcatggctggaagttggggctactggacctggagctttcatagacagtttagagatgtgcctgaggagaaggggtttggggtatgaaatgcacatcggagcttagctgtgtgggacttgcttgtggagggaaggcggtgtgtgtgtgtgtgtgtgtgtgtgtgtgtgtgtggtcatttgactctgctgctctccccctgctcatgtatcactattcttcttcaaaggtgcccatggctgaagcaggcacagggaacagtgcaacagtgcacagaagatacagggggagaaaggagagtcaggaaagcaaggaaaggaaggctcccaagctggaaagcacatttgaaggcaggagctgtaagggggcagccacgtagctgtcccacctgacacccccattccaggtctcagcacagccatccatttgtacccagtaggcctctgctttcgtcccaggctcacttctcagcaacaggacgtacgacaggtcccgctcttcttccgttcctgttaatgaatcatggctatgtattcttgaagggacttgaaagttttgttacaaaaatcagaggcaaaatatagacatgtgtctttactcattcccaataaagtgggaagtgagtgaggtggtcagtcagttgtgggctgcatcctgatggattatggggagttgttccactgttggcactatgggtgtatggtttcctaaagccctttaaagtctaacctttttaaaagttggaattaaatcctatagccatttagaggggcaggattggaactgaatcctaaaactgaactgaatgaagtctctaggttatctgtgttagaattctgagaaagtcatgcttttcctaaaatgcctcaggatcccctggtgatgatattccactcttgagaagagccttctgcttgtgtcttatcctgaggcagaggcaggagagctgggccagcatctgaaggctctgtgcaagcattcacccttgccagtccggtccccacatcaaagctcattcgcagatgggaatttggatcccattgggtaacactggaattaaaaggccagcataccttggtagggctatttataatgagggtggctttaatgggtttcccacaggtctttgtagtgagggctgtccttgtctttcacaaagctacgtcctgtggaaatgggctgggtctgaactagagccagatgggaagctgagtgcaccagggtttctgtggttcagtgcccttcactgcccagtgccaggggaggttagagatgtctctctgtctctgacaaacccagatcctcactatttatatcaggaataaggaaactaccattatatctagtaattttctagaaaaattataactttgaaatgctattggtccctaaaaatacaaaaaaaaaaaaaaaaaaaaaagcaggctgtttcactgagtatctgggccaggttgtatggttttagtcttttatttgctggacacacacacagacattcacatacatacatatacatacacacacacacacaccttcacatacacacatacacatgtacacacattcacaaacacacattctctcttacaaatacatgtaatacacagcttaggatattttaaataacatatattttgtgcatatcttcacattatttatgtgtatatgtcatgtgtatacacacccatatatactgctttctgaatgttcactctttgtattgcttccaaatcaacttgctgacaagggggcatgctggaaaaaagctttgttttattttttctactttcgaaagctagacactgaaacctctaagaaaaaaaaggcagagtgtgtgcacacacatatgtgtgggtttaagcatacacatgtgcacgtgtggacacccaggagtcgacactggcggtcttcctctatcactctccacttctgcttttgagacctgggtttagtacaccttagctttctgatttgattgctctggctggcctgggattccctaggatcttcctgtctcttcgccctcagtgatgctgaggtgacacatgctcccgtgtccagctttcacacggatgctggagatctgaagtcaagtcatcaccctgtgtgtgtaacaggcacttgacccacggcgctgtctctccagctcctagagcacaaattcttaaaacttgagatctctgcatcctttgtaaaagggatgaagatgtaaaggttctgttggttttataagtttctgaattataagggggcaccagtgtcaaaacaagacaaggcctctcacatctagcatatgtggaagctcaaatgtaagagggagtgtttgcgtgtcataggatggctaattttccatgtcagcttgcttggactggtatggctcagcagttctctgagtgctaccatgaagttactgttttgatgtgattaacagtgagcagattgccctctctagtgggtgaggctgattttggcaatgccagtagtagttttgcaatgtttagccagccctcaggttaagtatgttggatttttgttttctgagtctctaatacaatagtcattggccctggtttcagctcttttcagggtcatcagcccacctgcctgtccttcagatagccatgcgagcctccataattgtgtgagccgatcccttaaattatacatatacgttatacatactttatgtcaggtacgtatgtacttcacgcaccctccctgttggttcagctttcaaggataccaccatcaacacacttcctttttaaagtagctcactgatggcgatctctctgaccaagaaattaaattatgtgttgttttccttaaagcctgactggatcctatagctcagaagaaattttaatctgcctggaataaaccaaaaagtttattttaggttaggaatttgcgcctgaatttgatttttagattattatacaaagcggccgggttcttcagggccttttcatgtggatgttgttttgtttcttctgttccccttctctcacctccctggcctctcttcctccctcagtatctcctttctatctttcatgtttcctgtgctctttcaccctctctatcccctttcttaagcctctttctctacccccaccatggtctactttctaatttcctgacctttacccacacatcatgtacaaaagactaataactggaagctaaggtctgcatcccagagaaaacatgaaacatttatctattcctttgccttgatatggtttccagaacaagattggcttgtgtgcctcatcttcagtatctgtacatcagtgtacttgtaggctgtaaatagagtagctattaacatggctgtgcaggtgtttctgtgataggattgcatctctgtgatgtagtttgccgctgagcatggcggctgtacaactttagtcccagccccttgggaggctgaggtaggtggatctttgtgagtgccaagccagtcaaggcttcatagtgaaacccgttctcgagagagagagaaaaaaaatgaagtctagtacagctaagtcataaagcacttctatttttagatatttaaagtgtctaccattcttagccatcaggcaaactaaaactacagtgagattccatctcacctcagtcaaatggctgtcatcaggaagccaaagggcagccaaggctgacgagcatatgggagagagaaacccttatttgctgttgccgaggctgtgggaatcaaatggagagatctccataaagaaaatgaaacttttcagatgctacataggttttgaagcctgggcaacctggtacgcagggatctgcgttggggtcacagaaggcagtgtgttggttcaagctgaggtccctgtgagtaccagggcgagacacccagtgtgatgacagacttgagagccttcaagccagttcatttcaccctttgaatgagcatttgaaatagctccacatcttcaaagtgtttatggggaaagatcctgcttcttcacgtctctcctgcgccggaagccggggatcgtgtgtctacaacctagagtggggtggagagggaaatggggcaccactgcagcaagttaagtcttcaaacaaaacacataaaatggttttacagtcttttataggcttctggcgcacagtaggtgtttgctaaacatggcctacaaaaactagatccttgggcagctcagcagcatctttacctagagaacaggtgcaggtgcaggtgaggctgaagacaggggacacaaaggatgctggtggagaagccaccagcttgaagccaggcaaggtaccagacagctcctctcacagctcagcctccatggctgagacaccttcctccacccacgggctgttaacaagggggcccagatgctcgcagctcactacctgtcaactttcctttttacttgttgtttgttccccggttaattgcctctgctctgtgggtaatgctttattagttggggccaaagcccaggccttctctggacctgatgaatcaggctgcgtctccaggtggctttcggtgtgaggtgcctggcccctgagtcaccagccagtccagtagttgcagacgcacacagcaaccagctcccgagtgcctctggacttggcaggagtttgggtgtactggaaaggtggccacaggctggacagagctgaagagaaccgagaagggtggtagaccaggcggtgtgtcttggaggaaacctgaaaggcaggtgagtgtgagcaagctggggcttggctgccatgagccggactcctgcctcaaggagtctctcacgcccgcctcctcccctcttaatgtcctagtattttgcctgagcagacaaatggcttgtagccaccttgatatttttaagcagagagttttcaaaagtgatgtaacttttaaaaatgtggacaaaggacagctttctttcagaagttgggatttcttagattaaaattctagatgtattaaagctctaacaccgctttcttatttctgcgactcggcttctggtactacgtcccggcagttggttaggactgcaagggacgatgctcaccgctcaccacactgcagtcagtagacaatgatacttgtgttctgacttcaagactcagctttcacagtttctgtatgtcctccatcctgtctcctctcctctctctactcctcttttctctgttccccctaagcccccaggctttaacttttggtcaacaaaagttcattttgtgtccagtgaaccaggacttgggcattcggtaacaaataagccaggcatgcccctgctgcatggaactttccatctgggccaaggcgacagacgaggagctgacaaaggctagaagggataatggcgggtggtgtaactgccatgcagaaaattttgaggcagggtgtgggatggaggccgtgaggtcggcaggagctcttttctgtggggccaccactctgggaaatggcagtctaccaaaggaagggagggggctggaactgcagatccatcccaaatgtgggcaaggctgggctagggggccagaagcagccctcctgctcctcagcggcaaggagactgtgataacatattagctcagagatggttatcggatggtattttaattagtctctgtacctgtaatttttcataccttgcctgtatttaatgcctcattagctcccaactgactaccccttcctactcttctttctttctcttcacaaaccgtcccccttctgagggagtatttttaacttttggaaattccgtcttcatccctgtgtgtacatatgtgtttctgatgtatcctgggagagccccttctcctggatcaagctttgttttttgaccactggaagcctgggctctgcccagtttagttgacaaagggtgcagaagggatcctaagtgtttgctctaagtcttagtgagcatggatggttgaatcttcaactctttgacttatggagctgggctaacatcttacatgccatttttgaaagtactcggttaaagataagctaacctcttgtaagcagcagcagggggaggggggatgcctgtgaaaaccccctttctggaaaggaccccccatgtgaaacataatcactatcttttagacacaattattggggaatccttctgaacctgtcagtatgtttgggaggcttcctcgtggaagggtaaataaagctacagagggagcttgaggttgcagctcacctcggatgtttctgctgtccctgtgttcagtgttggtctatcagtgatggctcccactctaggaggcacctgctacacaggcatgtcatgacactttggctgcagtctccacattcttaatcttctgctccattacaatagtcgctgacatttgccactcagaattttgatatttcatttgtgctttgaacacatctgtggaagtgggctgcttccagctttgcggctctgcggctctgtggctctgcgaggcggggcatcccagaagcatagtggtttcgcagatgttggactattgttttttccctagacaatggcattcttgaaatgatccgggaggttcattctgttctgcatctgatcccaggaaggacactcgggtggcgggtggaatggccattaaggatgattcaagaacgtctgctgcacgatgaggcatgaagatggtctggacttggactttggaatcacaggtccatgtaggtggatgtggtgtttgcttgtgtatcagtgttcccactctacacacaatgtgtttttgtacaatacttataggtgtgatgagtgggcccaagatattatgacaaaacatacaatcaatctggaatgtgctccctgcttctccccgagcctttgatggtggccagtgcggttggggtagaacccaaagggagaaatggttgtactgtaccatagctttagcaatgtggactctgcataaagtacccgtgttcttcctgcctctcagagctgagtgtgatggaatggatccctctctgctctcctacctgcaggggcaggttggtagctggtgtcaataacacagagtgggtgacatctccctggagacaccaatccaatggggcctgggtaagaagagaccaaagccttggcagtagccagagtgggctgtttatatgtaaagcctaaggcttttatgaggctagaaagcctgacctccaaccctccaacccccaacctcccaccccaccccagaaccaccaccattgtttcagacttccaacatcatccaacacctgtgactgacagattccctacaaattcgggctttgtttctcttttggggaggtatattagccattaatttaaaacatctcattttgaacgtagcacaaggagtttaggtgtttatttcctcaaatcccaaggcaaagagaggaggaacaaaggaaggaggaatccagatttcctgaggaaaatttaggaagccaggaggcagagtccaagggcactggtggttggctgattttccagccttctatggcattaccccagtcactttgtcagttctggaaggcacttggttggagcctcccggaagccagcagtctgagctgggtcagggagagaattaaggtggaggagtgcaatttgctttggtgagagtttaaaacaaaacaagtttgttcactgactcagcaaacatcagcgtaaattgatttcttgggcacccttcttctgctgggaaaaacccttgaactgattcgcaggggagaagatatttgttatggtgggtggttttgtggcgtatcccttctgtcaagtggaacttgatatgttgaagcatgggtggtaattatttgcaaacttaactgttaaaatgatggcatgagcagacacaggcaaaaccatcactatggttaagattaatgaaggctcccatcacccacaaaacatttcctactgcacccttatagtcaaatttgtccccagtgtcacccactccttccctaggcaccatacaatctctgtgaccacacgttagcttgtatttgtagaagtgtagtgtaaaccaatcacataggatatattttactctctgacatttttcaggagacttttaaaaacacttcattaccattgtgagctattgttcattctcttttgatgctgttgctgcataggctctggactctccccaaacaccaatgtgtccagcacatgaccaatgcctgtagtacattaagaaatggtgcagtctttaggaggtggggcctgggagaaaagagttaggtcactggggtatgagccccaaagggaatatcagaaccacagcccctttctgaactcttacactgcaatccgtgatattgccataggcccaaagtagcaaggctaaataaatactgacaccctgagccaaaacctatctttctgttatgttgtctttctcagatagtttgttgaagtactgaaaaattgagtaacagaagagcagattccatcgcctagacataccatagtttttatccactcacatcttgatggaatgtgtttatgtcttcagttttgtgttatgaagaataagtcattcttggggttggagagatggctcagaagttaagagcactcactggttgttcttccagaggtcctgagttcaattccaagcaacaacatcactacatgatggctcacaaccatatataatgagaactggtctccccttctgatgtgtaggcatacatgtagggagaacattgtatacataataaataaataaatcttttaaaatgaataaataactcttaatatttattaagctattttgggcattttgtacaagtatttgtaaggacacagatttcactgtgggaaatatctaagagggaaaggttggatcatgaattaaggggtaattattttaaatttttatttgtttatttatgtttattattatgtgtgtgctcaggctcctgtgcgtgggcagatgtgcatcatatcctgcatgtggaggtcagagcagcttggtggagttggtgctctccttccaccatttacacaggttctaggcattgaactcagtccacaaggcttgtccagcagtgtctttacctgtggtgccatctgccatccctgtgttttgtttagctttgtttattcccacagtagctgtgctattttagctccacagtgacatctgctaacacccttccactatgtcgagtggttagtcgatctcagccattctgccagaagagcagtgtggtatccttggactttgggttacatttgcccgaggatgtgtgtgcttgaaccatccctccatgtctttacctgccagatgcctgctcatgcacttacttagccactttagaaatggaactgtgtttctttcaggattgttttgtatcattgttgttgttgttaagttttgagagcttgtgtaagttccttttctccttgatataacttaaggaaggagggagggaagcaaggagggagggaaggatggagggagggaagcaaggatggagggaaggaagggaggagggagggaaggaaagaagaggagggagggaaggaagggnnnnnnnnnnnnnnnnnnnnnnnnnnnnnnnnnnnnnnnnnnnnnnnnnnnnnnnnnnnnnnnnnnnnnnnnnnnnnagttagcactgggcttgtcacccaccccttaggttgattgcatctgtgttcagcagaggcaccagcctgtgtttcctctttattctttgaatattttgtatttgattgtggtcattcttgtcctgttggatgagtagagaaatatgttatttccctttcagctgcctaggagagtttgtgtagaatttgtatttttatttttcacccttgagtatttgatggaacttaccagtacagacactctgcttggcctagctttcattttctagaaaatacttagctatgttttgtttctttaatgactattggcccagctgggctccctatgtagctggagggagtatttattactttatatcttcctgaggaatttgtggattttgtctgaggcattcagtacatagactgaaaatgtcaccgagtggatattttcttctgtttttgagcctgctccatgggaagtgtcgtccatccatttctgacagttacacttggtctcttatctctttttattctgggtatgactagagatgttttcattttgttgactttgccaaattacaagattttttttatcattttcctttttaatcattctttttctgtttactctagattagtggtcctcagccttcctcatgctgtgagccgttactacagctcctcatgctgtggtgacctccaaccataacattaatttcattgttacttcataactgaaatgttgctatggtcatgaattgtaacgtacatatccgatgggcaggacatctgatgtgtcccccaaaggaggctgcagcccacagcttgagaaccactgctctagacttaacctgcttttcttttcctagattttttttttaaaaattacttttatatttatatgtatgtattttctttgtgtggtttttgcccacctgtgtgtcatgccacagtttcctgggaacagtttccatcacacgatggttgtgagccatcatgtgggtgttgggaatcacacctgggttctctggaagagcagccattgcttttaaaccactgagccatctctccagccccacccgagtgctcctaaagaaagaactgtagtcagaaatttgatgcctttgtgtgtgtgtgtgtgtgtgaagcccaacctacagtgcagggacatccccatctccatgctgcctcccgtgtcatccttgaaatgtattgagaatatttcccgtgagttagggtccaatctgtctttgagtacttgagcagttctttgcatgttctgttgtaaaagtctaaaatgtcagttaggtcagggtggcaggctcctctaactacttgctggttgtctgtccatgtgtcctataattaccccgaaagcagtggtgataatcggaagggtctctatttctcttctgggtctatgcttgttattgttgcttgtactttttcctctttcataatgctaggcctggtgagatggctcagtagggaaaggctcttgccatcaagcctgacaatatcagttcctggaacccatctggcaagaagaagagaagcaactcccacaaatggtcctctccttctgcgttatggcgtcccctcacacaaataaataacctctcacactttagaaaggaatttcttctctttcattcttttaacttttgcttccctcttatatggaagccttctttcctcggagagtcacaggacctcaagatttaggtccaatgtgacattaagttggcacctttgggttgttgggctttcctgtaactagcgatgcagtcactttgctgtcatgtgttccgtctgtacttcctgtctcccttttcttttttgccaatagtgtgaatgtgcaggattttgtttggtctcttgttgttgtttgctcctggttgcttttggtgactggttactggtttctagtgtgagtcattctttagcttatcacagactgagtgattttatatcacttcttgtacagtgtaagacattttattccactcttatttctgtgcctgacatcataccttgaactgcacacaacattgcaatttatatgtttaagaagtccattacttttgaacaatgttcaaatactaatttaaacttgttttgagtattggcccacatatgatgacttttaccttgaagtttaccttgtttgtctaaaaaagtcctggttctactttccaaacaaaccttacgcggtataaaaattggggttgatgggctgttgagatggctaaacagacaaaggtgcttgtcactaagcctgatgatcagagggcatctctggaacccacttagtagaaggaaggacccaattgtcttctgaccaccatacacatgcatgtgtggacctatgattacctcttcttaccatttcagtaagtgtaaacaaaagtttacactgggttggttgacacattggtcttttgtgtgtgcagatgtgtgcctggccattttctttacctaccatttaaatagtacttttcctggccttaggtatatcctataccaatggctaccctcctgaaaagaagggtcttccagttttttgagttctttcttgaggtagctctctcctattatttatgctttataaatcctcttcttggttctcccaggtctcaacgtgggattctagtgagtctggcaggttctgccctccctgtaccatggcatgggggtcttctcaagacagaaacatcggctacatgaaggctcactgcctttttctctcatctttctggagaagcatctgctgttgtttgaagtccaaagttcaaaagagctgttatatttagtctagattttgaatgtctctggcagaaggggaaatttgatcctggttctctcttgtccagaagtagaaggcttgcaaacactgtatttaaatatactgacagtgtgcagtgactcacaaaagatgattaaactgtttggactaacaaataattctatttctgggaagtgtctagaataattgtaaaaaggaaaaaatgctacatgccaaaacaacaaacaaaaaaccaatacctcccccccccaaacaaagtaactaacaaacaaacaaaaccaaaaaataaaaaaatctgtatagcattatttgtatctgagaattaggaaaaatttgtttaacaataggacagtagttatcatatgcttataggataatttccaagattttcaatattcaaaaagcttagtatttgataataagactgttaaaggcacattcatggttccatagcatatcataatcacagcatcataacaacaaacatcctcaggacaaaggcttaagtagtgctttctccactttcatgggttctgtacctatggatgcaactgactgtaaagaaaaagattagtaattgtcaccttgccaagcatgtatgagcctttctcttgccactgtttttttgaactactgagcggaaccatctgtacttagaagctattataagtcatggggaggatttgaagtatatggggagatgtatctgtaatctatatttatattcaaatgctgtgctttttcttttctctctctcttctctctctctctctctctctctctctctctctctctctgtatgaagaacttggtgtcttacagaggtcctaggatgggtctctgacaatatggagagataaatgtccacaaatgatctagattttcaaagaggccaaatcaagcatcctcttctcactgtaaagtgccacagagaagtagagttgaatacttctatcatgcactcaacaatagattcatcagactggcaagatggcccaggataacgatgtttgacaccaagactgctaatctgagttccatccctgggacccacaaggtggaaacagagacctgatgactcccacagtttccctctgacctctacttgcatgctgtggcatgtgcttggccagacacaaacatatacaataaattaaattgaagactagattgatcattgccttagaatctatcagtttgaagatacgttgactcattttaatctgttacaaaacactacagatgtgtaaagaagtaaggagaataatagagacctgtggatacactgttgcccttaagaggtcaggagtagccatagagttgaagatttccagctgcagcattctactgttgcagagttctttccccagacaaaacaaactattgtaactactatatagtctttaaatcctataccatactttctctgtttccaaacttgtaatgaaaacttgtgttctatgtgtctttctgtggcttggtggtgtcactcagcatcatatttgacaggcatcctctgtgcttttgtttacgtggcatctctgggtgcacttagtaccatcatccattctcctgatagagagctacattgccttatcttttactattgcagggatgctaaatctgtctcctttttgtgtatgagcaggcatgtacgtgcacacacatacttctttaagttacagtatctgagaaaatcttgaggttgtagggtcggtcattgcgttctatggaattagagtttgtaatgtctggttttaccattctctgatagaaattcttctaggttcactttcaaaatgtccccgtaggattattaaaaagcaccatgaactgtgtggttttcagatgctcttgtgacacttaagtgagagtctggaatcttcctgatttatctacacagcgatgctgtggtcacttagtacttgggctgtctctttggggtttgatgtcaatctggacatttcgtgtgtatcacaacgtctaatggatctcttgaaatttgcctgaaagttgtccacttttgtctgaagtcctcagctacatccctgctgcatggcatgactttctgcctatgctctgttcactcccatacacttgccttctctggcaggatctctgttgtcaccatgtttctatgtaaggaactgtatcacctggctgtccccagctcagtcacctttgccactctctcctgttgtaaggcatggtcttcacctgctagcctcaccagattctgactgtccttcctggcaacatgacctcttccttgatggtttctccaaatgagatttttctggggctcttgtatattttcaggaagagtaatatcacagggttacgtggtttcaaatccttctagctgttgaggatctcataagaccacctcccagtctatgcccagcagtgctgcttatcattcagagaaagagtctccaggcttaaagaaggaagaggaagagcaatgtccagccacatcattccttcctctctgggaagggagcttttgaacctggccccactgactctgccctcacctctctggctagcagtccacctctggtatgtgattatcatttattgatcggatatcattcatctgctgctctgctgatacttacacaccttttagaacacaaactcagtgtgactgtaaaacttcagaggatactctgtgctcctgagttgcatccattgtggttaccctcagtgactccttctaactagagagaacatgagaaaatgaagcagcaggtcttgagaccacagcctagccttcctttgaccaagtagaggactgttaggactctgcgggggcccatccccaggtctaggaagtggcctgtggaagagagtgacttggagggattggctttgtattatgctgtcccacagcctgaactacagcatattaatggcctactcatgtgtagttgagcctcaacctctccctatcgcatgtgtgcaaggcaaagagtgccgtacgaagtctgttctttctggaccacacagccaactttttcatcaatttatgagtctgcattttgggaagtggtctatcccagtcacccagactgtgtgtcacatcgtgttgcctagctgactcagcattaaaagagaggccatgcctgcttgcttgttctccattcacaagctctgcctgctgctgctcttgccttacaggctagcaaacatgtaagagcccagagtttactttggggtcaaggtttgttcccccaaaagatctaagtgcaagctctggaattctaagaaaggacgcatgcagtatccactgatggaaagcaggtagacagggagccatctgcttccccgtggcttggctttgagatttcaagagacaaaactgtgtgcccttctttcatgtgatttcactgtggccctccagaagtgttgccacagcatctctttgtctttctcacagaaaaggaattgagacaacagagattcatccacacatgtactgatcctctgatgctccttcaggaagaagcagtagcaggcttattggctcgagagtccaggcttggaccccttccccgacctgccttctgcaccttcttaatgcaaggggtccaactggtgctctgtccatctggccaaggtgtgctgcccaatgggcctagcagagaacctggcactccacaagaactgggactcctcttgtgagtgagtgggtatgccagtcctcagaaaagctacaagtgtgggcaaaatggagggccatcccccccttactgtgctgaaaagacagagaggcccaggagaaggctagacttccaactggagcttctatcatagttgtgtgtgtgtgaacagctggggcttcatgtttgactttaggaacacatttagctgtagggttttgaagaaatgttcatcaactacttcttcttcttcttcttcttcttcttcttcttcttcttcttcttcttcttcttcttcttcttcttcttcttcttcttctttttatgatcatctcccttaaaaagccttgaatatatatttttttcttactcctagactcactattgtgtgaagtttgcgtgtcacaggtgatctggacacctgctgatgcccctctgcctgcaaaggaaacacaagccattgtggtctgtaagccacccctgctccccaagaccaactttcttattcctcattatcctgcagcgaacttgtggtctgaagtatttcttcagtttcggtagcgatgacatgtgaaatgcatgtgtatttatagaaatgaaaacaaaatactaatcagcagcagccagtcctgactcttcggatggcaaaacaattctcagctaatgagcgtgtaattacagctgccaggaaatagctattaaatagatggaatctactacaccggccaagacagcaggatgggtgggggtgcgcacttgcctgctgccttgctcatcctgcaaggactgtgaggttcatctgtatcagtgcacacaggagtgtgaccagccccggaagggccagggtctggtcagaaggccagggtacctgagaccataaccttcttactcactgttaaggttttcttctattgttagaccttagttttcagccaggtagtatgatgggatgtttcttgggtttgtcatttgtgggatggtatttaaagctcgtgtgtgtgtgtgtgtgtgtgtgtgtgtgtgtgtgtgtgtgtgtgtgtgtattataaaaccattttcctccttacaggctgtgtcatccagtggcattggtcagcagtctgccatgccatcatgatggctactatttctttattctcatcaccctaagcaaattctgcacccactggacaaaacctccagtctccctcccttggcccctctctgtttctcttaacttgggctggttcttccatgtgcgtcctttagtgtctggcttactccacttggcagaatgtctctttgcaaagaccgactgtgctatagcatgtagctgacaacatagtgcattggtacttattaataatgcatgtatattttcattttgggagccagataatacagtgtatttgcataatcactagaagttaaattactgtgttttttcatctttaaaaagatttttttttcatgttcttctttgtaaatcaacaagtttggttaactgggaattatggtcccaagaggaaggtttctggttctgactattctggcatgtgtaggcattgctctagataatgggttctcaacctgtgggtcttgacccccctctttaggagttgcatatcaggtattctgcatatcagatgtttacattatgattcataacagtagcaaaattatagttatgaagtagcaacaaaaataaattgatggttggggtcaccacaatgcgcagaactgtatgaaaggattggattatagcattgggaaggttgagaaccactgccctatctcatcaaataacatctttaaagtacattaagcaaacaacacacaaagagtgtaaatgtaactagggggttgggctagtgatgaccacattgtatctatacttttaggaagtctcccttctggaggtctttagtacagtcaggacgcaaagaagaaacaaagaccttgtcctggggttgcttttatgtgcttcatgatggtagcagagtgtttggattgagttcttgaaactgtctgtgaagcatacgtccatgtatagctagcacataccggtggtgtgggaaaaccagttctagcaatttggaacatagacagaagcagacctggtaaacagagaccagtgccgtcccccctattcctgtccctgtccatctctctggagaatgtgaaggctagtcttcaggatgccagaactctgactttcccccatgcttctcctttgtttggttttggctagaagcaggtgatggtacgaagcccatctgggaagagcctggttagggaaggttcgtaccaaatgcaggtcttcagtaacaagctatacagaatctgccgtggagtctcacagacccccccaaaccagcctcatacccacatctggataactcaggtggtggaggctaggccccagggagggatggaagagtggtggctcacgacttccaaagcagtgactattctctgtgactagccacgccagtgtctgggatgttacgtaatcacaggacacaggttctgcgggcttctcagataagcagcaagtccccactgtggaatgtggcgtgggataaagattcacagaactcagtggagtttctgtaagttagtacatgcgttgggctgaaagttttaagaaagttaaaattcagtggttagaattccaaatacaaatacagaattaacatattgggatatgttttgtttctttttaaactcacaaaagtgtgccccagatattttttagatgctctatctacctagagttacatattaattaggcagatttgtgacttttgaaactccaacaggtagaaatgcctaatagaagtgcgccccctagtgccccaaacttcacataacagcccccaaagcaccgtatcattagaaggtaaatggttacaatgaactccaatgtccaaaaactgttcttattttgtgtttgtactacagtaagagccaagattttaagctctactaaaaacaaacaaacaaacaagactttagctatttatgttcattaaaaaactaatagtgatatattattttaaaatatcatacagttaatctatttgaagatgtttgaaatttatattgagaaaaatgcatgtattttcagtattgctgtaaacaaacatctgcatgagactgttcaattgaatgttgttttacatcaaacaattttttcaaatttttattagatacaaacaacttttataatactcatttttattgttacaatattttatacattttaaagaacatgataaaaaacgaaaggtattgcaggttttgaaatggggttctccaggaggagttggggtactaaagggaaagaagaatgtgatgtaagtctatttactcaaaatatgttttcaaatgttaacaaattcagataaattgaaattatatatcttttctaatcctaatgcaataaaacttaaatcaaaaaaagaaggtaaatggtaaactttgaagctggggagctttgaggagtgttcatgttaagtctcttgtctctgtgagttcttggtaatgatgataaaacagaattattttccatagaggatctaggaatatgaccaaaggtttgggaggctcaaaacctaccgatctattccatgtcttatcatttggggattttccttatctaacaactgtggtaaatgtagactaggaaagattgaaagaggctggggcacacagatgctatccagaccgtcaccgtgtgctgtaatgaggcccttcctgtgctggtggctggcaagggtctttgaaaccaactgtaaggatgagaacaggatttgaagtattattggtgggaaggtgtgtgaccacgccagacacagacattcagtcctctctgtgtggcattaaatgatttaagaggctgaacacttggtgccatgacatcctgagggaaggaaggccaaccacaaggccccgtgtcagtgaccctgaaggactcttcccacagcactaattagcatataagtgttctgagaggatcttcagcctgttgttttgtaacttcagttttatcttggtggttttttttttttttttaagacataaacattccagggtggggaaaggtttgtactacttactaaaattgaaaaatttgcattgtaaattctgctcagtgcaagcagggagttcagaactgcgacacctcattggagctctttgtgctgattaaatttctgtctctagccaaaattggcagcttattctacttaattttcatggagtaatcggtgttgaaagagtatttctttgacagttgccctcggggaaaactgggtgaggcttgttatttaggccagataatcaagtggaagaaaataataataataacgtgaactgtaggcctccatttcattctgacagtggctacattaccagccgcctctttcaatatttataggggcggggaggctggagaataatggaaattagaaatgaccagatccacttcagagttcagagggaatttgaagatctgacttaagcaagttggaagcccatctttaagttagaacccttcccagaaatcaggattgagtactagtcatggctcgtgtgcttgtgcgtgtgtgtgtgtgtgtgtgtgtgtgtgtgtgtgcgtgtaggggggtgtgggggtgtatccatgcacatttgcacactcttttctctctgaagctaacttgaaaactcattgctggtggtcagagtcctactctattccagttgaagaaagcatggccagtcttcatggttacactgtctgccttttcataatgtctgtgttcagtctcacgacagcgtccctcacccccatttctaacgagcaagccacatgctgtcccatccacattcaccaggtagctcgctatcatttgtgggaagggaattttaacttttttcatggaatttgcttttgtttttataattttgatagaaatacataggagttattcaaactacattatcaagtggtgaaatgtcttacagggttgttctaaatcattcagttactgatgtaggtcaattttgtgccttatgccagaaactgagttgattaataaggtggccagatgtgagaaagaggaatctccaagtttctatcctcctctcttaggatggggaaaaactgtttcagatatagaaagaaggtgattcagtgtatgagaaatgactgaggttaggcaaagggacaccgtcagtgagtgcactgcatgcgtgcaatcaaaggttatgggacagctcttaaaaaaaaaagaaagaaaaagaaaaaagccaatgctgacagagctttgtccttctgatgtcaaaagttacccacgggacacttgcacgagcccaagcaaaggggtggaaggcttcagccaatttgaaatcagcaaaagtttgcttccaagttcctgaaaagcaacaagacaaccactgctgttaggtctgtgccataaagagcaaaagaggagctggggagatggctgggccatcaagagaacaaacctgagtttggttcccatcatccatgtcagatggctcatggctacctcttcctgtctccagggaatctgatgctcccttctggattccataggcacctgcacttgcatgcctacagatacccacaaatatacaaaattaaaaaagaaaacggaaaaaaatgtttttacaaaaagcaaaagaatggagggaggggttagttaaaaatgaccccaggtagcagtatgtacgaaatgttctttgttgagaatgtggggtacctctgccaagaagggatttcttcgtcactgggccatggcacttttggtatctttggctgaagaaaaggacatgaacaagcaggcaaacagctaatttaggattgcactcaccagtgtgtccaatgcatgcacactgatttttttttttaaagaaagaatcaggactgagaccgtagctccatgggagcgcacttgctagactgagatggtagctccgtgggagcgcacttgctagactgagatggtagctccgtgggagcgcacttgctagactgagatggtagctccgtgggagcgcacttgctagactgagatggtagctccgtgggagcgcacttgctagtgcgtgcaaggcccttgggttgataactacttatgcaaaagtttataaatttagaaaggaaaccacagtctggggaaatggctcagtgggcagagtgcttgctacaaaaagaataaggactggaattcaattcccctgtaaaaatctaggtgcatgcctgtaatttgggtgttgggtaggcagaagaaggggggatgtcaggaggatgtctagactggccagctagtctagcctaattgctgagatccagcgccagtgaaagactgtctcataaaataaggtagaacatgattgcagaagccctgacgtttattgctggtctctaagtgtacacaggtgaatttgtgtctgtgtacatatatacagatgtacaaagaaagttaataaaaatcagatctatttctggtttgttaagtgaatatgtattttctaagtacttaacataagcatacggcatatgcatctcgactagtgttagcaggcttggaattaaaatgctgagatagtagctcaaggctcagagtcaggaatccagatggtctgaaaaagatgcaaggaaagccagcagggttgtggggtgtaaggctgtgtggagtcagggactctgtccctaggccagaggaagatggaaccttgtcggcttcagctaacgtgtgcaacacagcaccaaagtgtatattgggaagggggtggcacgccagagttaggagactagccaagaccagcagttccgttcatacagagaaagtgtgtctaacccatggcctgtgtactacatgtgccctgagatagtaatgagtgtggcccaacacaaaaccagaaacttacgtaaaaccttaaacctcatgagatatgtgtgtgtgtgtgtgtgtgtgtgtgtgtgtgtgtctcagttatgcagagggttttatagatggccacatctgtagcagtgctaaaggttggacatatgacctgctagaggaaacattgaagagggaatggagaggctcagtagaggtggagggtgaggaaggagcccgagtctggcacatccaactccaaacactattagctgaagacttgcaggataaacatatgcatataaaatagaatgaaaacgaaaacagccctcacccccctaagcacaaagtcatctatttcccaccattttatttactgaaaacaataagctggtggttaagactcactcacaaaatcaatttcacagctcattagtactgtctgaaatcacaagtgtagaatgggctccagttggagcccgggtggttgagggctgcatgctggaacagggccctggaggactccaaagggaggaaggttgaggagtgtgtaaaggtggaggaccgtcagagcctctgagcattgcttccagcaaagccctgaggactgaccaaggtctgggctaagcttgcttttacctcagaagagagggccgtaagcttcagaaggggaaggagagagaaggggaaatagaggagaaggaaggggagagaagggatggtagtaaatcatgggcttagacgatgcagcacaattctgagtgaaccgcagccgagggctcacttgctgccctgcccacattgctgctgggatgcttcctctaagagcagaacaggagttggtctggccatgggtaagatgcagtgaacacacacagcccatctcttggatgaaggcaatttactaagctgtcggcagagacacggagcaaggcttgagaataaatattagcagcaaactggggatgaagtcttgaatataaaatggcatcaaagagatggtgtgctaatcaaacactccatacctgcactcttttctctgtattgccatcccactgtgcccaagtaattcctaggtgagaccagctgtggggacacttagagaaagcaggaatctgaggatgcccgagagtctgtttaggagcctctcaaggggataagaccagtgattgtctggtgtgcagggggcaagaggcagggctggttaaatatgctcagccctttggctggaaaaccagaaggggaacctcagatgaccttgagatatcaaggggatactggagaaggtgtgtttgtgtgtgtggtgtgtgttcatgtatgcatgtttgcatgggtgcctgagtgtgtgctcatcaaaaactgtgtttgtatgccttagagaatgcacttgagactgagaaatccaagcaaggttaaaggagtccaggctgccattgaacaagaccagacttagccaaacaaaatacagcaaacccaggtcccatcctggtcactgtggcaggaccagtccaaatacacactcagcaaaggccccaacactgctggttctggggctacagcccctttggaaggaaggtcagtcagaactcagggctcaaactgagtcaggtggctgcctgcttaaacaaaaacagtgatgtttttctgtgatacttaaacaaaagccaacatttctttacgtcattttcaaattatctaggatctaagccagtgttacttgtcaagcaagaagcttgggaagtgtcttcttgttgggaaaggaaaaaccagtagatcccagtgccaaggtgatccagacattgggtttgtgaaaggcttaaaagagttttataaaagtatttcaggtagaagataaatagaaatatacaaagtccatgcaaagtaatagattgaaagaattagcgatgaagtgtataataaatggagttaggaacttagcaagatattcttattggaagaaagattaaattgaaacacaccaataattttgtgatatgtaactagccagttcacagcaagtaaaggcaaggcttatcagaagaggaaaacaaaagatgacccagctaaatgttacaagttatcttagtatacatagttcaagagaaaagccatatagacccaaaaagttcaaatactaatcaaaagtaaacaaaatgtagctagcgacatcattacaagaaagtagagttgagagggaagagtggtgaagagcttatcaccatggctacgggctcgttctttcagaggccagagctttgacatatgtgaagcccaggtggaaagaattggtaagaaatagaaaaatcccattttatctggagacttcactttcctctttatgatcaacagacccgataggatgaaaatcagcaaggctattgaggaactgaacagcagcatcagccagcgagtcctgacagacatttccagagcatccacccggctacagcagaatatatgcatttttcacagagaggcagaacagtcaccaggataggccatatccccagtcgtgaaataaaccataacaaattttaaaggattggaatcagatgatgtgttttctgcttgtaatggaattaaactaaatcagtaacagaaagataataggaaacacgtccagacacttggaattaacacacttcagaatcacccacgtgtcaaggagaaattctcagaggaaattagaaaatagtttgtaccaaatgaaaagacaatgtattacgttttgtggaatgtaatgcatggagggaaagtacagtaccacgggcttagactagaaaagaagaaaatcgggtaaacacccaaatttaaaaaataataaaaaatagcctgaaaggtagaagaaggaaatagaaatagaaaaatatagaaattgaaaaataagaaaaatcaaaagacaaaaaagctggttatttaaaataaataaataaatcaagaataatgtggatgtgggagaaagacaagacctgcagtttctaggtgaccagtggagtcaggtcactaatgactctgattcaaaaattaacagcttaggaaaatggacccattccttgctgaccacagaccaccaaaccctagatggaggtaagctggggttgtagaacactgctgctgataacttctgaagaaaataacttgcagtcaacttcggaaaaaggaatctccaggcccagatggcttcctggcaagttctaccaaacatttcaagacaaaacaaaaccaatgttataaaatctcatccagaaaaaagggcagagaaacgcttcccaagtcatgtcatgaagccagagtccctctgatgtgaaaagcagacagacagatggtacagaccaatctgcaaccccggcaaagatgtgaaactccttaataagatgttagcaaatcaaatccagcaataaataacaagactaatccaccagggccaagtgggatgcaaggttcatttgatgcctgagttccaggcagcataacccaccatagcagctctttgtggaaaagccacgttcatgtcaatgaaattcatgtcagttaatgtcaaaagacacctggcacacgtcatctgtccatgatcacaaaacctcatcggagtctctccagaaagtcacatagtctgcttccagcattataactaatggtaaagatctaactgtgcttcctctgggtgctggcaacagggcatgggctccacattttccactcctgttgcctattaaggcaacatcttaactagcataggaagaaaggcccagttacagttttgtaagggggaaacaaaattggttcttttgttttgttttgtttcacagataacattattgcctatgtaggcaacgctagtgaacctacagaaacaaaacacaaagtcaaagcttcctacaattaatacatttatcctaatataggattcaagaacaacaggaaagccattgttcctattactaatcagcaatggggaatggaaaaattaaaaacaagcaaggtctgtacaaaatctccaaaggagggaacgacttgtaaagttaggaaaataaaaccttaaaacacagggcagctctatagccggaaactaagcacagatgaacgcactcaaggaaatccacctcggttagcttagtggatttatgaattagaagcttacatgctaaaggtgatgtctcaaaaggtatcgatttccgtgtgtgtctgcctgcctgcctgtgtctctgtgtgtgcgtgtgtgtgtgtgtttgtgtgagcatgcatgtgccagtgcacatgctgtctgtctgtctgcctgtgtctctgtgtgtgcatatgtgtgtgtgtgtgtgtgtgtgtgtatgagcatgcatgtgccagtgcacacactggaggttgatgacaggggtcatcctacattgctcttcattcatccaggcagggttcttcaatcaaacccagagcttacctgtatggcgagtctggctagccagtttgctcttcactgggctggagttacaggtagatttccaggtacttctgtgagatagtggtggagtgggggtgagggatctaaaccactggttctcaacctgtgggtcatgaccccatgaaggggtcaaatgaccctttcacaggggtcacctaagaccatctgcagatcagatatttacattacagtgcatgacaatagcaaaattgcagttacagagtagcaacaacataacttgatggttggggtcaccacaacatgagcaactgaattgaagggacatagtattaggaagttatgagtctagtccccagggatctaaacctagtccccaggtttgtgtgacaaacagtttagccatgaaaatgattccatgataaacaaagtgcttccaaactttatacaaacttatctgaaaagaaacataaatagccaaaataatgttgagggagaaaaatgacataggaggactcggaatacacaagtggaaagacttagcaggaagctatcattgaggtaatctgatattggcaaatagatcaaaggacagaaacgacccacacaaacacaggctgtggacttctctaatttgcaaaagccttgaaataaatagagaaagtctcttaacaagtggccttaaggcaagtggatagttaaatggcaaactagaactttaagttttgtataaatttatctcaaaatggatcacacagctaaatataaaaagtaaagtaactgtgtaaagaggaagtcgtggagatgctgggttgggcaggagtggccccttaagatcccatgccctgcatctgagaggggtgagcggtaagggcttccagccttggagagctgaggttcatcacacttcaagtcagggtgtgattgatgtgggaacacactgaggggcatgcccggaccccattctaattcggtccctaccagtgcccctgcaaagtgggcatcttattgttactgtctcacttttttgatacatggaaacacagaaaaaccagtaggtttcatctgtgaccaaacaaggaaggttcacaagggatcttttttgagggggactagggtgccaccacccccctcttctgcctgttgtgtatctgaaaacacagatcaacacatttcatggctccctgtgacctagacataggcgtgttactacgacacctctttacttctgtgattttattctcaggcccactttctgcttggtgggtctttgctattaattcctttttgcaggatcagctcagtcgagtctctttagcgccaccttgtgtctagagtgtgttttgcaggaagaaagctcccgctttgatgttgggctacaaagatctatttagaagggtgggttttggatcatcctggtgttaggccaaggcattaaacacaaatctccaatccgagaagctgacagaatcaacttcttcacttgtccctctttctagcagtaacccagcttctcatatttattgtcttgttaacagtggcccctgagcagtttgggtagaaaccatcattccagtgttctgggtcttgtgaggggagggtgaacctcacagagtgggcttctcaggaggttatagggtccagttaacatccttgcacccctaggctgacttagcagacaggctaagagggactgaggactggaaaaggggaaggggggaaagggaaggccacacaaaatggccttactacagggtttcttccaaactgctgtgtcgtaactcagtgacatgtgaagtcacttttttgacctgcttagtatttgactgctgagtgatgtttaaaacacccttgctgattgaagggataataatacatgcctagtctttttttttttaaagatttatttatttatttattatatgtaagtacactgtagctgtcctcagacactccagaagagagagtcagatctcattacggatggttatgagccaccatgcggttgctgggatttgaactcctgaccttcggaagagcagtggggtgctcttacccactgagccatctcaccagcccatgcctagtcttttttttttaattaggtattttcctcatttacattttcaatgctatcccaaaggtcccccataactacccccccaatcccctacccacccactcccctttttggccctggcgttcccctgtactggggcatataaagtttgcaagtccaatgggcctctctttgcagtgatggccgactaggccatcttttgatacatatgcagctaaagacaagagctcccgggtactggttagttcatattgttgttccacctatagggttgcagttccctatagctccttgggtaatttctctagctcctccattgggggccgtgtgacccatccaatagctgactgtgatcatccacttctgtgtttgctaggccccggcatagtctcacaagagagagctataactgggtcttttcagcaaaatcttgctagtgtatgcaatggtgttagcatttggaagctgattatgggatggatccctgcatatggcagtcactagatggtccatcctttcgtcacagctccaaattttgtctctgtaactccttctatgggtgttttgttcccatttctaagaaagggtaaagtgtccacactttggtcttcgttcttcttgaatttcatgcgtttggcaagttgtatcttatatcttgggtatcttaagtttctgggctattatccacttatcagtgagtacattttgtgcgagttcctttgtgattgggttacttcactcaggatgataccctccaggtccatccatttgcctaggaatttcataaattcattttttaatagctgagtagtattccattgtgtaaatgtatcacattttctgtatccattcctctgttgaggggcatctgggttctttccagcttctggctattataaacaagccatgcctagtctttaatttgcatttgttttgttatagggagaacaatcttcatgctgttataatcttatccttttttctaagtgttatgagtttgtaatatagtgtgaaaaggtaacaatattatccactatacaaagtaacagtattattatacaaccctttatctctctttggttttcatgccatagtaaaattgcctaagccgggcgtggtggcatacgcctttaatcctagcactcaggaggcagaggcaggcggatttctgagttcaaggccagcctggtctacaaagtgagttccaggacagccagggctatacagagaaaccctgtctcaaaaaaaccaaaaaaaaaaaaaattgcctaaaattctacggcagcatagagtgattgtgcaagtatcattttgaaactatcgctgaggctactgagatggcttagcaggtaaaaacacctgctgccaagtttgatgaccagagtccaatccttagaacccatgtagtggaagaggagaaccagttctggaaaatttcccccagacttccacctgatgccatgggatgtgtgcacttacattcccgcacatcaacaggtgaaaaatgcttaagtcctgctcttagtaagaatgtctccagtgtttggttactagctagaatgtgttatgtgatgtttactgtgttaagtatgtactcaagacattcctctcattttagcgttatgtattcagacacagttttccttagaatgtctgcgtttgactatttgctcctttgtttgatgaggaatgatgggatttttagtgtcaccatacatttgtctacctagatcccagaacagaacctattttgtgttgtggtttttttttttcttcaatcagtgccatttcatgtagattatttcctaaattcagatggttatccttagactaagggatgagggatcatttcatttactcttctataatttccagttttccaactgagatgtgaaggtggttagggcggtggacatgattctaggaaacctgattaatttggatattcactatctcagcagtgtctgcagtcaaaattattttgatgttaatgaagctgttcaaaataatacattgcacttccttcttggagaatggtaatagaagagcgattacacttccttaaactaaaaatttaagctttggtgtgtgacaggttattttgggggttccccaaggccatgtatgcgcacactaggtaagtgctctgtcaatgagctacaacctcagccctctttgcatttttaaaattttgagaccctgtctcactaagttgggcatgctggccttgaacttgtgatcttcctaccctgcctttcagagtagctggcattgcaagtcagtgccaccatgcttagccaggacacttttttttaaaaaagtctgacattttccatcataaagttttttcatttatgaaaattcaaagcaacacttaaatacagggctgtcctttctctaaaaagctaaaattgcattccctctgaatgttttgacaagacacgggactgcagccagggacactggttgttttgggaaccgttacgtgccctcttggttccaggtgccatctcatgttcaacttgaccctgtattgagcagcatacacatcaggatagagaagcaagcatgtatacatcaagatgcacaagcccagcggtgactgatgtcagtgctgtagttagatcctccagcggccaggaatagcctccagtgctttcagttacgaaatgagatttcagaccttcacccttagcttcagagttggtgcccttaccaaaaaacagtacccttaaagtgacgaaactttcagttgacctcatgaccattgaaggctgcgcttacacataaaccggtaacgtctccttgtttctttcccctgtctgcagctctgggtcagattatgttgtatgtggatgggatgaatggcgtcatcaaccacagcgagaccatccagtggctttacacgctcgttgggtcgaaggtaagaccaaggttttgttttttgtttatgtttatgtttttgtttttcttttcttttggaacagttttgctcagtttccaagtcattggttcttttttagaatcctttttaaaatggttttgcaaagaacaatcctattcagctctgctcaagtcctgtcttggtataaaggatgattcaccctttgtagatttttttttcaagctcagtttaatcacagatagcttatgaaattttattctcttaagctgtaatcaaatgcctttggcacttttggtttttagtgtttaattaaaatattatgctatagataaagtacctatgtgccccttatattttgtgacctcaagtggtaggatgacatgagtataggtcatagatactaggcaagagagtccagtgccattcctggcccttggatttcctttcccagtgttgtcatgaggaaaaatttccctcatttcatagtagagaaactatttttccttgggcaactgaaaatgctttttcccatatcttttggctttgttttccatggaaaatagaaacaactctattttgaagctaggacaagtggccttggaaatgaagtggaatgctgggtctatgaggttgacttagctaggctagagggagatttgtatctggtcttctgtgttggtgttttctgtcttccttacatttgcttggaggcctttctggccagcatgtttgtctggaagcaggtctctccatagctctttgactaatgtctatgaccttaaaatctggagagatgagggagatttctttgaaataaaaagggacttttaaatacatgttatgactggattaagaaatctttatggctctttcatggtcttgacaagactgatatggtggcatgggggcaggggagggcacggaggagcacatgtagaaaggggtgccgtggtctgagtgtgtatcctgaacctatgtgctaggggctcatacagcacagtggagaaggtgtggccttgcatgaggaaggcaataagaacctccttggtcttggattgttactgttgaagcaatggcctgagagagtaggcttgttctctgcttttctcttatatcaggacatgacctatgtcccttctggtacctgcagcaactagctgccatcttggaagtagagggtctgactctttctcacttgtgctatggagatcttagatgtgtccctgcttgtcaacatatacagaattatatttctattttcttctaaaacaaacaaacaaacaaacaaacaactagcctcaggtactttgggatagcaacactaatggaaagtcctagagaagaggaagggttaaaaagaactagaaacattggtgggggggaggggttcatatctaaaattccagtgcctgggagggtgagacagaggattaccacaggttcaaggccagcctaggctatagtttgagatcctggctcaaaacctgaaaaggaaaagaaaagtataaagaagacatgggacgtacaggaagtagcagactcaaatcacagccattggcctgtgtcaccacagccatcttgattgttttctttggactcactctgcagggaaaatgaactgaacaggagaacaaggggaaaatctgcattgcatttaaaaataacgtggagaatcataaaatcagaaatcaacagaggaactatgctttccttgactggctggtcctcggagtccttgcttgctctgtggtccctcctctcctcaggctctatcttgggttgaccagttgtctcttctccacccccggacatcattagcactagactctgtagaacatgtgcattttcctcttcactgttcattttttcccaagagccattcttcagcacttgctgactttcaggcattgtgaggctaggcaaatagaggagtctagtgagcttgtgccttggcgcctatggttctgcttaaaaatagaaaaagtgaggttgggggagggggtgacaactgatgacacctgaagctcgtgactcactcatggtgatgtcagacaagatcttgaatcaccctactgggtatactccattccaggtcagcagctgaatgcaaaaacagcagccacgggcaaggttttctttttccccagcacagttctcctgagatgccctttactctacaaaacttgctgatactctgtccctctctttcatctggatagtgaaagatctggaagaagaataggtgcctcaaccaggacctttaggtttggagaatgaagcctcagttctgaccttagcactcagattaaacaatacagccacctaggttttcccagctcaggtgtagaaggcaagggaagctgtgctttagtcttttctgttgacagattcatggcttttaaacctgaaaggtttgccttgacagcctgctggctttgccttatacaggcacaacactgataaaggaagtgctggttaaaaaaggaatcctgttgttctgttttcataatgcttgactttcctcccatgaaaggcaacacgatgtgactttgccgctgccagagggtcgttatgcaatgcacatttgtagttacttgaaactccagagaagaaaatgatgtatttgcagccaaataatgacttttaaaagagaaagcacaaaatgtttttaataaagtctttctgtttacatgagcccatctttaaactcctcagtcagaggtacaagatgggtacccccacaatgacttgttaagggtatatagcttttctctttatgcacctggaattctaattaattgagataggataatcctgtttctatagtttggccttttatcaccctcatatagaaaaccttctctgttttccattctggccctggagagattctcatctcctcatcagagaggctcatgatgttgccatggaaaccatcctttctgtattcccatctacctttgctcaccctgccctctatttctgccagccccactgcatctcattcttccagccgtgtgccaggctgctgatcagacagtagtggatttcctttgcatctgtgtgaagatgtgcacactgctcttatataacccctgctactagtttagggagaagtggaaaggaccgtaccaccttctctcacacacattcatattcatgttctccccatgaagccttattaggacagcagcatgtggaacatagggatagaggaggggggagatggcagggatggcagcagttactatgaagtggtggggtctgagaaagggttgcagttaaaaatgaaaaagagggcaatgtggagacatcttaaagagcagctactgaggcctagatttctggatttagaaaacatgaagcaggaataagaagtgagtcacaacttggagtgggctagagcctttggcaggaacgtggaagttggtattaagcttggaaaggagaactgagcaagtgatcccaggtcccagtgctctctccctgtgtcaggacactgctggttgccaaggagatgagagtcagtagccctttggtcctgtagtcacaagtattgtgtcactgatatgtgatcactccagggacccacatggaggctaaaacatgaggaatgttcttagttacgtatagttatagaaccctagctgtggcaaatgctgagctatgtttaagatggtcatgacatcatgagtcacattcttaattctagaaaaggaaaggaaaggaagtggtcccttccacgtggctcaaccctcgtggacaccagagttgctgggaagctattcttacagggaaggcatcttcatctacaccattacgaaccactgggtctactgtttgtcaggcattctgatcccctgtggaggtgctctgagcatttaaaggtcgttgtctgggactgaggatatgtctgtattgcacatgcacatacacatacacatacacatacacatacacatacacatacacatacacatacacatacacatacacatacacatacacatacaatcatcaatgaacttctgtgtaagtacaaggacctgaggttggtttccaggacccacattaaacaagaacaacaacaacacagtaggtatggtgatgtgcttataattccagcactggggagatagagatagggggatcccttaggttgactggacagccaccctagacgacctcatcagttttaggccaataagagaacttcttgcaaaataaaggaaaaaatagaaataaatgtgcatgactcctgcgtagtgagtcatacacacatgactatgcacacacatgcacattttgaaattaaaactgtaaagatgactgttctataagcctgtcaaagctacagtgtatgttttgctctagatattacagggacctgataactagtccctcattctactggtcattggcttctttttgcagctggtagaaggtatataaaagcctccttgggatatgacattttcttccataaattctatctctgctttagtgggccttttagcagcagccctgggtgctggctaaaattggcctggcggtccattaaacatctctggctttttctcatacaccatgcctgccagttcttctttctacatgtccgtgactgatggttgtgtatctaaatgcaagccattgcaattttctttgttgatcagaccacagttccagcctcaagataattgtgaattctgccttggccatttatcatcttaatggctagtgccagttttatataacataaatttaataagctatgcctctttattatagaccagaatgctgagaggggagcgagaatgtgtggacccaccagcacaggctctgtgacaacacagtgactggggtgctttagggccactgtgaagtgagtggggagctgcctctctgactgttaacccactgttgccaatgtcttcacagacctttctaaaatcaagacgtactgcatctcctagcacatgctagggctttggggtccaacacagccttcatgtgggtcatctttcatctataaaatggaaatagtctgcaagctgagcagatacaaatgtgtaaaattctgagcactgctcctggccctgtgccctgtatcatttgttaatagctctttttctgagaagttctctcaacatcctagtttagagatatgctcagtcaagactgatgggcctagtcctctcttctggcttgaagcatccatctaaaaatttcctgggacattttgggagggatcagtggtgagttcagaaagctacacgatgcttttttttttcggagttcatatgcaccaatctcctttttggcagttgctgatatgtctggttttacactatgagagacctctgccgggcctagcttgactcctgacctgccccaggagcccacagcagttttctaaagagtctcctacagctggtctttgtgcctgtagtttctagggcttgcgtgctgtggtggaacatttggctttcaaaaactcatggaaaccatcacacctgagcatgttttgctgcttggtaaggtggctctacccctgtgtcctcagctaggccactgcagacaccttttcctctctgtagaggaaattgttctcccctctgcagttcaagccacgttctttcttcccccacccccagttccaggacaggctcaacatcagtgacaggtttcatgatcacgtgcctttttcttttttgcatttatttgtgtgttttcttgttcacatgggtgtgcacacatatgtgccagagtgggaggtaagaggatgattttggggtgtcttctttgattgctttcttctttgtattattgaggaaatctcccacctgaacccagaacttatcaacttgtctagtctagctagccacctttttgggggatatctggcgtctgtctcctgtatcctgggattccagacagaccatcatgcccactcggcctttacctgggtgggaggtcccaaagtctagtcctcgtgctatgtggcaaacatctggcatgctgagctatctccccagccttcagtttggagattttcttgcttccaatttaagaatgttaactctctgcagctaagtaggaaaatacccgattataaattttatgtttaaaaacacattgtaaacatattgaacaccatgatatctgctccgtcattgaatgctacatggccatgccaaagacattctcagaataccaatcagttccttgatgtgtaccgttgtcttaaatcagtactgcaattggagcttatgttttttattgactttaaaatgagttgaattaataagtgtttcattaataaaagttgggctaatgttaattttcatagtgaagttaatgagaagagattaaaggaaaaaatacaagtttatggatgttctcaacatcttgatattattataaaaactaccatttgagcttttctgtgattatacgagcaaaatgttctctttgtattaaactgtagaaattttaaaaagtaaaaacaagcaaaaatacaactcagaagtcctaccagagttatcatggtgattcactttgaaacctttctttctatttatttttaaagttttcttatatagtaagccctaaacatattctaaacattttctgtgtcactgtaatatttaaagtttaatgcccatataatggtctctggcatgtctgagctgtgattcatggaagttttttcatgtttctcacgttgtcaatcaagtggcttcagactggatgctctatttaaagctattttaatatcattaaaacctatttagtgggtgaagttgcatttgaactttgtatttatccacattccattaggcaggtaggatttctaaagctccctgtgtcacccacatgtattcatgtgttattggcaggatgactctgtggctacagagtcagtgtccctgcagagtgcagtcctggctcctctgcctgtgcacactcagagtactaagtccagtgtatgtaatttctttcctgtgtgcatgcacatgtgtgtgctggtgtttggaggtcagaggtcaacctctgatgttataccttagacactttgtgtttcttagacagggtcttttactaagaaggctagactaactgtccaggagtggggaaatggattctcttgtctccttaatactagaattacaagcaagtcaccctccctcccccaacctcccttttatttaatacattttgatgttgagctcaggtccttatgtctggactgcaagtactttcccacttgagcccctccctcatccccattaaatgttggatttcacaagctcttgcttttggaagatatcagagtgagaccagaggataaggccaggccttcgaagccttcgaagggacaacccgtaggggcgtcactgagagaagtatcacttctttagtccattgtgtggctccggggagcattacttaggttccctctgttctcaaaacagcgtcattatacactagccttgccgcttcaccattgcaaatgtatttttcctgtaaatgcaaggtgtaaaagcaggagtggaaccttgatgcttctgctcatgtagccagagatcacagccatgccccagcagctagaggacgagtcaccactggggactcaaacctgggaacacatttgaaagaatgcagaaattcaagtagccagtgtaccctttccccagtgaaaatactgtttccatcttctaggatggtggatggtcctcagggcagcagaggcagggagttctgggagccatcccaggaggagcctgcaggctggagttccctttgtcaatgctcttagctcccttcccttggggctttgtctctgcctggcacgttcactcacttcctggaggcttctggcaaccaagctctcccgacagcactcactgtgccaggcttacctgccatctgctggcacgcatccaggactacttgtttgtaaaagaaaagttattttccttgggaaatattatctgtcatatttccacaaagcttgtgttttgagccagttggaaagatggggggctctttcctgggtaaggacaagaaccaggttgaccagtttcctttggtctcatttagaaattggccaggtaacaagttattttagcctcctagaatgtggggttttgtaccccaaactgggcatgctgcttcctgtaaaagcatccaagcttgttgatttccagtatcccattctgcaagcagtaacaagatgccccttgactggcgtgttctgccaggctttggaatccctttctcattggtaaaggagcgagttaatgttatttttattaattgacccttttcattttttttacattttatttattttgcatgaatgtgtgtgagtatgtggacatgtttgccccacacacatgttcatgtgtgcaggtcagaggacatgtcagttctttccttccatcatgtgggtcctagggggtcaatcccaggttatcatgttgggtatttgagccatctctcaggccttcaaatgactcttcttaatgctgttaaatatctggaaaatttagcaaagtggatattttctactgcttacacaaagctccaggtaaacacctaaattaatcataaagatttgtacctcttcattttgtttgtaatcttcatttctggacagctggctctgttttatacttcacaaaatttatctactgataagttccttcaggcctttccagtcccccaccctaccccctgggcttcactgttacagagttggcttcctttctgcaaactgcactgtcagaagcaggcagctgtcagtctctaaggccatagctcagggacttggtgcaggtgacttcctgtcctggctcatgtgccaaccctgatcttttcattccctatgaattcttgtgggccagggcccagaattctgaacttgaggtactatgtttgggcctgtgctttgtttctgataattacccatatcatgttgcaagcagtctattagaggtcgagaaggaaaagattttggagcctaagttttttgttgaactatttaataattatggagacccctaggccttagtttgaactgcttattcaaaagtttcaacttgagtgtgtggcatttgaacaaaatgttaagtaaggggttttaaagatgagtggaattctctgtggggtaggagacaaggcctcactctacagactaggttgacttagaactgattttatagctcaggctggcctcaaactttgcagagatcctcttgactcagccattagcggtgatgtgacaagcatgagccaacatgtctggtttgattttgtcagatacctagtctgttctaaagtataggtaaatgtgtaaacaatatggtacagccatatagatcaggctgtcttaccgtttctaatctagtttaaagatgagcatccatttttatagcacatacctatgctgctttcatgggaaatggaacgaaatcatgtgtgtttccctaatcctctctgcaacttacgtcctaaggttgggaacttgttttctctttctggttgttgagtttttaagagaggacttggcaattagacagcttttggggtccttgggtttgtacttgctgagtggcatatttaccctgcctactgcattgtccctatttccttaagtccagtgaaatgcacatgaagtcccagtcttaagaaactgcctcgttttcttttccggcttctggtagctgcactctatcgaaaacctagacaccccctgcaagctcactaggaacatcaaagcccagggaagcacaatggtgacaccaacctgctaagcctctcaatcctctctgaaaccaacattggcatccagcataggtgcgggatgtggaggctctgtctttggttatttaaccggcacgttggctctcacgaaggctcatcggagtctgttttatgctgactaggaacacagagtgcaaactaccgagcacactggagtagcgctctgtccagccacactgcaaatgtactcagtgttcatgaagtatggtggctgcgtgttcccagcctctgcacgcttctcatgcacagggactaccgccacgccctgcttagatacatgttttagaataacataaacaatattaacatcattgtccagggctgggaattgtaactcagttgatagagtgtttgcctagtacctctagtacctataaagctctgagtttgagccccagcaccacataaaactgagtgtgactggtgtagcttctctggcactttttaggagacaaaatctgatagcaaactccctatccctctggtacatggttgcctaaacaagaccggaacactaaacggcgcgttaatgtggaagggaaaaacctcacggagcctcaaccttcacaaagaactgcaagctactgaagaatgtggaaagcaggcagagtggccctcaccaggggaagagtctaattggtaatccaatgccaagttgtcagccctgaaatcatcttcatacaaataacattagatggatgggggaggttttattcctgtgtgtgtaatgcaacatacaagcacgcacatgcatgcacgcattcatccacacacaaccatgtgacaacaattaatgtaaaaaaggccatgaatttgagaaagagcaaagtgggggcacatggagggattggagggaggaaaaggaagaagagagaaacatttaagataaaataaaaaataaatgttataaaaaatccaagtgaggtgaactacacctataatcccagcaggtaggagcaggagggttagacattaagcactggtccttaactctatagggaatttgaggccagctatttcataccatgagatgctatttaaaaagaagcaacaaagaccctcatacttttctttgttccagtgaacagagttcaactagaacgcttagaatgtaaataaaatataggtaacaaagcccaacagcagtgcctggagcctgaggtgctttgtccagtggcagtgttgatgtgatagggacctcccagcctttccacagctctgctgctccactggggatgagaggggctgggctagctgggaccagctctgagcttacccaattgtcatcacagtctagagctgcccctctgagaacactcattgtccatcccatgggtgatgctctctgtgtggggagggggagaatgagttctttcttagtatacagtgggccgtgtccttgaagcatggccatgtgttctactctcagagtctcaaagggtgctcagggacccagaggggctctcgacactattggaagtagaagcaaagacttgtggattggcagggactcaaacatggccagccacttcacccatccagggttatagttttttctttttctctagaggtcttgcctcagatagcaagacctcctgcagtgggatgcctgccatcctcagctcatttgattttgagctactgaagttcactccttgctgctatgtgacctgcctgttttcttcatgatggatgaaccaaccatcccatggtgtcacatgcttgcttctcgagaactttctgatttgcctctcggggctagtcagggtgccgggtgcttgatgcattgtagtgaaactgtatgtgttaggttaggaaggggcttcagtctgagctgaaaatcagacctttgaagttggaaggatactttgagggtgtgatgtctctgagaagccatcagggtctgagctatgcagcgggggaattctctggaatccttgccgcttgttctcacccttccctgtttgggatgctcctttctttatccaccttaagcctgcctcctttgttcgcccggtcccagtatcctagaactgcagttcctgtgcacatatgtctaagatgagatttggttttgtgaatttgggaatcaaaccaaacatcccatgcatgctatgaaaacactgagctaacctctcagcagcaagaacgggatttcaagagcttcggaagaggcagtgtgctggacttagagggggaggtatgtggcccctgtgcaggctgctttgctcacagagtaactcttaggtaagtgaaggctactatggagttatttagaagtagtgttccccccacccccaagtcttcacaatactgctaatgtggaatttctgagtaggagccctggatgcattcgaggatgagttgtgacatgctttcaattagtatcaggaatttgccccaaatgaatgttccagtgctctcgcctctaaagcactttaattatctaatgtgcttgctattcattggcatagtaaaggtcccgaaagcaccaaacataaactcagtggaagctaagtcatagagctcctaaacatagaaaccatgtttaggaatttaaaaaataaaataaaacgatggtgcccaaagaagtccaaacagaggctttctagcaccagagaggacagcgtgcaaaggaagacttgcttctctaggaagaagggatctccatcaggagggggcattgcttagggattgtgggtaccagggacagtgaaagtcaagtactatgactgcacggaggctcagaaggattctatgggactgacaaagtagaccctgctcaaaccagctttgtgggagcacacactgggcagctgccaggttcgttcccaggaaccacataatgatagtctccctccagaggaagccaccaagcccggacttgctgggtttgtatttacttgaaggcatttctccagctttaaacatacaaaacacagttcattcttctagactgccaccccccacaaaaccttgtacttgttgagaaaatgctgaggaatttaacctcttcctagacaggaaggaaggaggagagagtaggactggccaatagactagaattaggagttaggaactctcaagtgtttggaagggggacacctgggggctgtttgacctctgtctgacctctgcctggcttagcttggcttggggctatgactgatgggctggaaggagaagctcagtgaagatatggcaccttcacgtgcacaactggctccgtggcttctcctgtgtcagaggaatcgtgatgggtagcttgtgtccttaggaacagtagccaaatatatctggtctctatgtctgtaggagcctcatagaaaagcccacaaatcatgactaaaagactcggctttaaatggtgtctctgctgagcatgcaggtgctcttccttgtcatcgtgtcccacacaatgtcatcaaacagctgctccttcagcattggcactcagtggagctaaaaagaatctagaggtggcttctggtactcaatcatggggaggatggttatggatatgtatgtatgctacatggtttcctgccactcattcatgggctccagtttcccatggctagaggaggtgcctctgaagctagctcagtcatgagcaggttgcaaagaagctctttgatgtggtcattgacaaggggctccttctcatgacgctggttttcacaagtggcatttctaaggcctacaaaagggaagtccaggcctgtagtgttggtcccagggaggggaagggctggagagaagtttccaagttggcggtaagctacagagagcatgtcaggggcacaaccttggatgctattgcgatggccctgggtggagggagatgggcatgccttgaggaaagctctacctcacatgagactccactaacttgcctgagtaagtctgtcacagtgtggggaccatgtcaggaacagccctggctggtagtggcatattaaataaccaagggggagcatctgagagataccaaggctgtaagacagtctggcccaggagtccagtcaggacctgaaaaacaacagacaattaacattcaatattagatggactttaaaacccaggaatcggataaacttgtttagagggtgtgtggaaaaagggagaaagaatgcccaggcagaaggttttaggtcttcacaaagccaactgagcaccctgaaaggtgcaagaggaggagtcactgctcaggtaggagactagccaccctgttctgagagagagcaattggctgtcatacgctattgagggctgagtgaaatccatggagtgaccaatagatttgatagcacacagcccaccatggacctggatggctgagttgaatagtggagataaaatcatgttcctatcaagctgtgttgggtggagagtgcaataattgcttgtttagttggtggaacaaaatactcgcatccaatgaatttggggaggaagggtttcttctggctcacatttttaagatattgtccaccatggcagggaagtgaagtgacccaggctgaaaaatcccttccagatgtgctgggaagtttgtctcagtagagattctgaatcctgtgagattggcatctggatcgatgatcacagggagtcactgggaagagaggaagtagagctatgggctgtagtaagtcttgggagagtttcttttttttttttttttctttttttttctcagtgaagagtgggaccaaggacaggacagataattatctaggtaaaaagtggcatcatagaaagagcctggggccaaggcatggaacgaccttggagaaaggacttgggcaggtggtgttttaaactgttccctctttgctatgacaaggtaaatactcagcaggggtagtttgggggaaggaggattggttttgactcctggcttaagagaatacaatccaaaatatggcaggtaggaccatcatagtctgtgctgaccaaagttggagctacaaatagtttctctacatccctgtggaccaggaagcagagagggaatgctaacattcatcttgatttcttctttctccctcttttcttccatccagtccaccagcccatcagatggcactatctatattcagggtgggtcctttttccaaaagttaattctctctgaaaccccctcacaaatacacccagaactttcctttggtttcctaagttagtgtaaatcagataagtcaagatgatgatgaagattgactgtctctcctgtgagctgtacagtggcagcgacagcttgagatgtgatagcctgaggttggcttggtgttctgagtcagtttctctctctctctctctctctctctctctctctctctctctctctctctctctctctctctctctctcttggaagaaaatgagataaagggaagggaggttttgagggagagattatagcagcaactgggaggttgggaaattgacccagcatcctttcaggcctgaagaagctggagttaggaaggcatgctagcttccattgagtaagttgctcatagcgtctctgagggtgatttctactgtggtaaagaaagattctgagctggctgaagctcctcacaaatgctgagctgtgggtcctggatctgtgagttccaaggccccaggcagcctgctatgcctggctttaagtactggggagttggctcgggttcttgcttatccaagcttgctagcacttgtggcctagaacaagtcatttgacatgttgtgcctgcttcctcactggaaaaattaaaactgtcactgctgtcatcgggatcaaatgaagtccccagctcagcatgtactgtcttactttgttgcaagctgagtatgaattctggggtcaaataccttgggtttgaatttttgtttccactgatcactagctgtgtgagcatggacagtgtgctctgcctcagagtcctaatctttacagtagagaagcacttatagctttatgctgcagtatcgagtaaagggtaagtgaggaaccagtgaaggattctgggtgatccagagaggagctccaggctggccggatcactgggtgctggctgtggatgaaggggacaatgcattcaggtgggcggggctgcctatgcttctgtgtgatgttttgtctctttttccagttccgcctggtagtgaagacagccctgaagcttcttctggtctttgtggagtattctgagtccaatgcaccacttctcattcaggccgtttctgctgtcgacaccaaaagaggtgagcgccccagtgttttagatagggaggcttcccatcttctggtgagttattcggaacatcctctgtgtggagacatctctgtgaaggctctagagtggaagctatagagattatggctggcaatggacatgacaatgaagaacatgcatgtgtggagttagccagaacttgtcagaccatcgtcttttgcctctatcactgaaaccacacagagcatctattctcccaatccagttcaagtcaccttgtgtcttgtcttctcttctttgccctgtgtctcactgatccatagctattccttgagcattctgccctccttccccctgcccatgcagtggcttgctcggggggtctcagcatctcttgacctactatcacccacctccctaaagtacagttcttcatcattctatctaatcctgtcagcaggtccctagtgcctacagcatgaaaacatctgagccattctgtgtaagggaccacctgccatgccatctccctcctgctctgtaacaccccttcctatctcatgagttcacagagctcccaaacaacctttctttctactgtgctgtcatctgttgacttgagtatatcccactcataggctctgtctccatcttactgttccagtgctcagctgtcctgagcagataggcatgctacacacaggtagaaaagagtggagtggcctgtactgcacataattttagcactgaagaggctaaagcaagaccaccatgagtttgaagttagcttaggctatggtcttagggttttactcctgtgaacagatgccataaccaaggcaactcttataaggacagcatttaattggggctggcttacaggttcagaggttccatccattatcatcaaggcaggaacatggcagtatccaagcaggcatggtacaggaggagctgagaattctacatcttcatctgaaggctgctagcagaatacttgcttccaggcagctaggatgagagtgttaatagcccacacccacagtgacatacctactccaacagggccacaccttctaatagtgccactccctgggctgaccaaatacaaaccatcacagctacctagaaagaacctctcttgaaaagagaaggaggaggaggaggaggaggaggaggaggaggaggaggaggaggaggnnnnnnnnnnnnnnnnnnnngaggaggaggaggaggaggggaggagggactgtagctaaaccatgctatggtctgtagtggcgtgaagcttttagctgaaatgctggggtgcctgtttcatctcttgctcattctccttcctaagaggacttggttgccttcattaccatcccaacaaagattcaaataagtaagaaaaatttgaataatattttttcttttcatgactgtaatagtttgaaaactcagtctacagatgatcccaaatcacttttgctgtcaacaagcaggtgagctacacaacacatggtcagtccagcctagaagcaactcctggtttctctgaaggagtacattaagatagcagagcttcagacagggacagaggctggagtctggaaggtgggtccagaccccacccacttcccctctaccatagcatgttgccatctgctaccagataggaactatgagcagattatagggccaactaacagccctaaggacaaacggtggctaagaaactggcttcctcagaaccaggtggttagaacctgaagcaaatggtggatatttgggaacatggtggctcccttggttcatcgttgctggatatgtctttcaaacccccagctgtggagttactctaggacaatgggtgggctttttgttagcatctcttaaacattgggtaactcaagggcacttgccatgcgaccatgatacatggatatccttctcatggctttgagggttttttttttggctttgttgaatagggtcttctagcatctctggagttcctactacatccagggcatggtgtggagtgggaataaccctcagatgaacccagggttttatttcccacatccaagcttcattccacagccccagcctgaggcctctgctatcctaagtctgtccaacaagacaaaatgatggccatcttttttcaattagttaaaaaaaaatccccatagattgttttctcagcttggtaaatcttgcctataaaatttcttcaacctttggcaagttctgtcatctgcctgccactaaacacgaagagctgcaaacaaaggcatatcactaatgaaaagcccagagaaacctcatcatgtgtggctcaatagcatgctccttcacggacatgtgtggtcttggctgtgatttttgtaatgcatacatataacgtcatcttggtttactgctagtaaagttgtcgtaggattctatgatggaattaaacatacaaatgtatcatagagttatgcagagagcaacatgaattccaggtgtttctagcagcaggttttagagcagtctctagcttcctctcaactgggctggagcacagcctatgagccagggatgactgaagaggagctgagcgtgtccacttgggcacatgtgcaaagaacccataaattctgctccacaggaaagctttagactcattccttggcaggaacaacaggcatgggaaagtggggacagttgtnnnnnnnnnnnnnnnnnnnnnnnnnnnnnncaggcatgggaaagtggggacagttgtctttctttctttttttcttcaataggaaaacctcagaatcagcaaataaaactaagaaaataaattaaaagccctcaaaaaaaatcattaccacctaaagcagttgaagaacaggttcccttgtttataaagtacgcatggccacctatgagatcaccagagggctcattttgtgacatgggcctacagtgggccacttagagagcctagaaagaaagcgatgtctatcaccaaggccccagtagtgtagctcagtgtcagactggctggtatgctgaggccctgaagtcagtcctcattactgcaaaacatacaaaaagtacattgtaggtagtagttaatattgatgaatatgaatatgtaaacattttcaatgcctcatttggcctagtttactatacttttactttgggggctagaattaaaaagttgtgtgtgtgtgtgtgtgtgtgtgtgtgtgtgtgtgtgtgtgtctgtgtgtgtgtgtgtgtgtgtgtgtgtgtgtgtctgtgtgtgtgtgtgtgtgtgtgtgtgtgtctgtgtgtgtgtgtgtgtgtgtgtgtgcatgtacacacatgcgtgtaagagtgaggttctttccttctctctggactacctgactattgcttggctttgccatcctcaggcctcacgagtcgtgttggattcaaagtaaacaacgaggaagtagtcctgtgactggaaacaccagaaaaattagaagctattggctgcagtgttttctcccagacacagagcttcagtgaattctccctagcatggtccttttttagctatctgctaggagctctatagtccttgagattggtgccccattagaaacacaagcagatattttctgaactccttgggacagtgagaccaaggatctactggttggctgtcattgttggttgcttgaagaacaactataccctggtgcttactgcaaaggagtttgatgataaatatgaggcaacaagttagtaggtagcaggagggagagcgtgtctgtgtgttcagagtttagagacaggtgggggatcacgtggttctaactggctggataactcagctaaggatgagaccaggttccctccctgggagagatgccatctctgtgtatgggattaatctctgtgtgtcgtgtcttataggaagcctactcttcagtccttctgacctctttctcatctcaccatgtgtatcttccctctcactcttgtaaagcagtcccatctttccatactaaatgctctctcagaaatcattactgttctcaggcattttattgacctgtgctctagcgcaggcattgtgctgatagtgcagagatgaacagaagtgatactgactctgcctctgtaaaatgtttatttcaaggccaagatcagctctatcacaacccatgcaaggaccagcatttggaaactgctgtgtttagttcttttttaaatttaatttgtctagcaaaaaataagtaatatccttttgagataatttatagaggaatcacacagagaaaggtccacattccagcccatcaacccaagggtaagtcagggcttccatcacttctaatatttatctcaggtgtggaactgtgccagaggttgtctcctcctctgtgaccttccgtttgacttggtggtcttgaatgtgagctgttttctagctctgttctaaaggttttccagccagtaaaatcttcctcccaaaagtgtgcacataaagaaacttgattatatatttaaaataaaggagacttctcaagcaaatggttatggatactaagaatgaacatgagacaggatagtatattgattggaagatggcacaagtccagcttgtcaatgtgtccacacttacaaatgcaatgactacaagacaatctccatccccaaggcaggaatccttggtgaaacttaagtgtgattggaataatgtgtgttgttgaattgctgttcctaatggtctttgctttacttgtaggtgtcaaaccctggtccaacatcatggaaatcttggaggaaaaagatggagttgacacagagctattggtttatgcaatgactctagtgaacaaggttggttaatgtgtgttctagattgtgccctcaccatcaaataaataggagttaaagccttaaaccttggtacatatgaagagggtctttatagatgtaactcagtcatttggacaaactaatcagatatgattgatggtataacaagaggaaaagagaaaaaggggggcagggaagaccgtgtaaacacagccagggaaaataatcacatgaagacagaggcaaaggttaaaatggtgctctgtgggccagcaaggatcaaagttggctaacaaccaaccagccaatgaaggatcactggtacagagatcagctggtacagagagcatagccctgctgataccttactttcagatcgttaaattatgacttgttaaggcacctcactcagggtaactagttacagcagctgtggaaactgataccatgtggaagtgtaaattgttcgtggtgagccacaccatgtggttccagcttggtagctagaaggcaatagaagaatcgtaggagggcatttcataccaggactcacctgtaatgatatttcccctttagaattagcaccctgatttggaagaaatgatccactagtgaggaagacacacgttttcttgcttgttaattctgagtcctgggctgaggtgaggactctggaggcagagcccatctcctttacgttgtcatggcctcacatctgtgttcttgttgctgctatcacatccctctctagtcatcatcttgtaggacagccacagtcctttgaggttgtccctggaagtgggcaccttggttcccatggtgatcttgaacaggctgtcttggtcctaatgcacatcactcagacagtcacaccctacatcccaagtatcattgtcactgccccccacccccatcccccatccccgaggattgtctatttagactgttgactgtgggtctacagggacaactgcagtgatgaggagaaaggccttggaaggttccagaatccattgctggaatataactgaagacttgcttctcttaacaaagtgaagacatatttgttttgaccagtgtcttctctatgtagtcctggctagaactcaacgtgtagagcaggctgtccttgaactcacagtgatgctcctgcctctgtttcttgagtgttaagatgacagtgtgagccataacacctgtttgttacatttgcactcctcctcctctagattccttctctctgaaagacttgtgagactcaggtgtcttgctttgaatgttaataactcacccctttggggggtatatatatgattgtgctgcacacgtaccttccaatgtagttactgatatagcttttgagggagactatggatctctaacttatccatttgcccatggaaagagttgagggtcatggctcttgactttctcagctgacactgggggcaggtgacattgagaacatgtgctttaccccactggttttatcctgcatgatagttatctctgaaaacctaaggagagacaatttttcttgaagaccaagtttggtctctaatgaatgccagtaaagaattgttagtgacagatcctggcaagacaaagtctgaaagaaaacagaggtgaggaacaccagatgtaaggcagctgtggggcgtcgacagcctcaggaaactcttgccgatgggaccttctggcaatgccatggtctgcgccagctgtaggtgtcttaaccatgagcatggcactggaactgggagacgcccgggtgcggatgaggtggagatagctgagcatattagagcaacagtctggaaaaggtgactatgtgtctgcacagggggaaacgccacagtccttctgcagcctgcatgaataccagaggtccacaggctcaactcaaactcaaggttttcatggctacttgcaacttcagtttggggcctgttacttggcaaaggtcttcaaatctgcttatgtcacacatgtggacaccctgtgcctgccacagaggcaatcaactgggctttaccaataactaccaataactaagactctgccactactaccaccagcaccacaccctccctacctggcatgccttagcagactctattaccaccacaatctcaccctttgggttacaaaagctctaacatttagtaaaggttggagacagggtggtaatgacagggagagctggctctttggttatttaaccactgacactgtgagacaagggaattagctgttttagcttagccccctggggttttatgtgaaaagagaacctcatagggctggggagatggctctgtcagtaatgcgcctgccacaagtgccggagggaggacttgggaatccctaacacccatgtagagacaggctgatgatggtaagagaggtggatccttgaagctcattggccagctagcctagctgaattagtgagccccaagctcagtgagagaccctcgaaggttaagttggaaagacattgaggaaagcattgaaagcatcggaccagaaatcctctggcctacatagtcacagacaaacagatacacctcctgttgactctaggtataggagctggatgaggaaggaaaggagagagagcagggagagtggagtcaaggagattggagatgctttgtgtcatgcgtggacaggcccgcacctctgtgcaggaggttttaagtccaactagcctgccttcctcgagttgcttcctccatcctccatagtcagcaggaattttgagtgtgtccagttatcctccgtgttcctgtttagcattaccaccccgtctctaaccgttactaaatgttagagcttttgtaacccaaagggtgagattgtggtggtaatagagtctgctaaggcatgccaggtagggagggtatggtgctggtagtagtggtggcagcgtcgtagttattggtaaagcccagttgattgcctctctggcaggcacagggtgtccacatgtgtgactgcctcctgcagcttccaagtcatgacctcttatgcagtatccttttggggtctcctgagtgatggagatgatcacgtctctgacctcagccacatgaattagcataaaaaaagctaaaggctgctatttagcatataaaggccttctatctacttttgatagaagttgtcagagaaaccggggttgtgaggtgatcgctatgcaagagttgatccatggcaacatggcaagctaacatgttgaaaataaatttgaaatataagtggtcttagaaatacaaaggcagcagaataaataggggcttggagcagtgtctgggaatccaggctggactaacctgtgagaaatgcaggagtaagtggagacttatctgggctctgagcaggccttcactccagtcttcagtaatttctggttatctgtgaaatccctcccattcccgaggcttcatcttcttcacatgtaaggtgaggagctcgcaggaactcccaaggctcctgttctgagcaggacatggctgagagagcattctccctctaagagatgtagaactcagagcgaagtctggttaccctacctaccctagttaacctgtcttcttggctcttggtagctgctttgaaattccttgtttcacaaagtttcaagggccaaagggaggctctgctgaactttaatggaagagaatcgttaaatgtaaactctcactattatattgattctaacaggaatttcaaatctagaagtatattaaatttccattggcatatgacagctcccacaagcttaactgcttggagcaatgcacatttatcatctcacagttctcaaggggtaggagtccaggcaagtccctactgggttggctactcagagactcacaaggctacaatcaagctgctgaccagggcagactctggcagccttttgtggatgtctgctaaattcttttctatactgtatttcaacgccttgtgtcttgctctttcttccaaaccagtctgagctcaggagagacctatgccctcttttaaaggatgtaccccacttactatggaagaccatctgatttggagccttgatgatacctgcagatcctttcccctagctagcctaatcatgatgtaataactcaccaacaggagtacccagcccccactggttgcagatgctcctccagtactgttcctcaggggcaagagtcctgagtgctcccactcgggagatttcctcattgaacggatttgtcttgttccttgtactattatgtgtttttataaccgaggccaccagctaccacataaacatgtcttcgttgccttgtggtgttcttctgagatatgtttgcatctggttcttctcttgtagacactggcaggactgccagatcaagacaccttctatgacgtagtagactgcctggaagagctgggcatcgccgctgtgtcccaaaggcacttgaacaagaaagggacagacctggacttgctggagcagtttaatatctatgaggtaatagaatgttctaagtcatctacaatatcagcaaaggtcaaagggtgaatcacatgtcttccagactagggttctaagtgtggttcaggggctcccacaccatggggaattttctagaaatgtaaggttttggatcccacccagatctcctgaattggaaactcttaagaatggggctagcagtcttgtccccacaagcattccaggagaccccaatatgtagttgggtttaagaacctttgacacagaggaagctggcaactattctgtattgaagaacatgtactatgctgacagcacctctactcaaggagaaagcaggtagtgaggcagggtggagaaggtggaaagagggatgggggaggggaggggaaggaagaggggagggagggagagctaatcagctgaatatgtcctgtgaagtagaaatttatgggtatttttcaaaaaaactcatcccccattttaaaggcagagtcttatgtagcccaggctagcctcagagtgaccttcaacaccaaatcatcctggctctacctctcacgtgctgggattataggtgcaggccaccatcccaacaacagaaaacagtactttaagcatgtttcacaacatttgctttcttctgtgtgttctcttaccttattaccgtgcttttctgtctatgactgtatatcacaaggaaaatatcaaaatttaacattacacattcttggttatcttcatactatgtgatagcatttaaaatacaaatatgacagtatttaaattgtaggagagttggcaaaatttcccagctcatatttggaaggtgctgtttacattgtcagttatatttcgacaggggaaagacactgttagaatccttgtttcgttttgctttgtttctggatctgtatgcattctacaagcattccataatcagctttctggtcagtcataaaggacaggatgtaaaagaaacactgggcttcttgtctgtccctgtttttctgtgttttcattcagcataagtgactggctaatatgggaaggtagcatctttggaaggacatgagagtgtttcttctctgtgtccatctgcagatgagattcccatggaagcaaagctctcaggattgctcagtggtgggctttgctgactccccatttcatggtctgcctacgggtaggcttttgcatggccccagtctccatcggtgcctttggaagttcaaccatactcaacttcctgttgaaactgggaaactgggtcatttgaggagcctttaccttcctttccttccctctgccttctttttctctattcacccactggcaatctctctgaagtgtcatctccatgaagccttgttggcaaggggcttttgttacttgttcccagtcctccactgttcaaaagcaaatgtttctggtatccatgcctctgtctaaaagttctcatgacaatcctgtctgtctgtcactttgagcaaccgaaatcctatgttccatgcctcgtttgaatgcaagggcccaacacagctaaagtttcttaagtgcttggatgactgtctcctgcaaacatcacacatgtgtatcaccagaggtggggctcaggaagggcatggcttatgctgatgcccaagtcataactcagggtgacaaccaaatattttaggtagcagacagagtctgggtcctcattcctatctgaatgttaatgcatttttagaaaacatttgctgtcctaggcagccaactttaaatatgtgcaaggatagcaagaagaatctatacacagagccaatactttcctcaaaaagactttgaatttctcaagtgcctgcagagatcttgggtagacttctagagtgcttcctactggggcaggatgtctggtggccacatgtcttgggctttctgggacaggcctagttttgtgtaatttaattccatttcagaaaggtgatttgatccatgtttaattaaatgtattgaaaatttatagccacatgtgatttttttcaaatgtataaatggccaagataaaaaaatcttttgtcatctctagctgcatatgtatcaaaagatggcctagtcagccatcactggaaagagagaccctttggacttgcaaactttatatgccccagtacaggggaacgccggggccaaaaagggggagtgggtgggtaggggattgggggggggtatgggggacttttgggatagcattggaaatgtaaacgaggaaaatacctaattaaaaaaaatcttttgtcagatcatatgtgttagtttttagatctaaaactattctttctgtaaggagaaagacatcttaaggctggagacttcaggctgagaaatcgctggtatttttagaacttggtaacaaatgattctcctttcctgagaactttccattcaattgtgtgtgtgtgtgtgtgtgtgtgtgtgtgtgtgtgtgtgtgtgtgtgtgttttattggtatgtatgtatgtatatcagtgatatcctgatgtgtaacaaacataccataatcaacagctataaagcaaaagccactgttcttagaatcaggaatttggcttggcttatctaagatattttcatttggttcagctatctggtggccggccttattgtacctgggaggttccaagaagccttgatcatctggcttgatttgtctaggtcatgaatgatcccacttctttacaggacagcagcatttgtgaaaagcaagactagcacaaatactaacaggcttggtgccatgtttactggtggcctattgagcaaagcaagtcatgtggccaagcctagcctcagtgtagggaatgacacaggtaaggaagcaaggtgtgagtgcctataatgctgtgttgtggccacaacctcttcacatggcactgacatgcaccccacctaacagctgaacggaattgtataggtgtgagacagcaggtttaaaagggtcacatgagttactaaaacagctgcctggcatgggtcacagtcacataatgataacaactcagagacattactagttttgagctccattagaaatgtttgaatagctcaaagccagttacacaactaagcctaggtggaaggggatgacacagggtggtgtgtaagtcactagagacctaatattatacggttatcagtgtagctcatgggtggagaatgggtttagcatgcccaggcccagtggtctctccctagagccatccacccaaaattaatatttgatcatattaagaagttatattaagtaggacaataatatagtgattatagtggttttagcaatcattttagtgaatatattaaaatatttacagatgataatgatataatcttagatagctctttgaaaaattggttcatggggttgaaggcaaaagtgagagagaaaccctgtctcgaaaaaaaaccaaaaaacaaaaaaagtgagatataaatggtgaatattgtctctgtgttggcagctggtgcactgctgtgggtagtgtgcatgtcccaccgttcccactcatccctgtctcttgtgtctgtctaaaatttccacagtaaaggagatttaaaatactatgccaagacaagcattgaaaccatccacctctgggtatttactaataagaactagaatcaaaggtttcagaggtttctaaagcaattgtgcataattcactatagcccctcttcttgttcctacttacaacaggggcttatatacagtccaggctggccttgtgctcagaatattcctgccttggctcccaagttgctgggattataggctgtaccaccacacctgactatacaactctatcaccactaccacctcctcctcctcctcctttcctctcccttcctcctttgaccagtatcttgtcatggacccgaatttgagcagttcccccagtgacttgtacatcacagcattgcctggattacttcctgagattcttccctttgcatgaactttctgttcatctcccctttccttgacatggggcaatgaaatcgactcctggacgctgtgcctctcagggaggcactgtgagaggaatgtcacttgatctttggacctttgaggttagacaaagaattagaaatatctgaactgtgctttagacactcttatatcgctgcaaatgtgtgcttaataagaaacagagtgaacacttaggtcagggggagttcaaatggcctaagagcattctgtcaggaatggggggaaatagactagaaacactcaggaacactgccactggcgaggtgctgtcattctcaagcttgcccacacagtgccacttagagtttaaagcggagatgacaactgtgacttatcacacattgaccttcatttttaatgtttgtgcttccagacaggattcctaagatgggaatttccagtgagattttacaaggatgagccgtaggtgaactcatcaggtcttgcccttttaatactgtgtctgagaatgattgcagggtcacactaagtccatcttatctaaaagttgcggttggaagaaataaggagtgaagggtggaggtagatgacctgttgttcatcagctgtgtgccttcgctactgatagaatcccctgaactttgtcaggagtggctgagccgctgaccctagccaggctccccctgtcaggggagcataggtgtgaaaatatcagaccgttgcttttgcagaagtccactttcctatcctggggaggtgaaaccatggaacattcccagttctccatcatctctttattcctccatcctctcactgggccggatgaagttgtaaacagcttcaaaacaaggaaacttacacatttgggcatatgttggaccgtgtgctccgcagttgctcggcctaacgagctgccgggcttagttggatctggtccagttgggctgcaggttgcctaacctggtgcttctgtgtaatggaagaggatgggagcttcctgactacgaccctctgctggggtcagaagagggcatcactgcttgagtaccactcacagagacacccctcacctttgatatcctcacaagtacagctaccctcaccaagggaccagagagagtgtgacttgccgctggccccatctactttattagtggcagagccgagcacacaaaggtctgctcaacactaagggaaatgctctttttactgtctagatttacaggcaatacacatgaaaaccaagctaggtatgatatggtatgatatgacatggcatgacatgacatgacatagcatgcagatgtacaaaccccatgatggggacgagtcagagaggctgaggggccgagcttgcagccagagtaagctgaagtgagaaatacacagcagggtcaaatggagctggaaagctttagagcaacagatctcaacctctggctcatgaccccttgggggtcagatgctgcggtcatggggattgcctaagaccatccaaaaacacagacatttacattatgattcataacagtagcaaaattacagtaataaagaaacaatgaaaatactttatggttggaggtcagcacatgaggaactatattaaaggctgtattaaagccttaagaaggctgagaaccattgctttagagtatttagcctggagcttgatcggagctggatatgcaaggtctctgaagaaggagtcacacagaccttcgtaaagtaacctttgataaaaggcaagcagagaagtatatggggccaagtggcccaggcttcgcctataaaactgaaagttctctgtataaatttgtattactttttaaaaggaaaaatgtattcaaaaacattttaggatgcttcctaaggtatttgaactcaagttcttaggcttaatgcaaagtgtctttactgagccgtctcaccagccctagagaatcaacctttccctctcccttcctcccttcttctctctctcgctccctctcactctctctgtctctgttatctctctctctctctctgtgtgtgtgtgtgtgtgtgtgtgtatttggagacaaggtctccctttgactcacggctgtcctagaacttactatgtaggccaggctggcctcaacttcacagatacccacctgcctctgtgttaggtgaggatatttttaaaaagcaatctgtcacatgtctttattgcaatatgtgcaagctccaccctagacactaaaggttacccaagagcacagctgttgtcaagtaggcttctggaatcatatagtacataccgctgtagaaagcctttcagaaagactagcagagaagccagcccctattctcctggaacccatggctcttacctgctctgtcttcctctgagcaccctctttgggaaaggcagctcagaaatgagcgggtatggaatccaggaggcttaggaaaacctctgcctcccggaatggagaagagcgaaggcaggacaggaaatgatggccagtcaactggaagtgtgggtgtgaggtccttattagtgctatggtttgcataggaatggcttccagaggttcagttggatccagtcattaggagctggtctggtcattaatacgaggagcaacttaatccgctaatggatacatgatttggttgtagtgttaagtggtggtaacaaggaggaagagtctaggtcatagaagtaggcccccaggggaggccttttaagacaaaactcttctctgtgtcactatctccatcctgactaccatggagtgagcagcttggctctgtttcctaaatgtcctgtaggtgggtatttggttcactgattcttgggtaccagggtggtgagaagctttcttccacagtggtcttccactgtgatgtcactgtcttcctatagaatcaagcacacccaaaccatttaacaccatgaacccaaacaaatctttcttttttaagttgactttctcagagatttagtcatggtgatgaaaagctgataaaaacatttagatttctgacaatttcacatatttggtccatagaatccatagtgacagacactgtgcaatcgcagattgagcttgacctctgaacacatgtgagggtcattttgagatggaacagtggcctgcaatgtagggaaataaacaaacaaaagcagttttaaatctatctagagttgacatacagtcacaatcaaggcctgagaaaagctatcaagtttgacttgcctgatacactcttcttttccaggtggcactcaggcatgaagatggtgatgagacagctgagccaccccccagtgggcaccgggaccggaggagggccagcatgtgttctggtggcactgtgggtgagcaacagggccttgaccgcagaaggagccgtagacactcaatccagaatatcaagagcccactgtcagctcccaccagcccctgctccccgtctgttcctgccttcaaacccagccaagttcgagacctctgtgaaaagtaagcctaactctggtggtgggaagaggatgaaaggtcatgtgtactgaccacgatttccctcttcactagatggtagggcctcctggccttgcttcccgcctctcctctaccatacgtccctcagagagcttccatttaggcttctcctgatggcaagcctagacttgaccttactaaacccatctagtattttgcaaaacagcaaaatccaagtccaaagccatggcctagaaataaatggtatgccacacagatatgcaaggttggtggctctggaggtaatgtagccatacacagattggttttggatatgtagaataaacatgtgtaaatttaaagacatctctctatattcagcacattctcatttcagcatctacttcctcagtaaacatgtttattgaatgtccattataggtcaggaccattcaaaggtatgaagattcatactcatgtacacaacagatgtatgatctttatctttatgaacctcatatctaagccgggagaaagagaatgaggtaggtagaaagagagagagggacccatagacctatgagaattcattatggattcaaaacaggaagcttgatggtacctttgggagcctggtatgattctagggaaaacatcagaaagggtggcctggcttctcaggccccaagtgggccacagaggtaccctattcatttgctgctgaggtcagatgctaggcatactcttatcagtatcaaaggctccacattctctctcatcctggaaatatgtgtaggagtcaaatttagcctacccagcagcctggtgaaggaaaaaataactcagaatattggacatcctttagaacgtcaatcaccaagaatgagtgtgttcctcccaacccccactgcagagagattagcacaccatctccatcaccaagcagtgtgggcctcatggacatgcagcaggccacacatctctttgcctgctaaccagaaagcaggaggagggcctggtttgagagacatgtgcagcaagcatggtccctttctatgtcatggccccagtggtccagtttctgaagttgtatgaccagctctactctagtgaatgtcccagacttctaaatagattaaagttaggaagatttaccatgagctttgcattttgtgacccaggaccttgaagaaactcatccagagccaagccacaacgcacctgaagcacttccccagttaagtgctggcagtttgggcaattgactcagaggaggatgaggaaaatgtacatatacagcagctcaaaaccatttatttaaaccgatggagatgctgaaggcaggcacgggctagccttgttggcctcacgggttcttgactcagattcatgttgtgcttgtatctggcctcgttcttcctcttctgcttttcaaaggttcatatgttgtgtgtttgagtgaccgcatcttctggtaagttgtcaaggatgacagcggtgcaggggattttcctgggagcagctcatagtctccaggttctagcctcagcaggaattgaatctggggtagagagaggacacagagagaccgctctgaacattgcttgtcttgttctttccaagaagtatgcatatttcattgtgctgatgttaatactttaatatgaatttagtagcatgtgggaaaagtactttccaatttataaagatgagaagacatcaaaaggagctagggtgtcgctcagtatagagcacttgctaggcacatgcaaggtcctgagtttggtccttagtactgcaaaacaggaagtgaagggaaattaaaagaatgaacctgagaagagaagacattggacagtctggtaactttgaaataactttgtccatagagcctgttggaggggatcaagggtggtaggcaatggtacaattcacttcaaagcaagagtacaattcaggaaaggatggcgagaaagaaaatgggaaatattctccctgtgcttagtggaggcacctgctcaacctctgtgcactcaacataggacttcagaatcaagccaccctggaggcccaggaagcaaggctgtgaactccctggacatacttgattctttctacagtaaggttcctgtagatgccacataggaggctgggttttattcttctgtgacacaaatgatgccagcacattggagaagacagaactgtgaaagtcaggaggagactcatggtgttggaaatgtgtgtggaactttctgctcacatcatttgagtttagctctcaaaaataaaaagacccccttgaacagggtgggacaagtgccagacagaaggtatggtgggctttgcaatggatacaggagtaggggatgggctgaactgtgagttaaactcaattcttggctctcagtgttcagagctacttcccaccaacccactcttaaacatttgcattggacaagacttacccttcagactcttaggaaaagaactggtcttcatatgggcatgtcttcactgaggtaaatacaaatattcaagaagaattaaaaaggacaccacatcacacttccttacagacataagcctgccaagattattgctatcattttagtaatgatagtgtgaccctggactcatattaccatgtaatggcttctacaatggtcattggccaaatgactttattaatcatccgttaccggagacatttttaatgtaatgtttatatcatagcaaatttcatttctgtattttatttttgcagatttggttataagcagaaagatcgtaccattttcatttactactgagaaaattatttgaggttatctagttagcagaaatgatcaaaactttcaaaccccagcaatccatttcattcaaattgccaccatgtatggtcatctgaaagactaaaacatttttgacatttgtctagccgaaagcaggaacccagtggagtgcacgcacaggctcgggctctttctttcatgaacccctattctacccacatacttcctgcttgttattacagtctctggccttaatttacctacccaagcatgcccctgttcaaccaggtgcttgctttcagcacacaacaggtctctttctgttctgtcttctagtgtttctgggtggaaacactgcacagggccttgcgtgcaactccactccccatcctgttgagttgcatgcaacattccactctccagaggtaattttgaaactcactaagtcaaccgacacctgtgaggttccatctagctctcagccatgtgtgtagttcagaacacggaagagtgcctagcaagatgtgcacagtgacagctggctggggagtggaagacctagacttctgccacgtgtaccaaagggcagtgacggctggctgtcatgcaaatcttagatgtcatgaaatactaatctcccgtgcttcccccaacccccaccaatcattttaaatgcaaaatatatactaatgtctaggctctccaaaataggttttcggccaaattgagttcactggttgtattttaccaactatttttctcaagagccagctaattttaaagaggggggaggggatgggctgaaattgccaatgaggaaaatatgaggaaggacagggaaaccactataccatatggggagactgggcaatctatagttagggttagaacaagaaggaaaaggaagctgtgacatgcttcagtaggtgggcggcttgcctagcatgcacaagtcagggtcgtaccctgtcaccacataagccagatatgatggcacgtgagcataactctggcactcaggtaatggagccaggaagactgagagttcaaggtcattctgagctacattgcaagtttgaggacagcttaggatatatgagaccctgggaggaaaaatcccatgaagagattaagaagatcttgtggatcacaaattcctgtgatacaggtgaagttggagaaggatgggtgataagctgtggtagggtgggaggaaaggggctaatgacacatgcagggagatggagttagggaggtcacagcaagataagctcagttctagtgacccccaaggaagtagttctcaaccaggaatggctttaccattcaagggacacctggctatgcttttgggttatcactactggcatgctgggatcctgtggacccaaggtaggaagagtccaggaatgctatcctgttgtgcacagggcagccctccacgaagagttagctcttgtgcagtgtgtgagtgagtgatacatcaggaaccatgccttaagtacgctcatgtaattggctggagctttcacttccttcttgggatgcttacaggattgggaatggctgttggacaaggtagccaaggttattttattttattttattttattttattttattttatttttaaaagaacaatatgggactccatgtatctgcctcaaatgttcacataccaaccaaactctggagcaaaattaacttgattcagaaaatatcatgaatctgttaaaaattcaggtctgtacatgatattcctggtataaagctttcattggcattttacagctatcacaaagacagcatttttttttttttaaacaagaatggagttgtggaatttcttaaccctggtcactctggcttatgtaagttatggcagaacacttttctagtatttgttttagcaaattttcactcttcagattctcagcaagttacactgaattcagttaggaacaggcttgactaaaacaaatgaatcaatcagcaaccaaacacagccagttcgaatcagcctgagtctatcacattccaaaaaattgacatcttggaatgtgacaccttcatgaaacaaattggcaaggcagccatatacttacaaaacagaggtgtgctagcctgaggcaggcctcgtgaccctgtgctggggtaggtgtgcaggctcgtataaccagagatgtgcaggtggctggggggccagattcacagttcttcttgggttgctgatgttgtcaatggttggcacagaagttaaaaggctaaatacaagcattgctgtgttttctgtgtaagttgtatgaagaagaatgataacgaggtgcttgctgtttttgaaacagcagtatccattttaacgaattgaaaagtcattaggatgaaaacataggcagttgtgtgagcttttgctggtccctctgccccagatagggcactaatgatagacacaaacaattcgacccaagtgcagctctaagtaccaatgaatttaactggtgttactcacaggagtgtgggcaacttatgggcagctacaccactgaagaaaaagatctcccagcaactactagctgccagttgcctggcagatgcttatgtgctcggtaaagctttctgagcattgcagctgtcagtattagtgtgatgctatctgtccctactataaagcaatggccaggtgtaagttgctagaaagctgtgatagtaaagccaggcttcggacatttctctcatgcctgtcttaggctcagctccaaagagatcctgaatgccacccaattggtggtagagctgggaaggtcaaggtttcctccatggaaaggtgaataacagtagaggtaccactcaggaagcactcacttggaggaacagggctgaggatgggggatgagaggcaatggagtcctttgatgagttctgggagtcagactctgagaccagcatcagggtgcgaatctgagtttattgtatagcaaataagcttatatacagtgtttgagccaaccccaagcctctaaatcctcaggcaattatcttactctactgtaactgtgccccagtgaaagcgctgcatgatgctgttatttagaaggatggggggggggggaacctcaccactggttaggactttagtgaagacaggggaaacagcctccaccctggccttgcttccttttgttgtctcactagtgttctgggagccatctttcatctaatggcttgtatggctgatcaggacttttcaaggagtctcaggagcctgtggtaccttactctccatcccactctttattttacaaggttgacctccacatccactatacttgccatgtgttgtctggggtgctaggtagttttttgtgtattgtaatttccatggacaaagttgtagtgtcctttttatttaatagacaggggacttgccatagattgtactgctgaacagtgaccagacatggcttagagcttgtacccaaccgaacatgactgactggaaggactctctgatgggcaagaatgtgtttgagaggggcagtgttttagctttgaggggctaattagattccctgaggaaaaaatgtcattcagaggaaatgattacttgagcttggtggtcttaaagatctgtattgattattggtttttattgggttttagttatcatttgtattgcttttctcataaatggtcactactatggcttctggaaaggacttctgaaaatgctaatcctggaacaaagcttcccaatggacagagactaaccagccattccggcagagatggagaaagaagattgcagagaacagacactcattgagaagaagcgtagctctaggtgcaggaggagcaggatctaatgttttagcatctgaaagtcagtacaccaattagtggtccagtgggtggtgggatgaggggagccaggccatgaggtgagcctgtgggcgggagtacaggggagagattggagatactcactgtgctcctataaagtgggggaagcgcattggcatgactccatcagccgcaggaagcagtgggcaaatggagagcctaattacagaacccagtggaccagtgatctcatcttcctatattttgataaggatgagatatacttggttgcttatgttttaggacaggacttctccacagggctctgttgccagagttacaggattcatccagtggttacctgtggggtctgcagcagagtaatgaagttgacccatctcttgggaattgttggcaataagcaatctgtttacaaggggaaagtgaactatgaagcaagtgggcatgacataacattaacataaaatctttgcctcgggtgacttattaagtgctggctcctacagctaggcttggccagctgcagtaaggaacagatatggtggtcaagatcagaggtatgattgatcctcaggcttgagttcagccatagacctccttaagagggtgataggacagttaagatacacagcaaaaaaatgtgcaccttagcagggtgggggttatgttagccacttcacaccctgaagcttccccagctagtgttcttttatagaaggtaattgttaagtaatatggacatgagctggagagaatattttattatctagcataaacttgctagaggatttcacaacaaccagattaacaagcactggtaccatgggcagcaagcagctacttgggaagggttatctgatggtaagtgatctgttgtgagtgggctgcactcacaaggcccgtgacctcctgaagtattactggatggcagccaggggtgtggtgatgtccaaggcccttctggagcactgtctagcaaaaggcgggctggaggaaacaaagactgggttacggaagaagtagcttggggagggaactacttgggctgggaggaagaagtcaaatggtaaagtttctgacttttggaaaaaccatgactagattgccaatttcttgggagttcaatctttgctgatggcatggtatatttggggatctttctagattctgaggaaattggtagacactgatcctaaaacccacacagagccagcaattagtttcagatggaaaagtcagtgtgtgtgtgcgcactcacgtgagtgcgcatgttcacacacgcgtgtgtgcattggggtgggtctttgaatgagacctggaagtagaaacacctagaggatagaaagtgtggggtgtggtgagatgcagaagagtatggtttacaggacagtgacttgatcacatcaatcagagtttgagctgattcccaagcacccagtagtgtaggattctgggctggctcactcagcagcctctgggtatggtgtgtttgaaagacctagaactagtaatccccagtcatttggacaggcacctggaggaaccaaatatgtacagctgagaggtgaagcccaggctggagagcaggaaaggtaaactaagaggcagagaaacagaggcctggcaaagagagtattggatcttacgaaatgataccgacaagactgccacccactccctagtcaggggacttttaacgtgctcgtcctcaagtgtgagtgtttctcaggctagtggactctgacggtgtgagatttcacaaggagaccagactattcacatggtggctaaagggaaggcctgactgatttggttggtgaagggctgagtttgctcccctttgacctgtacagaccctgtgtttcctataacacacaccttcccatccaggatgctcacaacctttgctgctgagcttggacttccaaggtggtccttgatggtgtggacatgaggacatgtggttcccaagaggcctttgagaggagagcatggttttttcaagagttgttgattgattagatccactcatgggtagagcagtatcagttttgcttcctacgttctatggttaggctaggcatggtggtacatacctgttttcctagtacttgagaagcagacacaagagaatctctgagcatgtaggaccagccagccgggactacatagcaaggcaccataaagagaaggaccagggagagaaggaggggagaaaaagggctaaatggaggaagcctggtggtaattctggactaatgacagataaccccgaagatacaagttggaggccaaatgtgagaacaaaagataagttgtctctgaatacaggcaatggtgatgaagtgttaggcaaaggcccatggaggactgaaggaaacagacctggccttcggccacactgtcactctgtgatcagaaagatggtggcaatgacagaaacactgtagtcatgctgaaacaaatattctgactactaagcatctgttcaatagctggcaaggaatatttgtacattcagcaggatgcctctttctgaaattgatgctgttctttcctatacagaggtttgtcagattcgtatagtcacatttgtcaagtgtccttttgtcagcatgtggtttgatttggttttgttttaacttgaaatgaggtcattattatgagagacttctcagaattgatttgttgtgggccagacccatatacctgtgtctaccccatggtgtcatggatatctattgcatctcttgcttcctggtgttagcaggacannnnnnnnnnnnnnnnnnnnaatgcctttgattatcctaaaaagctttccaaagacattgtgactcagaggggggccagaggcaattctaggaactttgggaaggcttggttacagaatctccattaccccagagacatcatttcattccggggagctttgctcctgccatgtggttttggttttataaacatgagattaaaaggtgagtagagatggaccctctggaggaagtggccagtccaggcctgctgcatgctggcatttctcccttaaagacccatggacagggcagggcaaggaggaggagtggacagtgtgtcatggctgtatgccatgggcaggcctcctgaatgggaggcaaatgcttgcaagactcaagatagccattttctgaccctacaattcttaaatttatgaccagtgttgcaaatttgccttctcatttgagggtagaatagtttacatggtaacatcagaagaagaaaattttcaattgcctctgacctagtgttgtctgtgtgtctggacttgtccacagccctgagagcttttgtcaccaaggcgccttttgtaaggcatcttcactagggaaactcaaactgtctgcttttccagagcagccttgtggtaacacattttatactgacacatgttctgagttttgcttttaatgactgacctagtttggtgtgctaggaacattagcaccttttatcaacagttagtcccaaatcttatgcacttactactctacttgtatgttctcatgcctacatattctagcatttgaaactatggccattataaagatcacagtttcataagacaatgtgcaaatgaatatgatggcagtacacatgggtggctttgggaggggagcagtcagctgtgtggtagggggcaaaggcagaaaaaaggttgggctcttggggagaacttgaagaagtgtacaggggtagccatggtagtgtttgtaacagcaaagaaccactgttataaggacaacttggaagtgttgcatgatgggagtagctaccagttgtgagaagtgcatgacactggaaacaccagcacacttgccaggcatccggtgcagagcatttatagattatgcttcattggtttttgtttgcttgaaactcggtctcacatagcccaaaactggccttttgagtcttgattcttgactattgatttttctgcctgtctcccaataccctcccggaacaacaagtatgcactaccacacccaacttcaattattttagtccaggagtttttcactaaattcagaacagtatttctaataaaagaggactggctttttgtaactaatatactatcttaaaagactgtcaaatcttgtaaaaatattaatgtaaaaagtcttttagaaaagaaagttgtgggataagactgcaccaggaaaggataagatggaatgagtcttgatgagtaaggatgagaagaatgcttcagaccatgggaacaccttgttcagtgggaaatggagtggaggttttggtatgcctgagtgtcctataggtagctggagagataagattgtggaacatggaggaaaatagaggtggtgggagatggaatgagctcatatggtaagcaggttgggccatgcaaggccttggaactcataagtctggtaattatttggcatgtgagttcagccatactagcattgcatatttgaaacaatgcccaaatacctgattgcagttggggaaaaatagaaatgagagcccaggtgaaaattactgagggaaaaccactggaaaaaacagtggtagtttggacctagggtagcatctctgaaccctttactatcccatgctcagtcccagccttatgatacaattaggaaaagtaagacttgcacatctgtgttttcaaacatctctcaagggtgtgacttactaggctgagatgtccactggccatgagtcttgggatttagaggcatgtgttgggaagagttggtagccttgtcacttgatctaccaaagagccgcttaagtacgagagtgagcctagtcctgtttgagtcacagtgggaacgataggtatgaaaagatgcagtgagactcagtaacatgcagtgggggctgtgttaggttttcatctatgacaaaacatctgagccaaaacatttaagggaggagagatttaggctcatgatttcagaggtgtctgtccttcatggcctggaagtatgacagagcagaacagaagaagaagttctgtgtatgatgaggaagcaaagagaaagttcttgccttggtgaactttttctttcccaactttttaccccatctgaacggctagcctagaggattgtgccacccacaatcagggtaggtcttcccacattcagctacttctctctggaaacactctcaatgcacacaacggagggtgggactcaccaatttctgaagcatcatttctcattctaatgaagctgaaaaatcaagattaattatcaagagttcctggagtatatcagtacaaaaacacatctcaaagcaaagagaataagataactcattctagagccaaacatgaatgactgcggctttaaagtctatggccctccatgaaactggtcacatgagattttattagttacacaacagagaaagtcataaatcaaaatgtttatcaaatgcattggtggagagggtaggcttcggatgctatctggtgacagcattagctttgacatggtaacattttagggatctactaagactacattgtaagattttgatggccacagggtgttaggtaagccacaggggtgaatagtacataccttttaaagggactgaaaatagttcaagataatttggctctgattcgccccattttatacctctacatcattttgaagttcacttatttggccttgtagcatctttaacacagttgtagcctctgtttctgcctttccctctgtatctctatgccccttctccctacttctgtctccccctccccttctctccccacccctctatcccccttggaacttcaattcacaggtgatgatctttgtggatagtttaggctcttccttttttttttaattgtcctgttacctcctttatagacaattcttcctcgtgggtatctccagcagcagcagatgcacaataatggagaaagcaactgcaagctacacaaccccagtggttactgctggcaattttgtgggcatgactggagacagaatagaaaacagaaatgaggttgctgggaagaagcctagccgaaatgcaggatttggggtttatcgctaaactctaatctacatgattaccatattagaagttgattgtggaatgttaaatccacagcgttcgagaaacacgtgaaagggcaattagtgtagaatcaaacgaggtcacaaattgaacaaatctcaccatgcactgaaactacaaagcaccgtggactccgtgtagtagctatacttgacatctgcgtctaaacacacaattccatgtcttgttcatatctaggaggcatgataagtttatgccttctaaatacactccccattagtggaaaacttgagacagtagaacacaccagagagtgcctttaaagaggctgcccatctttaccccaaatgctttgagaatacatggtgagctgccgtagtcatctggcccaggcctaagcatgaagctcatttgcttgaagacaattttagtgtctgtgttctgatgcaaatctatcatgtgaatcaggtgtggtattttcacttagaatgagttgccagtgtttagaaaatttcaggttttgtgggtttcagaggtttcaggtgagggatgctccacctgtgtttgacttacccagagaaggcatgcgttacatgtgtggttatgtcagtggtagaaggaggcatcatggccgtttctcccctcagtggcacaagccagaagtagaggttcccatgtggctgtaacatagtcttttagttgtaataggagagaaagccatgggcaggtgaagaccttagagagattgaagccatatctgcagcgtgtcgtctgaggccagcaacctggaagcgtgcttgctgccttccagagatgcttgggaaactgcagtctaccttcttttgcattgttttcttagaactttcaggtacatttgaagcaatgaactagaaaccatagcagagaaaaatatcctttattaacataaaaccaaggtagatgtggaagaaagacagaaaggaagagagagagagagagagagagagagagagagagagagagagagaaagaagaagaagaagaagaagaagaagaagaagaagaagaagaagaagaagaagaagaagaagaagaagaaagggaaggaaggaaggaagggggagagagagaaagaaagaaagaaagagagagagagagagagagagagagagagagagagagagagagagaaagagaaagagagagaaaacaaaagaaagaggctcctggcctgttgctgtctctggaataatctctttacacctgagcaaatctgcagccccagctactaactgtgtttcttcctgttggtatttatagtctgtaggttgaatctcaccagataacaagaccctgttttttttcaacaggaatgtgctggaaacattagtgtttgactgtaatcaaaacaggaaaataaaggttcttgcctcaaggtgccagcgcactggccagcttcttgggtgtatttggcatttctgagctgtgctccatgctctttccaagtggtgcatgtttcagggacaataaatactttctccatctaactttgggctgtcaccatggaaacgctggagcagcagctggactctgtcagatgtctttcagtcatttggctggtactgatcttttgagggaacttttatttcatttggcagatggcaaaactctattttcaaatgacatcaccactgcacttggtcagatatttgtcgtaactgattaagaacactaattggaaatttgcaggcttgggccctgggtatcctagaaacaaccttaacattaacagaaagcgtgagtcacagaggccaagtagaaactagagtttaagcatttgctaatgcaaaatcatgggaaatgagcctgagtgagcactttttgtcttaaactcagcaaagtatttctcggaaatgctttttatctaattatgatataagatgtcccaactgtgtggtactagaatagttgtcatccctggttcataaggttttgttatctgtgtgtgtgtatatatatatatatacatatatgcatacacacacaaacacacacacacacacacacacatatatatatatatatatagtttttattaacataaagatcattggtaagactgtgacctacctgaaaagttggcagaggaatgcccaaccttttgacattgtgacatggcattgccatctgtgaatgtggtggaccgtgcacctatctctgctgggatgcacttggcctgccagctgcagtgggactcacctgatgctggcacacactcctagctgacattgatctgtgccccttgccctagagtctggagtgacaggcttacctgtcattgtcttgtgggttgttctgctttccacaattaagacaaattatgataaacatgtgtgtaactatgcaatgtattattaaaatttatttatttttcaataaatatgtcatgctgtgtgacactctttcaacttgtttcccttggagctcagtatgcttctgacagagtctgttgtcatgggaaactgtacttactattttccccactgtggactttgccatagtacattcattctttttcttcttggtggacattttggttatttccgtagctgaacagttacaaacagtgcttctgagggcattattgggatcttcatcgtgttcaaaagtttgagggcactgagggaagggtctggcaccgtggacttcttagacctaatcattccttgttggggactatactgggcactgtggcagcctttacttctgcccactagatgctaatatctagccatccactcagatgggacaactaaaaatgtctccagagactgagacatgtcctttgggttggtaggggtcatcttggtccagaatgtctcccctagggtacagcagtgtagacttttgatatcctgaaaacaaatgtgtttacaggatagttccagttccagtgttaaagtgtttaacccctcacagcctcctgtcttagactcaaaggatggagacggaccttttcagcatgtagcactctcagacaattttgtatgatagaagtgaaatgttatctcactgtggtattaacacagcctcccaacttagagcttaaaatggaatcacatgagtttatcagttgtgacaattttgcccactttttaaattaaaactttttattagttcgttgtgaatttcacatcattcactccaatccaagtcatctacccctccctggtacccactctctgcccttgtaatctcctctacaaaagagaaaacaaaaatttgttgtggaagcaaatagtgcgtcatggtgtgttccatggtatattattttgtccatacatctttgcttgtaaatgttcattgtaatgagtcctttgtctggtacgaggcctctggcttttgctactctatcaatatggggatctcactgcgactcctctcagataccctgttgttgtcatgtgtcatggagttcctgtagttttggatctgtaggactgggatgggctagaccacaagtcccatctccagcaaactgttgatcaagctgagggaagatgacctctcgctagtgattgtggacagtgagcttggtgctgtaggagcaagggaaggagaacagaaccgctggtgagaggtggtgtgtgagtacaggccgtgctagtgtggtggagcagggccaatgggctgagcttgcctgggcctttggcactgaaagaaggctgtgccctgatgtccactggtctctgacagaggcacccaacacaggcactgagacacatcctcatgaatgtgactgtatcagttctctggtcttcttcctgccatatctgatgagtcacagacacattgcaactgagtgaaatgtatggaatgagaagttgacttaacagtttgaaaatactagtcttagaagtgtgtgtgtgtgtgtggtggtttttttttttttttttttttttggaaaaagtggaaagatcatgatcattttaacaaatgaatgaaaattatttgacagaatgaagactgaatacaagaaaatatatatatatataatgtaaaaagcattagctgacagacaaagtggagcttattaagaattaatcccagcacttgggaggcagaggcaggtggatttctgagttcgaggccagcctggtctacaaacggagttccaggacatccagggctacacagagaaatcctgtctccctgtctcaaaacaaacaaacaaaaaacaaacaaaacaacccccccccaaaaaagaaaaagacttttattcataaaaatcaaacctcacaaagtaaatttaaaagcaatgcagaggaaagagaggattcccatgacataaatattggaggaacttataattataattataatttcaagttgtgtggaaaagttcaattagaaaagggagcttttcataccactgcagatcaggacagaaagtatagcaagaacaggtgcctgggctctgcagtcaccttccaagacccacccttaatgatccacatactaagtaaacctagcttccccaggtagcacattggctgggcaaccagagttcagaactggtgctgctgaggctcgttttatatttaagccacagcatcttccatcagtgagaactgctggataccggtgttaaaattggcttctgtgtgcattttcatggggttgttttatttgagacggggtcttaatacgagctctagctagtgaggaattcattatatgaaccaggttagccttgaacttgcttttgcctcttgagtgctgggattgcaggcatgtgccaccatgaccagcaaatggatgttccttttggtgggagttggggagtagaagttacagacagctccagactcaaagtatccccatagtgtgtgaatacctgcagaaaccccagaggtaacactgaacacacccctgaggtaggggatgagtctggttcctgtaaatacccactgaaaaggaaggagtatccttctagccctgtgggccaccatgggggttagttaattagtcaacaccagattggccagcccctcagtgataaaaacatacaaactctgtggttgcaggaggaggtggccatcaccaagaacatttattggttgattcagtgagttgggataagccacacagaaggtctttccaatgcaggaagattctgtgagaatcatatgtagagggctcagggcaatggccttcaatcatggggacaagaagtcctcttctgggttgtggcatcttctccccacactgaaggttccttttcctagaactacctgggctatcccagcaacagactgagagatcccttctcctgtcatctcactgggtttctttgtgctttgttgtcctgttgtgatgtccatcttgcttctccatcttgtttctgtgcttttcttttttcctggtcttgtctcagggatgaggaggaggaggaggaagaagaacagccaatcacggagcccaattcagaggaggagagagaggacgatgcccagtgtcagggcaaggacaggtactgaaggttggacccacctaggctcataccaaaagccaggggcaccttcctcacggaccacttgccgccatcactagttcatgatctcctgtcctcaccagctcacaagggcatccctcatgttcctgagcacaagctactgaatgaccacttttgtcgaaatactggaacacactttaatctgaggcctaggaggaagagtgtgggatcacatggttttctgaacactcttccttccatcaccagggcatttgctcaaccagatcaataggattagaaagtctcatttccactaaggagagttgaaaactttccagaagggtcacagtaagaattctgcactcttcccttttcctaattttgctagtacaatattaatacatatgggtaactgcctggtaattattcaaatatcattttatataagtagaagggaacagttttctttacaacatagaaacttacccaatattcatatttatacccaggatacctaacataggtcgacagcctttcagagagcttgctgtcatccactcacctcaataaagcctattctgtccttgttcagtattagcagatggggcacctaacagatgccttaaattgtatagatatttctcccaaatgatttctttataaagcaagaatgcccacttcatcttccactattcaaaaatggttttgtacttgagtagttttctgcactaactgattgttactgcagatggatgttttttacttggggaggtgttgttaagttacagtagtatatttcttgtacaacttcagggttcagggtatacttagcaagacgctacacctgtcttgttctccatacacataaaagacttcacttaatactaggtcacccctcctgtttctaagtactatggactcctctataaattgacaaatggtgatttccttgctcttccctctttgggaaggcctgcaaagaagcatgtcagcatagagagaaggtagggataagctgaggtgagagagagctatccacactttgaaatgagagaggaaggaggagcatcaagaaatagccccgccccatggcgtgccagactgatggatagcgatgggacagttggagacctgggaaaaggataagtatgacagtcccatctttaatttaaaaatgattccattgacaaacaccatatttaacagttttgtgtgtcaacctcgtatgtcatgccacaatcaagttactaagtgtgtctaccatttcctgtgatgaccctgtttgggggatggcagcatataactgtaactatgggcctaactggtggagtccagatgttgaagatttagtgctaggccctggataagagaaatgggcagagtttgtccttcgtttgaggtctttggtgtggtatcctagggttcccttttctcacatctgtatttatattgaaaggggctctgaaagctgagagtaaagcgcatgcttttcagcagaagacagatctttgtgactaaaacatagagatgaagtttaaatggttagatttcagggtaccctgtagaggaaacaggaagggtgcagaaagtgggtccagaagagccctggggcatggtcagtcccttcccagagcctttttctgtccggaggccatactgtctggatgcttctttgctctctgaagatgtaccctctcaggtggccagcagtgaccaggcccacagatgctcctgctcatggactcttgctgtatatcaagaaacacagggctgaaagtgtgtgggttgataacgagtctctcttgtctcctaacctttgctccctctctctccaatctctgttcctctttcctctctctgctcggccttcctggcccaacagcaaggccagctctgcctccggtcagagctcccctgggaaggatgctgctcctgagagttctgcactccataccacctcaagtcccacctcacagggaaggtggctttctgccagcacagcagcacggagccctgtgcttggtgggacctctgggcctgaggccagccggcctgctgctcgcttgctacctcccagccctggcttggccactcggccctccacagcaccaaaggtgtctccaaccatagacaagctgccctacgtgccccacagccccttccacctcttctcctatgactttgaagattcacccctcctcaccaaggacaagggaggagactctcagacagaaaacaggtagactggcctgcagtgaggcctgcgtgttattaacccgggaaggaggacacaactgattgcccgtgtccccagggcttttcttttgctgtgttgcaaggactcactcagatatagagccattttggctaaactaactctctgaccactgacttcatggaaactgtgagatgcaaaagagtcacctgtgtgagctaaggagatctttggttttaatgtaactactaatatggcttttataactacagtctattgagatctgtgtgtccaccccatcctccagcatggtctttctggcctgcaaggtgaggggagtgtggtaccctctgcctgcagcatggtcagtgtgctgccctctcctttcacatttccctaaccactcccaccgagctgctgctgctgctacacctaacttctgatctttctcttctaataagtgggcatcctatctgtacttttcttacctttcctgtagcttcttgctttgttttctcttatatgttactgtgtttcctaaagctgcccattaatgtcacagaattatcgtttgaacaattcctggagccttaagatgatcacgttatcaaattatgaacatccaggtactatattatcctggtggcagattggaagtgtagccactgtttgtctgtcatacaactaactgccttcactgtcactccactcaggagtaacctgctggagtggagagtagggcataattgtacttatttttatctttccaatgactgtatctatttttaaatttttttaacatttatttattgggtagagaatgcgtggacagtcaaagggcagcttgtgggcattagttcttgccttgatcacagtggtatcagactctctctgtgagtcctggggattgaacttgtgccatcaggcttggcagcaagtgcctttaaccacggagtcatctcgtcagcctctaataattgccttttaagtggtaagataaacaggtcaatccattctaataatatatttcattcaacttactgtatcaaaaatcttttatttccacagtccatatccataatcattgattattataatgctccccctcttagactaataatgatagagcaggctttgttgagcatttattatgagtcatgctctctatttcccatgaaatttgctgcttcaaattatcacttagtccataattgacaggttctatcactagctcctatttatggtaaacaacctaaggctcagagagacccagtaacttgactcaagtccattatctgttagtggatagagaggtagtttcagtacaaggtagcctgttctagagtcaggttctccttaacaagttgtcccactgtagcttaatagctatcctcctgggcttgcagtgcccctgtcaggagttttcagacagagtcttctcaacaagggtaaagcatttaccagagcctgtgatataggaacctctgagcctccgtaactggcaaggattttaactttgtttcaaatgaagccatataaaccttgaccaccatgtgaccaccatgaaatgacccgtcttccagggtcttcagacttcccacttaataaccgaaggcttaatcacctgtgagtggcaacctctttgggttacatacactctagaagaatcttggactttccctcaaagttttaagtagcttgtttaaatttttttaacatgaattgaactagttataagagaatataatttgtctgttgtctaaatgtttacattaagtttagagctttagctttaacttagaatacctctaatttttcatgatgttaggacttagaagtatcacttagcccttaagaaacaggttcttaaagaaacagagcgtaagaagtgggtcctatcactagttctcactgacagtaagaaaggagtggtgcaaagaaactctctaaatggacccgctcctccttcctcttcttcctcctcccgtaccttcagtaattccctctggactgatgccttttcagataattccattcattgtcaccttgaaagtttgccaggcccacatagatttagcctactgaggatatttcttccccttcctaaaaggagaggccattgtgggaagagaggcagaccagagaagggggcccatcagagctgctcaggtggagctaggtaaagaagccatacttagaacacatccaagacctagttgtttttgcttaaaacactgggctccctgtagatctctcctaagccccaaatcctgacattattgtgatcttgcatagtttttacccagtgagtcgagcatgagccttccaccctcccagatggaatctgtgtgcaaggtacgaactagccaaagcttggcccgggagaagatattaccaacctcggctttcccagcaagggatcagcctgttaggatgattgattctgtactttctgggaatgatgttagcacctggagattcttctctgggttcttggtctttccaagctttgttagtacccatagtccttgggaatgagaacaatagaggcctgtaaatttgtttttgtgtgttgtaaaacactgtctcatatgtgcttatgaatgaagattgccttagtttaactaagcaaagctagtcatttgataagattctcggtattgatagtggggttgaacttccttgtgtcctgttgttgtggggtttgtggatctgtgtggtaacagatctggctactcggtagctgtctgcaattaaagagatggtaatagtgaccaacccattagtcattataatgaaccctcccctcctcacacacaaaaatgctgaatagtgaattatgatccagtcagtttggctgaaattgagaagcaaaattgggcaggctctgaggcatttgaattaattacttggccattaggaaaaccagaggaggggaaaacacattgtgcatggtttgtttccatagcgtcatttaaacataatttcagcaacacgatcctgtgaaaacattcagcaggatgtccgcatgcagttggagagcgagttttagtggccagggtaagaagccagtgtccaggcagctggtggacagccagactgggagcttgtgtggtggcagcatccggctctcatcagctctgttcttcccggtgcccactttctccccttcctgtgggtagggccacacttggtgccctggcctcagctctgttctttgcttttctgccttctccaaggcctgtgaatccttctgaaaaattaaaccattgctgaccttgaaaagcaatttgcctactagacatgtagaatggggattttttttttttaaaaaaagagaaaatcctgcaatccatgctacttgagaatcacaggttcaaggccagcctgggaaacttaagaccctgtctcaaaatcagaatgaatgaaaggtggaagaatgtagctcagggttgaagtattcacctcccattcatcaagtcccaggctgaatctcagtgcaacctgagatgggtttaagggaggaagaagaggaagagaaagaaaaacagtcaacagaaaccaagaactgtgaaagtggcatagtcacagaaaaggtcattggccagccctatggtctgagtcttgatggcaagggcctgttgctaaatattcacctgacacatgatacacacagaagaaacaatgactaaggtaccagagttaaaagcacaggatagagtgggggaatatgaatattttctattgcagtgatttattattaaaacttgaaattttgtatccatctcccactgttttaaaagtaccacgaacataattttttaaaattatttttatttttgagaatatttttgcacagtgagactaaactatattatgtcttggtgtttccaattggcccattgatcagcatttcccatgatgccggttgtaaaatgcgtcacttatttatggttgcagaacagttcaacaatgagtaagactccatgcttccttggctattcttgccttgtacctggttgaatttatcaccacgagctaaataatgcaccactgagcattttcatatgcgttattttcttgtgtcaacattagaagtgttaaagtggtttttttggtgctaacatctcatgggacatctttaaagtctagtcgcttgtcagaagtgcctgtctctgttgatgggaattcagcctctgcttcttatgcccaagaagatctgtgtgtgttcatcatagtgagcctcgggagtccctcaaatcctaatgccacatccctgagtgtaaggagtgagttatccttgcctgtgacaagacacgtcgggatcgaagctgttttacatgaatgtcagatctatagaagggttcagattgtgatttgtttcctgggcgttgccttgagcggtagcacctgcatcgaagaaactgctgaaagacatcttttctgagaacagaaagctacaaatcttgacatttgactaatagagatggctaggaaaagatcaaaattcattttagtctaaccactgcaggtttcaggataaatggttgaatgaaactatggtttccttcatgtctaggcagtaggctaaccccagaggcctggaggtacacaagcacccccatgggatgatgggaaaagaacatgatagtttcaaaatgacctgtggtagaattttcagtgcaaagatgtttctttagccaagcgaatgttttttctgcaggtctctgatggcattcatgatgtgccatcacaattatcaaggaagactctcattgttcagctgatcacagtttgggttcttaatttatagtcacaattaactttaatatacttttataaaataatagaagaggtgacgcctatttagaaacagagtcctgctatgcagtgagttttgaagtttgggaaacttctttaatgaagacttatcaaaaggcaataaatctctacagctttaaataatcactatttgtagtggcatcttgaggaatatttttcttgtaaaaagttaaatggtttgtgaagtcttatttatatttattgtatacttattttgtctctatttttttatccaatcccaacctctgtgccttttagatacagcaatttcagcagcaactctttccaatcctccagaccctctcctggacctagtgggtccccatcttatgcatcatccttctcatccccacaggataccaggtgagcttggaggcatggtgttaatcccccttgacttaggtgcaaaaatcagttatattaagagtaatcagaggggggtccttgtggtcaagtatgcctctaatcgtagcacttggtaagttgaagcaggagaaatcaggagttcaaggccatgctcagctatgatctgaggacagcctagactatttgaaaccctatctcaaacaaataaccagggggtggtggcacacgcctttaatcccagcactcaggaggcagacgcaaggcagatctctaagtttaaggctaatctggtctacagattgagttccaaggcaactggagctacacagagaaactctgccttggggggagggggacaaagaatataaataaatgaataagtaaataaataaaagcaaaaatggttaaaagtataagtaagagtcatattctaaagaattttcctttaaaggatcagtttctctgtcaaccacactatttaataagcagatatttcttttgatattcatattttgtttttattattatgccaccttctgtatattttccatagagagcataaacatttcctttggggatgggagaaatggctcacccattaagagcactggcttttcttccagaggagctggccttgattcccagcacccaccatggtggttcataattgtctgtaacaccagttccagggatcaaacaccctcttctgccctctgtgggcaccaagcatgtatatggtacatatatatgcatccgggcaaaacactcacacacgtaaaaaataaaaacaaagaataattatgaatatttcttctaaaatatgtggggatggatgtcttgagttgcactttaaagctagttctagatgttacatgagctctgcaatttgtctcagagacttttctttcacctatgaatgactaaatctctgtagatcagaaggaagtgggcccaccgaggtgctaggtaattagtctatgacttaccaaaagacaggagaatcgtatgggttcatggaaagaatttaacttggcaagcacgctagaccaccagaaactgtctggttattcctcctgaaagccagtgattacgcaaggatgtgtttacaagggaaaggtaagacctgtaatttcagaacaattaaaagtagttacccttaatggcaagggtacaggagttggagaagagaagaggtttagattgatttagatttccacgtcactcactgggaagcttacttaacccctgagggtaaaacgctgattacacccaccctttagagggtgattgtggtgagataaggaaactgaccacacaagagtgcttcaggaagctgtctgtcttcagccaagagagagcgcagggaaagggtggtggtacctcactgggcacctagacatgacggactacagagatcacttgcctcaattaccatttttaaaaactgggatcaggactccacattcagattctcttttgtgtatgtgtaagtgttttactgaacataggaggcttgactgggatgtggaacaaacaaatccttataattccttataattacatgaagaagaggtgtccagttgagcttgcctctcagaggtacccacctcatggcctaggatagctatgactacatcccaacacaaaattggaaacttatttaacagattaagagatatttgtgtgggagtttgtggggtgaggaagtgtatgtatgtatgtatgatgtatgtatgtatgtatgatgtatgtatgtatgtatgatgtatgtatgtatgtatgtatgtatgatgtagctatgtatgtgtgttgtaactcaattcctgttcttgtacatgaactttgtagttggcaactttgtgtaacaatgtcatacaaaataaatgtatgtattctcttaacccatagagtaagggcccgatactcttggtacatgacactaatcaagccatactaaactcttagatttcacagtcaagggtaaccctgaattgaggatgtttagggacattcaggagtttgtgttagggaaatcagttgatgatagtgttttttagcataggttgcattacccttgaagtttaggtatgttatatataatcttggggaggttaccatggagatgacccttgtcagatcagatgcagtatttggatgcacagtaaggaatgttggagtatgcctgattggcattggaaatatcatgtttgctaggaaacaggttcttctgggactaaagtaagttctgccattgtgtccaccatagtacctgggcacgtccatggcagaactatgataatcactggctggaggattcagtgcatcacacactcactagtcaagagcactttggggcagagagtgcttccaagtaggaaagttataagggcaggacgtccatgggcccaaatctcaggctttagagatgttcttcccaggacttgaaaggggtggcctagattatctacttcccaaactttggaagccctagcccacagtcctgacttggctggagggtctgggttccaggttctgaaaacactcatttgagtatcccctgccctggtctgtctttctgaaacaaagcttaagacatgctagaagaaaagaaagtagaggtagcaatttcataagcaatttaagatggggcataaaagatgtgaggcatctgtgtgccactcagggaaacatccagcagtctctaggtaatgaggcctccacagttctcagcttgaagcagccactcacattaaactcccagagagcctgtacactcaaagatggtcactaggggacaacagtggcaggacccactttcatggaacacttttgtcataggaacttggtcacctttgctactgcccactggctagtaacatagccttctagagcttattcctttctttatatctgcatatcctttctggacgccactgtgtgaggatttttaaattgtgtgatgctggcttgaaatgacaagtgtgcatgtttattgtctcaggaatccattaagcctgaatagttcttaccctacccttgatagcttgttttgtgaccataacaatagatagatagatagatagatagatagatagatagatagatagatagatagataagagagatgaaagatggattggtagaataatatgtgatagaaaactagatgataaatagataaatagaaagattgatagatgctatctagatatagataaatgaaagataagtggagacagataggaaggtagaaatgggtagatgataggaatataaggagagttggatggacagatgatgcataatagtcaggtagataaataataggtagatagatgtaaatagatgctaacaagatagacagaagttagatggatgattggacactggacaccaagttaaatttcccactgttgtctaagtatattacattgactaaaatcacaataatggacattttatgcaatttattgcttgaaagctgagttctttgcatgttatttacaatgcaattgcatatctatcagtattttttgctccattgaggcacataactatttttactgagatacatactcagtagaatctgtaagatttattactgagattttatatatccatgtatgacccagagtgaaaagaaacaactcaggaaatacactgaaacattatgaacaatgcatggttttgcaaggagaaaactcattttttgctaccaatcatcaccacccccaaaactagtaaaattagtgcctgagtcctgctcaagtctagaacattagaactctcataatcttgatttggaaatgagattgaatttttaaaaatctcaggaaaatcaggccagtgacaatgccccattagttaccttgaatccctttataagtgggcattaccacttaaagttttctgttcctcaggcttgcttaggcatgttaatgtgttggatgttaataaaacttggaattctattctattattcagggttctctagaggaacaaaactggtagaatgaatccatattctagaaagggctttatgagagaataggctatatataggctatggactggtaaatattccgtctgtaaggttggatgtctcagctggttttcagtctacatcagaatcgcagagaagtaggttctaataccagcaaggaatgcctcggcagcaggatggatggacggaatgcctcggcagcaggatggatggacggacttgtcagcaagagtggggctaagcagacaaaaagcagacgcttactcttccgtgtccttttatgctgactgccaccaggtctggctcagaattacagtggttcttttggctgaagatgacctggatctagggtgcattatcgtcccacctcaaacaaaccatgagaactccttgcaggtgtgcctagatgcttacattttagttaattccagatgtgatgcagttgtaatccagatgttaattccagtcaagttgacagccaagactagccatcacagttgtaattgatctaggaaggaaacactgaagaaaagctttataaaattaatttaatagaaggatattaaggtgaatccatctccagttctgtgatcgtgtcatttaaagcaacattctagaaatggagaacacaacactaattttcataaaattgcaatttagactgtgccaaaacaaaacaagaaaactggaactgcttacaaatatcctcaaggctacaagatgggactgtgtaatgataccaggcttttaaaaatgcctcaaattggaaaatgtgccttttgagcagagaagttccaaatattttctttctgaaagacaacagaattaaaggaatatttgaaccattcatttcaagtattgaaaggaaacaaactaccaccacaatgcaagtaatctggggctgtgggccctcggagaggcagaatacactctcattccctccatgcaatgctctctccatctcatgggtattcacagaaatggtagcaggagcctgttgggtagtggttagaccaagcaagttgagtgagtctacatgaagggctaaaggtaactcaggacagtcaatccttatgcttagactaaatgtttacttaggatgcggactgcagagaactccttagcaggaagaccttggaggatccttggggccagattttagagggacttcctttggatatattgacataaacaccaagggaccttgtgtaccattagcatgaactgtgttttccgacttgagatagtgtcgctgtttgctgtaggcctgcctgcttcccagaataatgtccagaaaccttggatgctcagaatgacccggcttatacagttgtccctgcaaaggtttttctttcttcctggaagaggataagcccagtaataacatccctttaggcagtgagaagtgatactaaggcacatggtatgtgaggctttgtggtatatataatcagaaagttagcactagatccaccctcctaggcagtaacatgttagctacaggtaccatgctgttatagtatgtctctcacttacctgtatagctgtcactgttcacacatttaacagtaatttaccatcttttctttccacaatctccttttaactcctgttctatattcttcatttacatctttgacattttagatgtctcctataagaaggattatacaggcttggggatatagctcagtgataaaaatgttacctactatataaagaggccctaggctcaatctccagtactatacaacaggtaggtaggtaggtaggtaggtaggtaggtaggtaggtaggtagatttatagacaagcaatattttcttgtttttaaatgtttccccattacattttcatatggcattctcttcattcactcctctgttgatgaacatatgacttgtgcacacatgttgactgttgtcagtgatgctaggaggagcatgagcatgcaggtatatttttaagatcctgaatttaacatttttgagtatatgaccccaggagtaccacgactcagaatacaacactgattaagctattttaaaaccatggaatgttctatgtatgtcccatgtgtgctgtataaaatgttaagtttgggaggaaggacagtggtagtggcacttcttcctgtccttatgaagggacaatcctagtgattctgtgtgtgttcttctgggaccagtgtacatgtatacaatgacaatgacattctggatcatttacacagatattcacgtggcatccaacctttctcttgtcttgtcttgccctgccatgctcttgatgaacctgtcatggtgcaccttcctagcagtacttggggctgaaacattctttttaacaggtcaccatactgtttttctctgcatgcggtttcccaccagcccacccagtcttttattaatacatatgatgtagtgggggtgcttcttagaacatgtcattttatacatgtgtgattatctgaaggagatcctaatataattcctaaaaatggacttagtatatcaaaatagcgatacagtctcaacacttcagaaggtagagaggcagggggattttgaattaaagatcatccttagctacatagtaaatttgaggccatcttggggtatgcgagatcctgtctcaaaaaaagattatactttttaaatgttgatgattttttgttaaagtatgatccataaagaccatcaattttgatttccaatatactggtgaaagtctagtttctcatatctttgtcaagaggtagtaaatctctgcttgtgtagtggtgcatcagctaatttgtgacttgcatttctcttatttgcattgtgttgaatgttttctgttttcttttctactcttggcccatcatcactgggctcttctcatttcacattgcaaagcacttcctaagccacaacggattctttaaattctatttatgaagtttttgatgttgcattagattaaggacatatttactatgactcacagttgaagaaggcagtctatcattttgggaaagacatggcagcatgtgcaagcagcacttatccatgtttcatctgtagttaaaaagtagagactagtgcatgtggctaacctgcttacattctccttttcacttagtctaggaccccacccacgagatggtgccttctgtacttagggtggctttcctcatctttattaacctaatgtagaaactttatcacaggcagggccataggtttatctcatagaccagtgttggattctgtcaattaggcagatctcaactctacctggtaaatgtgctagaccttgatcctttccatgttctggattttgtgtttccttctagtgttagtttttctaaagttttcatacctgtgtattttttatgcctgaaaattaatttggtggaggaagggtcccagcctcagttttcccttcgtttcattactggatatttctcatgccaacaggaaggagggcagggttgttgatgtgttgatgtgtacagaccagttcttggggagcagctcccatctcttctcatagctcctctctttggatcaacagctctaggtcagctggagtccccttcctcccagtgtttgtaactagcatgtgactatagcgttgctcttatcctgtgctgttgtggaaatctgagtgacaatccgcaatgctgaaataaaggacacagtaattaatacttggggctatgggcaccaggctgctgccctaaagcagtggcttctgcttccagctgaagcccctcactgatttctcatttcctttgaccccgccccccttgaaaacccatctgctccatttgtgtggcgactcctctgtcctgagtggccagtcatctgcactttcatgtatctccttcctgtattggttgctgctgctttccccgtgcccacccagtagccacacctttgacttctaccctgtgtgtagcttgctggcactggtgccttccccaccctaattgctttctgcatatggaccatttgttctgcatgagccccgcacttgtgtcttcccttccctgtctgctttggcttaattcttgtgctgaccttgctagaatctacaagggcctcaatgttctcctggtctggggtttcaagtccctgtcctatacagagatgtgatcgctgggcttttttggatcccaaatacttgctggctgtattctatcacttgatctgcttagaattatgttgttgttgttgcttttaattgtgtcagtgagctgagatttctactgtccaatggagcatttaaaaatgtaaattggctgatcaacctagataaaaaaaaaaaaaacaaaaacaaaacattgttgagaaaaaagttcaaatagcatgggatgcagaggaaagggcatcctgtttctttgtgatgacaccctggcaaaaagaagctccacttgtagaagatgtctacaattcgtactgtgggattctgcttgcgtgccaccaggtcttgatagcaatctcattacaagaaataagaggtttgggaaagcaaaatgtggtcctaattaatccattgcattccatccaaagtgcagacgagtaggaatgcattggtggagtaagtttatgtagcgtctggtgacaccacatagtgattttgtccactatggaccctaggctctgcatcagacctgacctacccaagaactcctgccttcaacacatgctagaggttttttttttttttttgccaccacatatgtgtcagatatctgactcctcactagtaccattagagtttaagaataagatcaagcctggagttggacactgccataggctatgtgccatttcctttctgaaattcagctctgtgaaccttgactgcttccttgcttatagtggcaggctccatgtgattaagcttgcaagtggcagctttcatatctgggctctgcatggaccttcatcagccttgttgacaccgactgcacattctatctgtacttcagccccaaggaagttatccaatgaacataccaggatatccagaggctcccctttcagactcagtgtatgttctctctggtcaccttgtttgatttctcttcatatgctaagaccaaagaaaatggcatttgttccatataatgtcccagacttgttcacactgaatgcattgtggatatacacgcccgggctttgctccagttttcagcacttgtacattcatcatgaggcttctaaactggtgctcccttacctcctgtggtctcagacctcgaacctgcaaaaccgttcagtgaagatgtctcatcttcatcaactggtcactttgttaaaggacttggagcatatagtaagcaggactgcagcctggagaacccatgacttatgactttttaagatagttttagtgtatatttgatgggagtgtttcatgctggtccgtgttcttagtcttctgccttcggggctctacactccagcaatgctcatttatgcctcttgcatgtccttcctgctaggtgagctttagccagaagatctgctttcccagtctccacagtccaacaaccagctcactcaccctcttcccacacctttgccaaagcttgtaacctctgcttcctgttttcttcctttggacagtggaatatgcatacttattctctctcatttacatagaggatgtggccagtaaccttaagtatccttattataattctgtttgcaaatgagagcaggttttgcataatattgaagcttaagtcaggtctacaaaatggagagtcaagtatcatttgaaaatgcagatgggatcaggtccccacagaactgagaggtacctactaagagcttgcggtaagccttgtgtggtactacccctattggcatgctctcggagcgggagaaatagttttcagttgtccctgttctccactggcattatacgaagactacaaatcataaaggaggttgagtaccatcacccacttagaaaacgcactccaattctttagttcttgttcacttccccctttccccaccatttccttcaggcctagcaactaggagtaaataagtattgccttctaacggaggccctcatgcctcaggcttgattttggacaggccgtgtgcaggtgacactggtcctacaaactagtagtttgtatatatttgcaaaccatgctttgcatagagcagctacttactgagtgtgtgcactgtgcttggacatgttactccagcactgctggaatcatacccagtccttaacttcctaggaaccacatatttatggcagaaaaaggagcaaacaaaaacagagtttccattgtcgtgacgaccttgaagaaagtgagctttcatacaaagagttaagaaaagacaagtcatccaggggtgggagtggggggagaggataggccatgccagaaggaagcgccttctttcagtgggacaccccttcaaggagtatgtgaagctgggctgctagcataagacatgctgcagttttccgtgagatttacttgttgaaggttgtgggtagagacagacagtcaagaggagctaaggagacagaatcagtgtgcctttctttaagatgatgtggggtaagtctagtgtatagagatgaggcaagtagcaacgaaagcattggccccaagtgggagacagagatgggcaggatggatgtcagcctgtcagcctgtcagccagacctgccagacagctggtggcagtcagtgcttctggaagctgccaggagaatgaggagacgtgaagccgtggggacctggagccgtgacaagagaggactggcctcctttgtgctggagaactcatggtcttggacacaaggctggaaattcagagggaaggagagaacagacaagactcactcagtgccaaggtcatggccggcaatcacggccaggagatggctgatgcctgaggacagccagagcctgaaggaatggctctgtgcctgctcatgagccagtcaggtaatgtgagactctctgggggaccaacctccctaggtccctgtgtggaccctgtgactccctcccatggcctagaagctcagagctgtgcagagacaaagtatacaagctctgaacatgagaaaacaaagggagcttgcaggctatagacctctggacagcaggtgtccccagggttgctacatggtgacagaggacagtagcacattcttggagttagttctgggacctgtttatttttgttttacatttcctagtataggtactatgacttgaaagttgagtgtccaccaaaggaccaagtgttaacggtaggtactctctctcagtaggttgttgagtctttaggaggttgggctgagagaaaggccttgaggtccttggggacatgtcttctagaaggattgtatccctgcctcctttctttctctcttcctggacgtgtaaagtgagcagtttgggcctgccacctgatctttccgttatgtgccatgtccctaaatagtggcacttgaaggctcagtgctacagctgtgggctaggacagtttcttcactggaagctaatttcctcagctgcgtcattctttagtccttaggtcatgtgacagtttcacagtgggggtgggagctagacatgttcaacataagtatctttgttctattacttcatgagtattaaatctttctattgtattttctacatgaattaagtggtaattacagtaaaaaaaacctttgcttggctttttgttaatatttagtcagagattacatttttatgtgggaaatgtttgcttcttttaccaataatattttgttttattattttattttatttattttactaaccaactggtattttctcagccattttcacagtaaaatttccaaataaaaattccataggaaatctgacatgcatgtcccagcaaagccattcccaccactgaggtaacacacatggtcacatctatcattttcagtaatgttcttatgtctctctatagctactggtatctttccccatccctaggtaaccaccatcattatggattcattcacgtgtttaaatgagtctctgttaacatgatgccatagtcccctgggagactgagtgatttttgtttagcagaattgccttgacagtcatgcacctgaccaacacattccctttcattgctggtgggattccatcaagacttgctgacttccctgttggtggacatttgggttgtcagtgagcatctctgcacgtgctttcatttctctcgggtaaatgactgaggttggaatgactaatccatacagtagggcatgcatagtgttttaagaaatcactaaattgttcccaaaatgattgcacactggtgtagttccagcttcacagaatgtgatgaaatggatttcttcagctctctagagctgctctttggacccagaaccacttattccttaaatagtctttagaatttgctggtgaagacaacttggatggggacttttcttctgggaaggcctgtacccatgcatttggtttctttaacagaggtcacccactatggaccataaggccctccttttcttcttcattgtgttacagtggtttttgtctttgaggggccttttctacttagtgtaatgtatcaacttaattgctcacaattgtctatagttgcctcctgttctttcaatgtctgtacctgttgcagtgatgtcatctctctgtgcttggtacagtgatttatgtcctttgttgttattattctgggcttatatggttttttgtttgttttcttatttaataatttaatttaattttagaactacatttagtagtgtttaaagatttttggagaacatgattttaatattttcactgttaatattcaacaaacagaataattgttttaagatatagttcgttgttatgtctcccttttcaattctgattttattaatttggatactgtctctgtgccctctggttagtctggctaagggtttatctatcttgtggattttctcaaagaaccagctcctggttttgttgattctttgtatagttctttttgtttctatttggttgatttcagtcctgagtttgattatttcctgccatctactcctcttgggtgtatttgcttctttttgctctaaagctttcaggtgtcctgtcaagctgctagtgtaagctctcttcagtttgtttttggaggcacttagagttatgggttttcctcttaccactgctttcattgtatcccataagttttggtatgatgtcttcataagttctaaaaaaccttcaatttctttctttatttcttccttgaccaagttatcattgaatagagagttgttcagcttccatgtgtgtgtgtgctttccattgtttttgttggtatttaagaccagccttagtctgtggtaatcagataggatgcatgggattatttcaatcttcttgtatctgttgagaccttatttgtgaccagttatatggtcaattttggagaatgtagcataaagtactgagaagaaggtatactcttttgctttaggatgaaatgttctataaatatgttagaaccatttggttcataacttctgttaacttcactgtgtctctgtttagtttctgtttccatgatctgtccattgctgagagtggggtgttgaagtctcccaagtctcccactattattgtgtgggtgtgatatgtgctttgaattttagtaagtttcttttaagttttaagtttcttatgcatttggagcatagatatacagaattgagagttcatcttgnnnnnnnnnnnnnnnnnnnnnnnnnnnnnnnnnnnnnnnnnnnnnnnnnnnnnnnnnnnnnnnnnnnnnnnnnnnnnnnnnnnnnnnnnnnnnnnnnnnnnnnnnnnnnnnnnnnnnnnnnnnnnnnnnnnnnnnnnnnnnnnnnnnnnnnnnnnnnnnnnnnnnnnnnnnnnnnnnnnnnnnnnnnnnnnnnnnnnnnnnnnnnnnnnnnnnnnnnnnnnnnnnnnnnnnnnnnnnnnnnnnnnnnnnnnnnnnnnnnnnnnnnnnnnnnnnnnnnnnnnnnnnnnnnnnnnnnnnnnnnnnnnnnnnnnnnnnnnnnnnnnnnnnnnnnnnnnnnnnnnnnnnnnnnnnnnnnnnnnnnnnnnnnnnnnnnnnnnnnnnnnnnnnnnnnnnnnnnnnnnnnnnnnnnnnnnnnnnnnnnnnnnnnnnnnnnnnnnnnnnnnnnnnnnnnnnnnnnnnnnnnnnnnnnnnnnnnnnnnnnnnnnnnnnnnnnnnnnnnnnnnnnnnnnnnnnnnnnnnnnnnnnnnnnnnnnnnnnnnnnnnnnnnnnnnnnnnnnnnnnnnnnnnnnnnnnnnnnnnnnntagagctggatttatagaaagatattgtgtaaatgtgtttttgtcatggaatatcttagtttcttcatctattggtaattgagatctttgctgggtgtagtagcctgggctggcatttgtgttctcttagggtctgtatgacatctgcccaggatcttctggctttcatagtctctggtgagaagtctggtgtaattctgataggtctgcctttatatgttacttgaattttatcccttatggcttttaatagtctttgtttagtgcatttggtgttttgattattatttgatgggaggaatttctggtccagtctatttggagttctgtttggaggcttcttatatgttcatgggcatctctttctttaggttagggaagttttcttctataattttgttgaaaatatttactgactctttaagtagggactcttcactctcatctatacctattatccttaggtttggtcttctcattgtgtcctggatttcctggatgttttgggttaggagctttttgctttttgcattttctttgacttctgtgtcaatgttttctatggtatcttctttccctgggattctctcttctatctcttgcattctgttggtgatgcttggatcattgactcctgatctctttcctagattttctaactccagggttgtctcccttcatgatttctttgtttatatttccacttctagatcttgaatggttttgttcatttcctttgcttgtttgattgtgttttcctgtaattctttaagggattttttgtttcctctttaagggcttctacctgtttacccatgttctcctgtatttctttaagggagttgtttatgtccttcttaaagtcctctatcatcgtcatgagaagtgattttagatctgaatcgtgcttttctggtatgatgatgtatctaggacttgctatgtgggagaattgggttctgctgatgccaagtaaccttggtttctgttgcttatgttcttacgcttgcctttcagcatctgattatcactagtgctacttaccctcactatatcttacttgagcctgtccttcctgtgaccctggttgtctcagaactcctcagagttcagctgtctctgtgattctgtgatcttgtgatcctgagatgctgggtgtgtcagagctcctgggagtcaagctgcctctgggaccctgagattctggtgtgaccaaattcctgggatcctgggatcctgtagtccaaggtctgtggtccaaggtctgatcctttgttcctgggtatattagaatacctgagagtggagcttcctctgggtgttttgggactggctgtagagtttgtgcccaaggtctgctcagggtaccagactggaagggccttatatgttttatcaagctcaaaaaacattttttctttccttaaaaattttaaattgtttctttgaagtgaaatagaattactcgactttccccctctcctttcctccctacagcccccatcctcctttgaaccacttcaattatacccagctctcagcctctttttctttttattattattgcttacatgtatgcaatctatagatatatatgtctgcaggtgtgtatgcacaatttcataaagatataacctgctgagcccatttttgttgttctgtgtgttggtttcaaggctgaccactctgaatttggcaaccagtaagggagtttatccctgggaaatactgactctccatttcccagtggtctgtagttgtcgtctgtacttgtctgtctagagatagggcccccaaagcttcccctttccatgttaacatgtctgtttatattgccattgttcccatcttgctttcatggccatgtctgggagacattgtttcacagctgaccttctcgtgtccttgtgcttgcagtatttccatctcccttttcagagatgttccctgagccacagatacagaagctgtgaggtctgacgcagatgcatctactggggctgtgtattatatgatcaattggtctctgaattgggtccagttgtggttttctgtaatgatctccatttggtgtaagatgatgaagggtggtagctacactcatttactaaggaattatgcaggtccagcaaacgagcagtagtagatttttttttaaggtgcctggcctccctagccatgggaagctgctaggtttccagtacctaacctgagtttcctcttgctaagtggacttaagtcaaactagacagtgttttattgccactaatataatatgtgtgtatcagttactgtaccataatgtacccaatgctggtcactgtcatactgtcatgattgctcctggtaggatggtgattttcacattatttctcccaatccatgagcagggatgtcttttctttttttcttttttctttttctttttctttttttttttagtgtctatctctttcttcagatatgtaaagttttcattgtagaggtctttcatctctctggtaaggtttaatttaagtattttactgtctttgaggctattgcaaataggagtttgtccctgatctctttgttagtgtgcttgttgtatagaaaggctattgattttttttccattttttattaggtatttagctcatttacatttccaatgctataccaaaattcccccatacccacccacccccactcccctacccacccactccccctttttggccctggcgttcccctgtactggggcatataaagtttgcgtgtccaatgggcctctctttccagtgatggccgactaggccatcttttgatatatatgcagctagagtcaagagctccggggtactggttagttcataatgttgttccacctatagggttgcagatccctttagctccttggctactttctctagctcctccattgggagccctgtgatccatccattagctgactgtgagcatccacttctgtgtttgctaggccccggcatagtctcacaagagacagctacatctgggtcctttcgataaaatcttgctagtgtatgcaatggtgtcagcgtttggatgctgattatggggtggatccctggatatggcagtctctacatggtccatcctttcatctcagctccaaactttgtctctgtaactccttccatgggtgttttgttcccaattctaaggaggggcatagtgtccacacttcagtcttcattcttcttgagtttcatgtgtttaggaaattgtatcttatatcttgggtatcctaggtttggggctaatatccacttatcagtgagtacatatttgtgagttcctttgtgaatgtgttacctcactcaggatgatgccctccaggtccacccatttggctaggaatttcataaattcattctttttaatagctgagtagtactccattatgtagatgtaccacattttctgtatccattcctctgttgaggggcatctgggttctttccagcttctggctattataaataaggttgctatgaacatagtggagcatgtgtccttcttaccagttggggcatcttctggatatatgcccaggagaggtattgcaggatcctccagtagtactatgtccaattttctgaggaaccgccagactgatttccagagtggttgtaccagcttgcaatcccaccaacaatggaggagtgttcctctttctccacatccacgccagcatctgctgtcacctgaatttttgaacttagccattctgactggtgtgaggtggaatctcagggttgttttgatttgcatttccctgatgattaaggatgttgaacattttttcaggtgcttctctgccattcagtattcctcaggtgagaattctttgttcagttctgagccccattttttaatgggggttatgttgattttctgaagtccaccttcttggagttctttatatatgttggatattagtcccctatctgatttnnnnnnnnnnnnnnnnnnnnnnnnnnnnnnnnnnnnnnnnnnnnnnnnnnnnnnnnnnnnnnnnnnnnnnnnnnnnnnnnnnnnnnnnnnnnnnnnnnnnnnnnnnnnnnnnnnnnnnnnnnnnnnnnnnnnnnnnnnnnnnnnnnnnnnnnnnnccatttgtcaattcttgatcttacagcacaagccattgctgttctgttcaggaatttttcccctgtgcccatatcttcaaggcttttccccactttctcctctataagtttcagtgtctctggttttatgtgaagttccttgatccacttagatttgaccttagtacaaggagataagtatggatcgattcgcattcttctacacgataacaaccagttgtgccagcaccaattgttgaaaatgctgtctttcttccactggatggttttagctcccttgtcgaagatcaagtgaccataggtgtgtgggttcatttctgggtcttcaattctattccattggtctacttgtctgtcactataccagtaccatgcagtttttatcacaattgctctgtagtaaagctttaggtcaggcatggtgattccaccagaggttcttttatccttgagaagagtttttgctatcctaggttttttgttattccagatgaatttgcaaattgctccttctaatttgttgaagaattgagttggaattttgatggggattgcattgaatctgtagattgcttttggcaagatagccatttttacaatgttgatcctgccaatccatgagcatgggagatctttccatcttctgagatcttctttaatttctttcttcagagaaggctattgatttttaaggttgattttgcaccctgcccctttgttgagattgttgatcatctttagaagttttcttctaaacaacttttggattctcttgtgtataatattacctgcaaatgggataatttgacttcctgtcctgtttgtatctctttaatttccttttcttgccttattgctccagctagtgcttttaacactattttgaaaaaggaatcagggtagtgggcacctctgtctcattactaattttattaggattgctgccgtgacaattttggcattttggtttcttttacaaaaaacccacagaaatattatcagactatgttttcattttaatcccaggtgtggaatatgaggctgcttcagattgcccacagcagctaactatgttttacgttgtgctctagcagggggtgagcgtgccagcagcagatagactctgtgattgtgccacatttggaattctggaaatttttcagagcatatgtaaatgctagggtccaagagaggtggaatgcgttgttggtgagtagcagttgatcatggtttgttacgtagtaatgcacaaataagaaaaaaataagaagaaattagatatcttaactggaaagatgaagcttgccccaaggaactaaacagccctaacaaggaggatgcagtctgatggtgacctcaccccctttctcctctaggttttttcccctatcttgtcttagggagttgaaaaggtggagaagggtagagaaaggtggaagaaagaagaacctacaaaatagcaaaagagttacagttacagattgctttgagtttttcttcatttaggataacgttagctgtgggtttgccatgtatacagcttattaagttggtatatgttcccttcagtccaactctttcttagactttatcataaagcgtgttgctttttgtaaatattaaaatgatcatttgatttttatctttaagttcatttaaaagatttatcttatttatttacttatgaacattgaaccctttcatttataggataaagacaacttgcctgtgaatgattcttgataggtgcttgtaccagttttgctaatattttcttgatgcttttttgcatctatgccatcaagaatatctccagttttagctttccattcattttctctcttttctttctttcccttaatttctagtctatttgtctttcttttgattaatttatatgaaatgtgctctctttttcccccttaagttagggaataaggatgctgttttagctatagtcttcaagttttttgcttatatttatctttgatttgttcaaagtgcttctaaatttcttttctatttttctcattacctacatcttatttttaaagtgtttattttacttatgaatatttataggtttataaatattcattctgttataatattgaagttaatgtaattctggtcaaataacttacttttatcttctttaattcttttaaacttgctgaatttcacctcatagctcaggctatcttctctcatagaaaattttctgtgatcacctgcaaagactgtgtttcctgatgttgggtggaatgtccgataagtgtcagttggtgtgctggcattgtttcagtgttcaatgttcttactggtttttcatctacatgttccatcatttctaagaaaatagtgacaagatcctatcctataattttatatttacttatctcttgcaggttaattttcttctttatgtcaaagttcatttattggtacatagaatgtttatgattactacattctcctggtgactgaggtcatttattatgttaaaatggcctaatttatccctgataaaatattttaatcatgaatgtatgttttccatactttcatttgaacataaattatgttttatattcaagtaggattagtatagacaatttactgactttcaaaagtctactctgacaatctctgcttactaaatggagtgtttagaccatttatatttaatgtgattattgattaaattgagtttaggtttatataattgctattatatttgtttaatctgttctttttctgcttaattacctttgccaatttttagtgtatatttttattagtctgttgtatttcatttcttgcctcatttgtagtaacactactattttatgttgacactcagcatttatcctaattgtatttatacaatcctataagtatacttttgtttttacttttatatgcattgtagtcccacagtgcattgctgttctgcctgttttaaatagtgtgctatctttaaataatatttaagaaatatttgcctctttttcttttttatgtgaatcaaagttgctaggtggtatcatttaccttctgctagcatttcttgtactgcaaatctagattttatattcttcttgttttatatagagaaaggtcttttttctttttccttgactttttcaggatagctagatagatagatagatagatagatagatgatagatagatagatagatagatgatagatagatagatagatagatgatagatagatagatagatgatagatagatagatagatagatgatagatagatagatagatagatgatagatagatagatagatagatagatagatagatagatagatagatagatgatagatagatagatagatagatagatgatagatagatagatagatagattaggtggatgtgttggttgcttttcttactgctataacaaagtaatgcacataaacaacttcaggaaggaaaggattgcgtggcctcacagtccatcatgggagttgggggtgggggagcagtcatagcagcaagagcctgaggcacctggtctcattattcctgcagtcagaatgcagagagaggtgaatgctggtgctcagaccattttctcttttatacggtataggagtttctaacccaaggaatggagctgaccatagttagaatgtatctttcctcttagacatccccaaaggtttgtttccatggtgcatgtaaaaacccttcaatttgacaatgaaggttatcaatagagggactggaggacaccaggagaacaagccctctcactcaactaagcaagacacatctgcactcacagagactgaagcagcaagcacagggcctacatgggtttgcacnnnnnnnnnnnnnnnnnnnnttattatgttaaaatggcctaatttatccctgataaaatattttaatcatgaatgtatgttttccatactttcatttgaacataaattatgttttatattcaagtaggattagtatagacaatttactgactttcaaaagtctactctgacaatctctgcttactaaatggagtgtttagaccatttatatctaatgtgattattgattaaattgagtttaggtgttatataattgctattatatttgtttaatctgttctttttctgcttaattacctttgccaatttttagtgtatatttttattagtctgttgtatttcatttcttgcctcatttgtagtaacactactattttatgttgacactcagcatttatcctaattgtatttatacaatcctataagtatacttttgtttttacttttatatgcattgtagtcccacagtgcattgctgttctgcctgttttaaatagtgtgctatctttaaataatatttaagaaatatttgcctctttttcttttttatgtgaatcaaagttgctaggtggtatcatttaccttctgctagcatttcttgtactgcaaatctagattttatattcttcttgttttatatagagaaaggtcttttttctttttccttgacgttttcaggatagatagatagatagatagatagatagattagatggatgtgttggttgcttttcttactgctataacaaagtaatgcacataaacaacttcaggaaggaaaggattgcgtggcctcacagtccatcatgggagttggggggtggggagcagtcatagcagcaagagcctgaggcacctggtctcattattcctgcagtcagaatgcagagagaggtgaatgctggtgctcagaccattttctcttttatacggtataggagtttctaacccaaggaatggagctgaccatagttagaatgtatctttcctcttagacatccccaaaggtttgtttccatggtgcatgtaaaaacccttcaatttgacaatgaaggttatcaatagagggactggaggacaccaggagaacaagccctctcactcaactaagcaagacacatctgcactcacagatgactgaagcagcaagcacagggcctacatggggtttgnnnnnnnnnnnnnnnnnnnnttcaggatagatagatagatagatagatagatagattagatggatgtgttggttgcttttcttactgctataacaaagtaatgcacataaacaacttcaggaaggaaaggattgcgtggcctcacagtccatcatgggagttgggggtggggagcagtcatagcagcaagagcctgaggcacctggtctcattattcctgcagtcagaatgcagagagaggtgaatgctggtgctcagaccattttctcttttatacggtataggagtttctaacccaaggaatggagctgaccatagttagaatgtatctttcctcttagacatccccaaaggtttgtttccatggtgcatgtaaaaacccttcaatttgacaatgaaggttatcaatagagggactggaggacaccaggagaacaagccctctcactcaactaagcaagacacatctgcactcacagagactgaagcagcaagcacagggcctacatgggtttgcaccaggtcttctatatatatatatatatatatatatatatatattatagttattagcctagtatttttatgggactcttgactatgaaaacaaatgggtctccgacactttttgtcctgttgagttctcaagtccaacttcaatatgatagtttttgtttcatcttgttatattttattttgtcatgtttggttgctgtctcttggacgcctgttcttttctaatgatagacggaaaggcagagtggatccgaagggcaggcaggtgggggggggggtagagggaggaagaactatagtcaaggtagagactgtgagaaaataaaagggggaaaaaaagaaaagaaaaattatgccaaaataaaatttaaaaaaactgagggagaccaataactgtatatctctcagactttaactaatgagagagtttgtaatcaagagatttgataaaagctcagtgaaaacgattacgtcatctccactttactttgtcttagaagcatttaaagaaagccatggcatgttaaatagcaaaaacaaaatgctaaccaattctttgtcaaaaaccatgttcaacaatctgattatggttcaataaaatgactgaaagatctaataaaggaaggaataaaacagccacgtggaaattgtgtatctttgcatggaaagtattctgcgtaaattagcccagagggcactctaaaaggtcaattacaaaatgtttacgtttctgtaaacagtaaccaaaacacagcaacaactctacaggctgtgtccggggctgtagcaacagctccagggcttcagggaaagtttctctgtcaaaagaatagcatgtttgatccttacaaaccccttgtaacttcctcaggatggatttagaactgtgatttctggaccaagagtgtatgaggacggtgagtctgctttttagtgtatttccttctatttagtgtatttccaggtagctgtttcaacgtatgtgtctgttatcttcaggaattttccacttctataaaacccatgtaactaaatagttcctggtgcaacttaaagaaaatacactttctagtttaaataaagtctctttaccctgccccctccccccaaaaaaaagaatgatattgatggcgttctcagtcttcgtctcttaggttacgctctgtcttctgcctcccattgatttttgacaataatttgccaccttcactgttgctctctgtgtagtgtatctgttttctctggctgcctttaaggttatcctttggccgttgattttttagcaattggaatttgatatgtattgatctggttttcttgatattccttgcacttggaaggtaatgaaatccttgggcctggtgctttataactcttgttatttgggacactttcagtagctttccctccttatgactgctctagttacaagtcaagtgactttccaagcttcattgctgcactatggagtctccttttccttggtttttaaatgtgttgtttattgaacacggatgtcactgtttgttcaagtccaccagtcagtttcctgcaatgccactttatactttcagctgggctcattgattgtgtggctcactgagtctataggctttagttagaaaggctgtacacacacacacacacacacacacacacacacacacacatgcacatactttttttttcctacatcagcatttctgaatcagtacatcacagatcttaccttgtagaacacagtatccttcattcttgggattggttgtgtaatatacttttctgaggtcttgcacttttagctttgttagtcccagctgtattgagcataagatttttccctgactgagtcatgactcctctcagaacgtgaatctctatcttgaatggcttgcttggcagcagaccattgggtgtggtgatggatgagtttagcaagtaggtaagattgtggagtgagttttattgttcctacatttagatttcattggagaccacaaaaaagttgccagcttcttctgaccagacatagaaggaatgttcccatgacccatcctgtttgggtcagccctagagtgtgtaagtaagatctaaaattagttgttagaagtaacagccttgtgttacctcctggttctcttccctggttatattggccatgctcattttgatagataatccgggtccagcttgctttactcaggtgctgttgattagctggtctccctgggcttactgctggctatctaaatggagcaattgtctggctcttggttgggtagacaggagaccacagcacaacactgattgtgcagccgccttactgtgtcctgcctacattgtctgacttgggggacccccaaggctaacagaaggatgagcatctgtgtggaaacaccatccaatactaggccttctctaagtgatggttctattgctgtgttgaacaaaacaagccatatgaccagcctgaattcaatactcggggaagtgagtctgtgagtgtgccggtgtgtaggtacctgtgtgtgagtgttgacaagaagacaaccttgaatgttgttcctcaggcgctctccattttgtctttttgagacaggttctctcattaacttagagtttgccatgttgactgcgctgcctggtcagcgagtcccagagatttgttttttttttttcttcctgagttctggggtttaaagagcatgccaccatgcctgccttttttttttttttaaataggttctaggggtttaactaaggtccttttacttgcgaggacataacttcaccaactgagctatctctccatggacaattgtgagaggaagccctaaccctaaccctgtaccattaaggtctgtttctagaagataatgtgcatcccttcagacttactgtgcaataaaccaacaagactgagctctgcccggtgctggaggcatcgcttggctcagcagtggcaggctcgctggcagactgaggcttccttgaatgtttctcaactgttctaaaaactgaagctaacgctcatctctcctgtttgtctgcactttgtctgtagaaacacttccaatgtcatgtttagtctgtctgcagattcttagatcaagatggtgccagctcatcgtcacaggggaagagtgctgacgagaaccctcccacccccactttagatcacatcatctctgttttcattcgctcagccccgggcattggttggttctgttaggagctaagagacagcccaaactggattggactggttgcctcagtttattgggtagactactttcctatgggtaagcaggcgagtcttgcaaaaaggtgactattcccatcattagatgcttgcctatgtccctggaaggaatggagaggtcacgtgaattctgaagcaaagagaaggcagattgtgtgtcattttatagcacagattgcttttatatatgtttttttcttaaatatttagtgtgtgtgtgtgtgtgtgtgtgtgtgtgagagagagagagagagagagagagagaatgaatgaatgaatgaatgaatgaatgaatgaatatgtgataacatccttttatcagtccacatctcagttgtgctccaaactcatgttcacacctgactgctgtggatattgaaatgagttttgacatttcatgagacaatgctcttctttgttcttattcaaaacaacaacaacaacaacaataataatagactcatctataaagttccctaaaaagttctttagaggtcgtgatttagatatgaattagcttaagagaattaaaatcttggccccattttataattgtgtgtattaatttgatgctgaaaatatatcaaattgtataattaatgagatttttttcaaatttatttccttactattttcatcttaactgaattatgacaggaagggagatcacatgacatgtgccctggtcatccattcattcatgactgtaatggtacagtttcaggttttaaatgacctttgtgaaaaaaaatgtgttttctttaatggggggcatcagattgatggattatataaatgtattatgtatagtaatattcttaatgtctatcaatcatagctgagattaaagatatctttttcctcttgtgcattagatttacctacatataacattttaaaaatgcaaaaataacagcagctcagtgaatatagaatccatacagcatagcatggacttcttagggtgaaactcaataaatcctgtctattcctctgtgaggactgcttagtgcctcccccatgtgcctggagggcagaccttggttagaaggctagtgagctgtatttctccattcccctaccgctttagttaactcacatttactagtgaggatggcttagatcttagaggatgtgacttggagtcccactttttccgcatcattaaggggctccgtgtccctgaccgggcaggcatattatctctgaattcacatatgctttgctcactctgcatccttgggttaagagactgcatttcagaggtgcttgtctcttatatttggagggttcagttgacaagtgaaagcaaaagttgctcacagtctattttatttccgagagacccagctgcctcctcagctctcctcagctctcctcagctctcctcagctctcctcagctctcctcagctctcctcagctctcctcaactctcctcagctctcctcagctctcctcagctctcccctcttaaatttttcctttagttacctagtcttctcacgccccacccagtttctttcttaacatttttctgtgacccccatatcagtggcacccctctgtggcctccactcagctgagaagggtccagttttaacatgaactctggccaagaatgagagctggccctcggcatgcagaatgtccttggatgattcttcacactgcagaaaatctccttaatttgatttgtttgttgtttttttgttttgttttgttttgtttaggcccctgtcatgtcttttctgtctgtctgtctatcttctgaacaccatgtttccagacgacaccattatttcaggatatacacagagaagatagtatatggtaaaatgtataaacagaatagttttaggctgaaagtctattctagtttatcaaagtcttaacataaacaaattttaaatataacagtatctatctattgtataaacatatgtatatacatgctatgtctcttcctggatttctatttatggtggttccatgactgtgactgatgatctcttattagccaagcgtgttgcttggtgttttatatacattgccctttccagtcctaccagcatgcgcagctgtttgcttatcaccatttacacataagtcttctgaaaaagaaagccttgacatgcctagtgatgtaagcactacgtgggtgctggaccctccatccagaccaagctggggatagattcctgcttccctgctttttgctgtctgaatcctgtgtgtgtgtgtgtgtgtgcagtatccacttgtgtatttgtatgcatgtgtgtacatgcatgtttttctacatgtatgtcggggaagtacatatacatatgtgcatgcatgttggtggaagcccaagctgatgttaagaaccatcctctatggttcttctacctttcctcatgaaggcagggtctctggagcaaacccaaagcttgcaactatgactagacgacctttggtggctttcctttctctactttcctagactggaatttacaggtaggctatcacaccatagctcatcacttacacgggttataggcatctgagctctctctggcctcttgttcacagggcgagagatttaaccaccaagccatctccccaggctcccgctccatgctggcatccgcaggcaggtcactaaaacgcgactggttgtgttttcaggtcatcgccaagtggccttctcacatcctcgttcaggcagcaccaagagtcactggcagcagagagagagcggaggcggcaagagagagaggaaagactgcagaggatagaacgggaagaaaggaacaaattcaagtaaggattttctgattatttcaactgcgatgtgaaacttaaagcacttgacctacagcttcctaagtggtccaggaaacaacttgtttgctcccaattcattctgtttctttgaagagaagtaagattcacgtgcagtaggctgcttggaagtgttctggcttcctgtagccatgtggcaggaagcttagacagcgaaatacaattagggtgctgtgcatccttgattagttaaagtggccttacccaggacacagagcccagttgcctcaatgtcatttgccatttctccctggacgtcctcatgtttattcatagcctattggatgtcagaaagaaaatctattttccaactttctggtttattctttgctccctgtagcaaccatgtagtcattatatgtgtgtatatgtatatgtgataaacattatcttatataatatatattgctttttcctgtaccagtttctcctggcctgctgtccctgctctcctgctctctatgcctccatgggtgtttcccatgacatcacccattgaaggttccatgtcctagcatctctgtctccaatgagcccactgtccctccgtgtccccctttgccagttctcctgttctctctctatcctctgggccctgctccttcctgtcccctccctggatttcacctgctctactttgcaggatgcacaacccccagtctttccttacacggttcctccctgtccttctttccatctctgcttttccatcccccacttttccatttttccacacacttccatatccctacccctccttgctatccctcccacaggatcaccgttttctccctttaatgtttctccccatctctgctccccacttcctcggcttagtttctttggcaaatgcacccactgatgctcagctacatcatcagaggtcataaggcccaagcagtgagaacttccagatccggtaacttctggcttccccagaggccgggaagagcatgtgtcattgtagaaatgacccagataacagcagcgtcgtgaagctgctttggtggccacttaggcatgcaggcaccctaggtctctgggtagagtgataagcctggctttgctgagggaggatgaagaggtggcgtgaagtaaaccaacatcatttcttgccacactagtgtggaatatcttgagctgtcagcatcctaccaagtgcttcatgggcatatcagcctgtccacaacctttctgacgcacttccagaagttgcttagaagtccaatcgttaaaacctctgggacaagttaaaggcttttaccaccaattagcagctgggaatttgcctcaaaatatgaggaaaattcagagatgaaattatacatccaatgtctcattgagaataacttaaaatggggtacttgtttctttgcctcaagagaaaacaagaccaccagcaccagagagagctggggggggggggggcggtgtggagctatgttaagtgctttctatgaaagcatgaaaaccaactttaacccttagaacctgtgtggcaagtctgtctgtggcagcatgcacttgtaatcccattacaagttgtggttgtgcatccagagaggcagagacaggaggatttctgtgaggaggctcactggccagccatcctggccttctcaggtgggttttgagcctgagtcactctgtctcaaaaaggctgggccctggctgagatggggctggagactgtgcagtgcataagagtccttgctacgtcatgtgaatacttgatttcagatcccaacactcatgtaagaagctaagtatggaagcgcacaggcctgtaacccttcgtggtaggaggaggggcactggggaagacaggtgcatttctgaggtttgctagccaccggcctgccccagattcaacaagagacactgtgttaaaggagtaaggtgaagagtgctaaaacaggtactgaatatcttctactgtccgctgtgtatacagacacacacatacccacgaaagcaggatacccaacatcctccgctgccctctgtgtatgaaccacacacacacacacacacacacacacacacacacacacacacacacggcatgcagacagagacatacacagagacagagacagagagagacaaggagtcctgatcctccgtccatctttgatttggatgtgtgagctcctttcatgaatagcaagcccagccttaaaaactgcctagagagaggaccaccacccagggcccagaatggctgctgggcggtgcactcaaggcctgacgtggcacagtagaaacagttgagacctggggctgatgctggagccaacgtcatcgggtgcatcagagctcacaggtgagctcgatcttgcttgattatctgcaaaaacttaccaggcagactttaaagtagccattgtggatgttccaagagtaaaggcagacacatctctcttacaagttatccttggaaatcattgatcgatatggtaaactatattagtatttattctccgcatattacagtggaatgttaaagcttcttattagtaggactgaaaaaaaaaacagtaaaagaaactatacctgaaacaactggaaaggcaagcctttatgaagacataaagaaaagccaagcacacataggcgaaacgggaaaataacgattccactggatgattccagaagcagaattgagagaggggccagtgagcccattggaaacaaagtgtgagaaaaaggcagccttggaagacaccctaatccctggcatgtgtgtcagtggagcgcagtgacatagaagacaggctgggaatgtgtcatgatattagaatcccattatacttgtgtttacatgcacatagactggaagctgactccagcatcctgtcttcagagatggtttatcaccaaccaccgtctactgtggtgtccattgcctgtcacgtgtcttttaagaaaacacagagagctaggcaaagtgaccctttgtccacaaagaataatgatactcacggggcagactgaccaggtgacggctagttacagcaacgactgctccatatttgagaaagtgaatgcacagagggttaaattgggggaaatggaagctgagtgccagtcactatcctccctcccctgggggtgggcactgggggagggggaggtttactctggcagcccacctctcagtcttgctgagtaaattgttcacacgcctcgtgcttattgcacaacatcaagaaattatcctctggcctcagatatttgtgcgtgcagtgttaagtttcctgtgtttctagtatggaaggcattgagcttggatgcctatgcacagcacatctgtgcacatctgtgtccttgctgtgttcactccagtcgatattcccctttagtcttcttggtgttacctcactatgtccagttattagtgtaccctcaacccagtgtagacaaccacgatgtccaaactcactcccatgacaggacaggaagagtctactgagaggcagaagaccagctagtcttaaacttagattccagttggaaccttgccagcaggaccagaaaatggatccattaaaactgaacagtgttgggcatatcatgggtgtgagtgaaagacaaagcataaagtaaggccttccagtggtcttggtgtagaaacaatgatgggtgctgtttctgaatgagtccaatgtttccctgtttctctgttccttcccattttattgaaaaaaaaaaaacactacatttaacatgtctgaaatacaccctttaaatgtttagcattcaactatgacaggtttgccttttctaaggccatagccgggctttgtggtatccttttagtaattagtttgtaatcttacgagcactaacactattattctctttctgtttgttttgtgcttcccctccagccgggaatatctagacaaaagggaggagcaaaggcaagcaagaggagaaaggtctgtatctgttttcttcccttggcaatggtgtcacgtgacttcgcactgttaaccaactgtgcagaattccttgcattgaatttacttggcattgcatggctggcgtttgcaaacaactgtctccctaccttaaattccaagaaaactggatttatgatagatatgacagtggatagaaagcagggatggaaagaggcaggatctattattctccagaacccttctccaaatgagcacgttactctccatctggacatacgctacgtctggtcacatgtcctagtgatgcagacgtgctcgctctgaatgattctatcattgtgtgacacttagtcatggcaggcactaactgctccggactgtcattccattagtaatccatagccgacccaaacattgcgatgcctccactacccacatttgaaacaccttgtaccagcactcctgaacctggactagatgttcttcctatgcacttccaggtcattgggcccatagtcggtcgtcagttgaattgagcacacatgccatgctgatactgtccccagtgtgcacaagactcttgagttttatatctggtcacttccttccctcctgagatgttctcatatcctacatcttaccattcccaaggagccctgcagtgtttggcacacacagtgggcacgtatgactaagatatagaataaaaaggactaaggtacttgccaagtctgatgagctgtgtttgattcctgggacacaaatcatggaaagagagcacactgtcccctacacgcatgccattaacacacatacacacatacacgcgcacgttccagcgcgtgcagagatatcgttttaaaaaaagaaattggcctaacaagctaaccgcttcactgttaatctctttttaaaattttgttgttttatgtgtatgggtgtttcgccttcatgtatatttgtgtaccatatgcatgtgtggtgcccttggagtctggaagaggatgtagatgtcagatcccctgagactgatgttgcagaccgttgtgcgctgccttgtaggggctgaaaagagaaccgtggttctctagaagagcaaccagtgctctctactcccgaatcatctctccatccttcgtccattaattgaactccattccaaactgtgcacttcatatgttcagtttgtgttggtttgaggtaaacaaacaggacacaaggaaatccacagacaaaagcttttaccccttttcctctacaacctgcagttactgactctgacaccagatggcgatatagtatggggagagagatgggctcagtttatgccttttgtactggagcctagagggagcctaaccatttctggcctgtgccaattgtgctgatgttttagacaccatcagctaaatagatcaagacagtctgagtcaggcaacagtggagactgtctgtgctcaattaaaaaattagatgcttaagtcagtctcatgaataaaacattggtttatttccaacattctattagattattgccatcctaataaccagtggtggctagtaaattcagagagagaggtgctggcaagaaacaggaaacttctcgtcctctgataagtgacagtctcgggcaatgggaaggcctgcactgttactgagatgctgttgggtttttgcctgggcttaaggaatttcaaattttatgtttcattttctctccagactctgtatttttgagcttctgtcaattgactgtcaggttacgtctgcacaggcaaggttgagtggctcctgtagggaatgtctgtcaggtgcctggtaaaggtcagccctggctccagagactccacaaagctctctggctgtccccagctattcttctttgcatgcaggcttttgcctatccctggcatacacatgttgagggggctgtcactccccttcccccactcatgctctgtccttggtgtccttcctcttccagggcagaatggccctctacccagcaggtggtcccttcagcaggtgcaagagtgagcctggtaggtccctgcttagcctttccccacccacatcctacctctcagctgacctggggatcagcaaacagagccagacatatccccatagtctggagcagctgtttttcttggtttgagtttactagtctgagcaaacaaggggtcacaggaaaaaagtagaagggaagactggggatgcactaggaaattgaaaactgcatgatggtggttcagcagccacggggaaggatgctgagcatgatggtggtttagcagccacggggaaggatgctgagctctcctgggaggcccaggagatgtcagaggacttggattcaatgtgagagagacctgggtatgacaggaaagagtcaccggtgagtaaggctggctcattcggctcttacatggtgtatagggctcaatagacacagagctgaaattctagttctgtcctaggtaccctatgggtgtcagggttcattccaaatgtttatttactcctacacacacacacacacacacacacacacacacactgtgagctgcataagaatggggtattgtttgtgtttattattaattctttttgcctgtcacagtccttaaggcgtgatggacactcaatgttcaataaacaaacgaaaagatgaataaacaaaaaagctgaggggcttagcaaaggaaaatgtggaagcttcagggagaagcaatggtgcaaggttgatccttgggcctgtgctccacagacattgcttagtgctttgtgcgacaatctcagcatggtcttatggttggtgttgcttctcaaggcttcagggacatgtggcagtcgccttatgagctagttattccccatttcagctagtgactggatatgtttggacccctaagtacatggctttaagagtcactgctcaggatgtcgaaagtttctgtgtgtcaggagggtggccaagctgtgacattctttgctactatgagctgtgacatttgtgtgtaccagcccaccactctcatctctcccctcattgcagacaaacaccactgctgttcttccaagacaattatgatcctgaccgccattggcatctgcccctgttaagttaaaggttgcgtggggtggggctggaaagatggctcagtggttgaaagcacttgttgcttacacagaggacccaggctcggttcccagcatccacatgatggctcccaaccttctccaactccaactccaggggatctgactcctctcttctgaccacagcagccctctgccccccacctcagataccaggaacacatgcagttcatgtatatgcatatagccaaacactcatacacataaaataaatcttaaaaagttaaagagtatatatgtagaaagaaaaagattgtataagtgtataaaatatacctatgtttggccatttggggtatttaagcacatagttcagtaatgttaggtgtattcacatggttgtgctaccagaagtctcactgtataaactgaaactgtaccccgctgatcaacattactctccccagctctgtccttttgttgccctgtaaataaccccattccttggaacaattctcttgaagtctctttgctgctcctctgagctatagatctttggcggcagcctttatgaaacctgcacgtacccaggcagtctttgtgaccggcagtctcttggtagagaaactgatctgaatccacaagctggtagcccctcactgccaacctgactgcccacagagtgtggtgtggaagaccaagactagggctggaccatataaaatgaaaggccagaatgtgttggtaggatcatgtgtggggcaagatgtggctatcagaggagccgctaccgccaccgcttgttgttgctgttgatgataatgatgttgttatttaagatagattggcctcctggctggaaacaaaactttcatgtacatcctattgctggtacacttataatggacttgaccattttgaccatttaaatgatctcactgactggtgagatggggtacatgcaaccctaggcttccttcctgcaggtgggtgggcctctgcaggtgggagggcttctggcagctttcttcctgcatgtttttcctgcttcccatcagcagacacaggcaaggcaggcgccgagggaaagaacaaaggacggggctctccctgatctcccaaatcgtattatctgcttgttggaaacagacgtacacatgtgaagagctgacagaatatgccaggcagtaaatgtaaaatgccatcggagctgaatggcctacatatccgacatgcgttcagaggcagggctgagattgcttgcagctgtgctggtccaagccagtcacacagaggaagaaatatatgctggcgttgtctgaggggcagcctgcctttatatgtgtgcgttgggggaaagtggggaagaaggttgaaggtgacagaggaggtcacacactcgtaaagggtgagccaagaagtgtatggttctttgtgtgcatatgcgcactcgtgggcagttcagaggtcaccctctaatgatggtgtgcctgtgtgctgtccaccttgtttttgagacagtgtctctgactgccctgagctgccccagtatgctaggctgacctcatgggtctgctcctctcagatttccctgcaccgagattacaagaccatgccaccatatctggctcttccctgtggatcccaggggtcaaagtcagctcttggtcctggccaggcatgcacttgaccaacagagctgccccaaccacagctacatgctgcttaaatattaaattactttacagactttatgccctctgcatttatcatcctggtgaatgaagagtgtctgggtggggctcctggtggctggcaggggtgttgtttgtgaggaggcattaagtcggaggagggacacagagagtgatgggttttgcataagctgctacacagcctgggaagacaggagacctgccacagcttaactcacgcattatttctgtgtgtctacacagaagaagcacgtatttcaaagttattttggtccgatctataaagtgcactatgaggaagatgattggtagctgttcttaataaacagttagtgggtttctgcctgcctgcaatgcaaaacagatgtatctttgttcttttaaactgactttgatgaataaactgtatgtgacgtcaggtccaagctattggatgtctgagtcctgctcagaaatattttagaatataaaaaaaagtttccatgggctatgctgagagaacaaagtgaattccagcggcattgctgtgagcgttgaagcaggttcaggaattccgtctgagagaggctccagtccaagcagcccccttttggtatttggggggcactgtttctctcagccacaccaaggaacactcccacttcacagctgtgaactccacaggggttcagttctcagctgtccctgccagaggcttttgcgggtcattatttgctagtttattattgttattattatttgtagaaatgcatcctaaagggggcacgaggattctgcagcagtgagccgctggccgggggatctggttttgtgcgatgctgacatttgtcctcgcttgcttatgaatgatgcagggattttaattgctagcatcttggctttgcccgtgctcctggcagactgagcctccagtcagccctgtgctctctgctccatgcatcagaaaactagctcactctgcaggtgttccatccataaacaagcatcagccacgggctcctctttctttttacggaaaccctttggaatttaactttcagatacaaatacttggagcagttggcagccgagacgcaggagaaggagcctagaagccagagcgtgagccggggtagagctgacctctccttggacctgagcttgcctgcagcccctgctccacctcccccttcaagccagagtccctctgctgactcacaagaggctctccctgtgccttcatccccacccactctgcagtgcccccaaggtgagtgctgggtgagcggcgggaaagctgagcatcaccatccaacaggcttccttggagctcagcctacaagctgacctgagacatcaggacaggtaagtttctggggtgactgcagcctgtgctgtcgctgacacagcagaggtcttcagagccacttggatgaaagtaaaactgatttatcaaagtcacccacatgtggtcattgaaacatgagaatatacaaaattagactgatattgccactcatgaataccaggtatttagtacttcatgatttggatatatgtggctctgtccaataaggtgatcactttggaaccttcttagcctaaatattgagtcattttaaattgatgggaataaaataaatggaagcaaagaagcaaacttaaaatatagtgacattagatgataaatttaaaaaaatgttttcatatagtctctgtgtgtgtgcatgtgtgtgtgtgtgcacatgtgtgcatgactgtatgcccacaagcttgtgtgaagataagctgattttttttcttggcggtgtggggtggggggtgaagcaaagcaggccccagcaatgttgttcatgcagccttgaaccccagctgcttcctgattgctccatgcagtgcttatgggggcctttttctttcatggcactacagagcacaactcccagcaggcacttgcacaatccgctcctagcaatgtcaccagctcttgtgggtttcactgagtgctatggcttgcagcctgatacagacagccagatgaaggcggctgagatactaagctttcaactctgggagagttggctaaccatcacccgcagcatcctccaggcaaagcaggactgggtgcaatgcaaagattatctatccaaccatcgattggctggctctcctagcctcagggtccactgggcaggagcaggctgcccccctcctaacttcacattatagtctagctactccttgtttctgactccatggaggattatcccaggcagatggcccagtcacggatgagtaatgtcagtctgaaaacaccaaggctgagtatgagaagacaagtcatatccccctgagctcccagcgactggacctccaacctacgtgtacacatggaggaacccagggctctggccacgtatgtggtagaggatggccttattgggaagagtggcccttgggcctgagagggtttgatgccccagtgtagggaaatgccaggtcgggaaggcaggagtggggggggggtaggggaacactctcatagaagcagggtgatgggatgggggtttccagaggggagacctggagaggcatagcatttgaaatgtaaataaagaaaatattcaataaaagaaaaacatcaacactcacacactcacacaaagaagacaggtcattctgtgacaactctgagctttccaaacactgcctctagtgtgttgtaatgacttgttttatctgtgtttggtatttctacaggcaatataaaaagttgcctctggcagagttgtggttcagtgcttaatctggggactttaaactctaatgtatacttccagctgtttagaaaatgatactgtaaactatgaaatatagaatagtcccaaacaggggatgggtggtatatgtaaataatgtttgccctcagatttttaaataaatactcattgttttcagaagaagacagttcctcaaggagtatgtccagctagagccgaatctgagaccaatcctatctaggaaaaaactgtgttttaagcccccagaagagcacaggaaataaaatacgtacatacacccctatctgatatatttacacatatatatgtgtgtacacatatataagtatatgcatataaaatatgtatatgtacatatatataaaacatatatacatatgttatatatgtgtgttatatatgtgtgcatatgtgatttatatatatatattgctgtattagtgatatatattaatataaactttttccagtaagctttcagagtgaatgccattttcctatttagtggggaagtagaaacgtttgactgaaatcacactggtgaggtttggatatgaaacatgaagcagggatgaatttatacacctgtacataaataaagcatcatgtgctgttgttggcattcccatggggggatccagtgggtctttcaggatgtaggtgggtgtgtctccttctttgattaattgtaattaatttgaaccagtgggaccacagtgcattctgacttcctcatcttcctgtgttttagattggaaatgagggtctagggaaatagctcagtcagtgaagtgtttgctgtgcaaacacagtgagcctgagtttggatcccacatgtgcataaaaaagtcagatgtgatggttatacctaggcctccggcattgggggaggtcgagacagatgagttctgagaacctgcctgccagccaaacgatgagctctgtgttcagtggatgatcctgcttcaaaaattaagatgaaaaagtaatcaaggaagacacccaacattgaccctcatacacacacacacacacacacacacacacacacacaaacttagacacatgattacacacaaattagggatgatagcagtctaaagagaatcccataagagtaagatgtttatgaaaactgccgggtgttcctgctgctttggggactctttatgacaagcctgcaaagttgaagtgacaatgatttaacttcccccactttacatccccccccattctattaatgttctttgaaatactctatagcccttctattgttagtctcttcttactaccaggtcccattttcaaatttctaaaataacctcttgcctatccccaatatttttaatactccaacatctggaggaagaataacatatatataaccgcacatccagatgtttgtcctgcatcaaacacctggcactgttgtgttccgcatgtgccaagggttgacaggctttttcatctaggtaatttcatcctagagcataagaccacagtgtctttcacagttccaccatatcctgccccttctttttccatcacttccctcctgttgagtatctggtcatgtgtttgggtaagaggggatctggtcatgtgtttgggtaagagggaaggtggtatcatctatagtttcctggggatcaaattcaagggaagattcctgctggctgttgctgacagggctgggagaggagtccatgggtggagctgcatcccagcatcacagtggcccatgctttgtgttctaatttatgccataccatccatttgctgaccctctctccaataattactcaaagtcagcatttcagaatcatattggtaggaaagggaaaagctaatatttgttactaaactatgtatggctcgagatgataggtcactttgtggctacttttactacctttgattttagctgtttgaatcaaggtctcatgtaccatagatatatctcaggcttctctacatagcaaagaatggccttgaacttctaaccttcctgtctccacctcaagaggctggggcattcctccccacatccagcttaccattatttgcttggattctggagaacttttaaaagcataagtgccaggcatggtggcacagacctgtaatcccaaacacaggggaggtagaggcactaacagcaagagttcaaagctagccttggcagcatactgtgacaaggactgcagaaggcactgtctcaaaatataaaacaaaagagagagatgaaagcgtttgaatttcttctcattcctcttacaaaatacatacttgagaagggaagacatgatggctaaatgcgaatagcactgtgcaccatccagtgagtgagctctgtggtcaaaatcagtctcagctaaagatgttctgtgtaaatgatgccactgcccccactgcaagccagtgtgtgctgaagttatttctccatctggtccctttgcagttcacagcagatgtgtgtccccaaactgcctagttgttgttgtcatggtctgggtatttttcctcttatgtcaaacttgcagactgtcatgaagtgatggcatctatatgtgctcgttctggcgctgtgctgtagctagcacaaccagcctccgttggtggtaaacatgccaaagcagctcccttcatccattgtttggagaggctgctgtcttactaagacctgagggcttgcagcagagtatatgatacgtttatttcctattattcttctgaagaaacccacagatgactctggaatcaaagatcaaagtgaaggtttccttttagtataaaattctttgatatgattttttaaaaaagttttacagagaattaaaaggaataatatgtatgctatgagtaaaaagtcagtatagtcaagtgtggtgcttcaattcaactgttcactttgggatctagcatcatcgatgggatgggccttttagcagatctttgagggatcatctggattaggctaattttaggtgggaagatccacctactgtgagtgatactattctacaacctttggtcttgaacccaataaaagagaaacagaaaactggaccctaccattcacttcttgctgtggtctgactgtggatgtagcatgtggcccaaggcctcaggtccggccaccatgatttccctaacatgatggaatttactcttgagccatgaaccaaactaacccttctttccttaagttgtcagagcgtgagataagtaagcattacacaaagtatcaatgagacgagtacctattatacaaagtatcagtggcacaagtagctatcacccaaagtgcccaggagataactatcacataaggcatcagtgagacaattgactgtcacacaaagtatcaataacacaagtgactattacacaaagtatcactgacccaagtgactatcacacaaagtatcaatgatacaatgactatcacacaaagtatcaatgacacaatgactatcacataaagtatcaatgacacaagtgactatcacacaaagtatcaatgacacaagtgactactatacaaagtgtcaatgagacaagtgacatcacacagaggtatcaatgagacaagtaactaatacacaaagttttgtcaccaaatgggtcatatccttgggatgcatttgatggaaacaaagtaaagaaaaaaaatgctgtcctgagaggcagctattggtggtggtccctgggatgtgccctggtgtgaccgccttccctggggaataggaagcttgctcccgtatgttcctttcctcctttccacaaacactcagggccctcctgaggccagatggaaaaaaattacggttcttaatggaaggaagttcctattgagtgcttataaatggcttttactaaggcaatgtaatgaaggctaggttacctttgttgtttcccatggatgcccagaaatgagaccttagagggtacatctgaaacattggacatactacataaaatgtataacaagaaaaatatattcagtagtcagctttcttttactatctgtaattagactttaaggtatttccaaaggacttactactatgggaatatgagacatggctaatccaattacatattcacctgggagaatttgtagaaattcttgatggtggctaactgatacttctttcttggatccatgcatttaaagtcccagaattaagaaaattcctatagtctttggtttctggcctctggaaataaagtataaacatacagttctgacatgaaatgttcagtccatttaaatgaataagcatttcacaaatgacccacctatcatcttggctgtagtcatcattcatatcaactgtgtgtcacagtcacctttgttgtgtgctgtttgagtctccttcaggttataggtactgtcctagtttacctaatccatgtggcatgagatagaaacagctggtgccatttccacctggcctagcagctgtggaacaatcagtcatcggcctcatgcttgctggttcatgagcatgaaacttttggatgccttcagcccagtgttttattaattggctagaaacttgaatcctgtggcagtgggactggggcctgcacttcctccttaatcctcacctgctaaagcgacttgatgccatttggttcctttgaccaaatccatcaggagctccactgaaggctggggctttgtctgctctgtcgtagacgtctactgaaagtctttacacatacctcatacctgcaattcactggaaaaggcaacattgttccttgaacagtttgatagtggcttgcaatgtttttcttgtgccatatttttctcttgaagatttatttttattttatatatgtgaatgtttcacatgatattgtatatgtatactatgtgcatgcagtgcctaaacaggttagaagagggtagtggattctctgaactgagctacaaacagttgtgaaatatcatgtgggtacttggaactgaacttgggtcctctgcaaaaacagcaagtgctcttaaccattggactgtctccccaggcccttcctgttctgtattttggcacactgaagttttgagtcttttgaagtagataaagaataaaccttaaggaaagagaaagcacaaaataacattgggaaaactggataagtgggcacttcctgatcatcatgatgacctcatagaaacttttgttaagaactgtgaaagctttgagactttttattccacctttaatggactgggctgcaacaacttcagagatgctggacaagagcatggagctcttgtcagagatgagaattttatgcttacagggccagaggtagcagagaacttctacttgtgtgccatatttcctagccctggttaccatggtgatgggaacataaactaatgatgcctagacatgtaactgtgagaaacctgaagagaggaactcctagtatagggctgtaagcaagccttcccctcatcccagagacacagaatggtggacagtgagatgaatattctcactcactctcggtacatattctttctctcccatttctatcttccaaaaacatttctctctgtacatatccatagaaagtaactccagaagaagggctctcagtgcctctgcttgccaggctatagaaacatgaggaatttataggcagttgttacccaacactgaaggacaatggttttgtttttgtttttgtttttgttttctaaacaaattttactatggattttatgtcctactaagggtaagcaaaaactcatgttttaaatagcaattaatttgcttgattttgtttaataaaaagaatgtgaggcacatgagtccctgcctacactggagggctacaggagatatgagtgccttctattcaaggcgggaacctcatactgatgatttcaggtctaggcaggaggttctgtgagctgggacaatgagggtcttcagctgttcagttaacagccaagaccttgaaagtaacaataagtgataatctgaggttcctcctggcatccttccctggcttaggactttaggtagccacaatgctatgtccgtaacttctacttttccttgggtactgtcttagttagggttttactgctgtgaacaaataccatgaccaaggcaagtcttataaggaccacatttaattgggactggcttacaggttcagaggtttagtccattataatcaaggcaggaacatggcagcatccagacagacatgattcagaagaagctgagagttctacatcttcatctgaaggctgctagcagaatactgacttccaggcagctgggatgagggtattaaagcccacacccacagtgacttacctactccaacagggccacaccttctaatagtgccactccctgggctgagcatatagaaaccatcccaggtactcactccccatgtacactgctgtagtattgctgagtaagcacatgctgggtttgtaggccctaaaatccccattctataagacccactccttggaccagggaccctgcactgcattttgttaagcttgagacagacatgtttcttttatgtctttctaagttggagcttctctggataagcccgatagatatactagaaggttcttgtaacgtttttgatgcaacctctttgatctcctctacatcttacagataatctacagaaggaatgtgctgtttgcttcagggtcctctctttgcctcaccagctccccatcttgtgtcatttttctcatagctacattgtcctctgcatggtgggtttttcaaagttactgccaagccctctcttttcatactcccctttcatccaaccctcccatgcccacttctgatggttacctgcttctgaaaaatatgtagtctgtgtctctacccttgtccttttgggtcctggggttaagtatctcccactcctcagatgcttttgtcattaagttccttaaggcagtaagacttgccaggcacctgtctgaagacattctctgtagaagtcttatgtataaggtgacagcccagatgtgtcagatcttctattcctcatttggaaaagctagaggacacttccatggctatcaagggaactccctctgtgaaggcagaatatgtaactctggcctgagggggtatttttccactgaattgacaagtgtacctttgtgaagggacacttctttatgaagatctagacacactaattgaaaatggagagtatggttctggaaaaattgatagttaaaatatatctatttcttaaaatcacccctttgtccattcaaccactatagaaaaatactacatgctcgaggctcaagactaagaactgtgtttccgggcctgcctgtcaattacttttgtgctaactctagatttcttctttgtgaatttatttgctaagaaatgcagataaactgccgagtcttagagtaactggaaagccactttcaggagtgacagatgtaagttggggacagttgtttggggtgaggatttagaggtgagatatctggctgtgcccctggctcaggccagctgtttctaattatgcttggtcagattatacagattatactggcttggagagctaatattgtccctagctgctagttgtttgatcttctattgtctctttgctatgacttaacagacaatatgaacctggagaatatcttgggtaagataatttttgaatgtctaagttgtttatacactgaatggtacctcaaccatgacaaatatcaataaatatttagtgatcaagagatttttgactttcatcccagaagaacatctatttatgatgtaactgaattattgagaaatctgaaaacttattgattaaaaaaagctaggctctgtcattttctttgtctggatgcagctgtgtaggactgtcccatcttaatgtctgcatgcttctttgatgcccttggcgcttctgtttgaagcttgactagggccagagaggctgctggaaaactctagcagtttggaatgtcttactctcaaaggcttatccaaggatgagtgaggattaaagtctatcccattcaacttgttggaaccagaacgggaccagtgtgtctaactttcaggatgatatttccacagctcagaggaaggcttcatgacctagtgtttggggtcttatcacatgacttcaaaataacaatatatcaataaacagtgcaaggacctgggtcagcattccagtttctgtttatattatgaaatagaatatttacggtgctttatcaagcacacagtaactgaacctgaaactagctactgctgctatagttggaactcccagttagaagtaacttctgaaaagaaagagaggaataaaaattttagatatgtgtgtgtatgcatgtatataaataatatagagtatagaatgctatattaggtttcataattcataaaaacttatgcatacatatgtatgtgcatatgggaacatatacatatggaggtcagatgtcaatgtcagatgtcattattcagtttgtcatcctacttgtttgttgagatagggttttctagcttactcacacataagctacactaggaggccagagagctccagaaatctgcctgtctctacctttctagcactaggattacgaggacatagctccacgcccagctttaatgtggatgctgggtattgaattcaggtccttgtgcttgaatgcatgacagagctaaactatctccccagctatatgagtgcatgggtgtgtgcatgcttagtgtgtgtgtgcatgtgtgtgtgtgtgtgtgtgtgtgttgtgtgtgtgtagggggactgtgtattttgaaccaagacctcacagaaactaagcaggcactctaccactgtgttgaatgtccaacctagaaatgatcatccctgaagcacttgtgagcttgtctaacaccgagcccaagtgcatgatgcagttgaatccacctatcacgaaggtcctgggtctgctttggtggctgtggttgtcatttcttgagctcttctttatccccatgagtcctttggagaatgagtaacatgtggaactgagtgtgatctaagagtgtcagaatgtgggtttggcgatagcacggcctatgtgtgcaaggctagaacttccttctgttccattgttgctaaaggaggaaatcttgacggttaggactggagggcagttaccaggtctatgaagtggcatctctagaggtaaggtagagtgtcttagatataaacttgggcatttggctctaaaatttgaagcaatgctggggccttagtttcgaaggcctacaaatcaatagcagaattggtattttgctggtgataacatgttacattaaaaatatgaatgtgtctctgtgcttacattagtttatgtgcactacatgcctgcagtgcccacagaagccagaaaagggcattgtgctgcctggaacaggagttatcgaatattctgaactaccgtgtgggtgctgtgagcaaaaccccaatcctgaaagaacagtcagaactctttaactgctggccatggctctacccccgacagcacactacttttgtgaagcttgcatagctgagtctgcacacaattaataatcaaagtattcctgtgcacagattccatctcaggctgattttatactttggagccatttggctgtatctgtggacatcttcaattgtcacagtggtgggaaggttgtgggggtgatgttaaggttctctagtgagaagaaattagagagctatgaatcctataatctgcaggaatacttacttacccatgtaaaggaattgtttagccctaaatgtccatagtactggggcggagaaagcctgctttagataaatcttcatgaacagctcagctagagctggcccaacaccaaaggcaaagtctaaagaattttcaaatttgtgagtctttctcctgggacttctctcagatttatgcgattaaacctcaagtctcaagttgatggtgttagttattagctgtaaactagggaggtccctggaatgtgcgctgttggagcagctgttatagaaccggctgggcccgtccttggtttcataagacctgccttaaagccaagtcctggcagagccatcaagacactatcatagaccaaaactgactgaagccacccagagattgactggatctagatgttataagtagacattggactccgctactgcagacattgatgaaggcagacattgacatgtccctgcccactgtatgttgttggtttttggaactattccttctttccgcatggcagaacctgtgattgggacatgggcagttccatctaggtaagagacccagcatcattctgtgtgctctgcctgtcagtcagtgagatcccgcaggaagacagtagtctagactcaggagagatgtttagagaaaggctgctggcagaagtgtggggaggacaaggggccatcagaggtagtcaggcaccccaaggaagcagctagggaaaagaggaaatggttctactgctaggcttgcagggctgtggtgagtgactgccactcactaagaaccataagcaggagaagaaaccacaggatggaaagggtttctgacaacctatgcaagctagccaggtgcatggggcactggtatcacttttctagtctctccttgcctgccagccctagaagtggggttgggggtagcctgacaaaggcgagtactcttgtattcagctcattgtatagtcctggccaaggtgtttattcaaagatgctttctcacttcgtacatggggacatgaatcttcactttgcattatggatggggaaattaaatagggtgacattaataagcttcctacaacaacctgtgggtgggacagatgcttaatgcatagtaatttttgttttttacttcagctaagcggggcccaacatgcagcagaggtcttggagaccccatgaggaggtagtgttgagctttagaggcctctgctcagctgcctttggcactcaggaggaactagagccacgcttgggtctttccttccctcccttgtttagttctgtgatgtacaagatggcatagacttttgaataaggaataaggaagaaggaacaaggtgtctcctcatctcactggcttctcatgtccatgggactcttggctcctcagcctcccttgctcctgttaatggttgtttctctggtgcaggaagatccttgaaggtcagtgatatgggtcagtggatggagaggcacgagcctgatgaccggagtctgatccctgagacccatgtgtaaaggtggaaggggagaaatgacttctctgacctccacacacactctgtgacaggcatgcacatgtattcaaacagacacttaacggtgaacaaaactaaaagagggacccattgagtgatgcccaagggccttgtgataccagcgacccccctttcagttatttttccactctgcataaatggtacattatcccattctttaaccgagtttaaggtgttccccccccccacacacacacacacacacttcccaatatccttccttccaaccttgaaatctgctttcaaccctcagaatcaggtcagcgtgcttctggccaagcacatatttctgccctttcctaagtgtgtcctggcaatgctgagttgtgtctgtctgttcctgctgcagtccagtgagacacattcacttgtggactccttgaatgtcgccagcccctccgtgctgtattcccctgtcacttgtgcctgatggaccctgctgtagaaaatgagtctgcctagcacctctcataatcccctccccctacccagctcttgagatataggtagagccgcatgtcctccttccaatcaggatatgatagcaagtggacggtgccctggcagcccctgcccaggacacctgctctattatgcatagtgccagggtcagagtgggatccttatgagtacaggctaaagagataacaccctggcccttctgccctggcataatgtcccactgtgatgccccagccttgtgtgcatgtcttgagtttctttcttacttttttctatcttattttttgagacagaccctctcacggaacctggagttcactgatacagccaggctggctagccagacagttgtagagatctacccatctctgtcttcccagcactgttttacagatggtgtaatgctttttatgtaggcattgaagagatggactcaggccctcatgtttgtgcatcaagcactttattatctgagctggaccccataggcacccctctctatcaggatcttatatagttcaggatagcctctgattcactatgttgctcaaaattatttccaatttcttatccccctgcctctgtccctcacgtactaggattataggtatacattatgacatccagttttaatgtggtattaaggatggagcccagggctttgtgcatgcttggcaaattatacctacagaattatatattcctagccccttgctttggccttcttagggttatcacgagccatccctatggaggggtcaggaagatctcagcaaaaatgtcatacaagatgtccagtaagtatacctcagagggttttgacagtccctgtcctcctcaaactcaacattccttccttccccccagctggtctctgtaggtacctagttctggaatcttatttgcagtccttccctatagaggtgccttgactgacatttgcttctttctacccagtctcatcattgacatttgtttcctgactattccatcctgcttggagcttcagccttagcttacaggaaagaccagctgttccaacaggaagagtgttcggcctgacataggcatagacgggggactcttctagccaacaacaaagcatgcttgcactctacctgaagcacccgtcactatcccttacggtagagtcccagatgtgtttctaagtacacgaggccaataattcttgccctagatggctgaccagcttcctctgtactctgagctgaacctcactgaacatctttgactctttccacatagcacgcactccgggtttctacataacctcttctacctgcttagtgtgttctcaccactaatagatgttgcttaaatatccttttgacatagagacttacacatcccttctggacctcatgaaagcaccttgctacctcttccctgggtaccaccttcccagtgtaccaccttcccaatgcattatgctgttgatatcaaaacatgcaggatgttgttagctgttttatgttgggtagtaggagctaaatggctggcattgtgcaatgggacaataggactcatgtgccttgccatgcaggattttaggatctctggctttgtgcctgtatcattggtgtcagagtgtgactgattgatcatcagtgtatttgcccccactgacatcactgttggactagagaaattcttgttaactactgagactagtagtagcttggaggtaaaaacactgtgttcaccccaggtgttgatgaaagccttcatttcctgcagacttccatgccgggtttcctgtgatgggcctcttagcctgtagatagacaggaaacataacccccaaagaaggcctgtgtgtatggaggggtcagtaagagaagccctgattaaagagaaaacagagagagagaacgctgtggaacctgctgtagtgtctctgggtcttcatagatgcttcctttagattgaccaggagtaacaggaactttgtgaggccgaactagttcctgagtcagatggggcctctcagatgagagaagagaagatgtggcccttcaaaaactttgttccagcggtggctagagaagggtctaccattagcctgctgctcccttcagatctgcctgtcacccccagcaggtgcctgtccacgcaagaccctaattgcgtagtaagcttctgaaggcagagggagacgaggctgggcatcaccgctggtttattacatgcttagaggaataagcctccattcctgtttgctgccttgcttcctaatcctttgcttgtcttgcttcacttgcatgtgtatgaccagcacttaatacgctcataaattgatcaggacagccccacatgccaaagctttataatcagaccctgtggatactgaggcacgtgttctaggcgggaggtgactttgaagatgactatttccatacagatccatgagaagaacacccccttccccagtatttggaattacatattagtggcccaagctccatgcagttagcttctgacatatttggatggcattgtgttgtttcttcccgtgagtgtgtggctcattcagagctggcacatctagtaacacatctgtccagacaacccttggccagcgaagggctgtgtggctgtctgagtcctgtaggttaaatgggatgaaacagcacagggggtccaggccaactgcagtccagcagctggcagccatgagtatgccctctcctttactaggtctccaggggctgctaagttgtccttgctcaccctgccagggacagagccactggaagacacccttgtccaggtcccccacatgctcgccatgaatgcccaaatgcatgccacatgctaggctgttgcaaacacattgtcattttgatgtggctattctgaagtcagcgtgcatgtacacatatgctttctgtcagccccatcatgataccactgttgctcatgttccacgtctgccaggcttgtaaagctcccagaagggtgtatctctctcctaaagagcacatttcatcaagtgaaaacgaaatcagcattgagattctcctacaccaaaaaggacttctccaaagggtgtccttagtctcccccatgagcaaagccttggttttcctgttgagggacagtacatggcatgccttttctcaggcatgtgaactcaaagggatgtggctttttgtttccttttgctgttatcagacctgacaactttggggacagcctctgggctctgaaccaggctcctgtgctaggttagagaccccaaggaagaatgcatgagagaacgtcatccaggcaggaggaaggtacacactatgccatccccaattcctgcctgaagggcactgtggaattcatacaggatatcttctcttgtgactgcaaagtacccagagcaataagaaaagtctacagttcttcccttttctactctccctctgcccttcccatccttcctctccttgggtacttccctgttctattctcagaagaacgcagggcacagggataggatgctgtccccagtgactcctgacagaacttcttactaagaaattgatgatggttgggcctctgcccagtgagagttgttttccttcttgtgataaaggcagagcttggctgactgataggcctcactgataagacctgcataccttatggccatctctcccccaccctgaaggcagcagtatgctccagagagagggggttgggggagacagaacaagcaagggaactgcctgatccacttgttttatgggatcgggataggtctcttctagttcctgcctgaatgtcttcatcaacttgagtgtgagtgtatgtgtgtgtgtgtgtgtgtgtgtgtgtgtgtgtgtgtgtgtgtctgtgtctgtgtctgtgtctgtgtctgtgtctgtgtctgtgtctgcacacacatacactcaggacttgagcacacattctctaggaactgtcagaatcctggcagtgtagcctcttccagcccagggcagttgctgtcaggagtgacccagcctcgtctggcctatccagatggcatttggctggaggtttctatattctcggtcattctgttacttgtccaaatttcttaactgagggctttgctcagcaaaaccaggcatgaggcagacagagccatttcgctgcactgtggagcagtacatgactgggaatatgagcattttgccttgttgctagcagtgtttctattctctgattctttacaggtaggcccctgcccatgagtggtcctcttatctaaggtttttatttttatttggttggtgatggggttttgttttgttttgttttgttttgttttttcagagtctcgtgggttgatatggagctcactgtgtggccctgcaagtcacagataatcattggtcctctcaccttcacttctgaagggccaggactatagtcataagccatcctacctagtactttaaaacattttaactttatgggtatgaatacttagcctgcatgtatatatgtgtaccatatgcatacctcttggatctcctaaaactaggtttatagatggtgtgagccaccatggtggggactgcaacttgaacccaggtcctgtgcaagagccacaagtgctcttgcccatcaagccatctttctagcccaatactttaagaatatctgttatgaagcagagttggagtttattaagaaaggggttatagatttaagcatagacttgagggagaagaaagaaagacgacatccaaataaaggacaattgtgcacacaagattgtaggcacaggcttctccaaagtgagacacaagtgattccttgaagagctaactttatgccactcagcaagcagtatccgagcatctgatcccagggggaatcatcctccttggattagcctccaatgtcagaactctttggactgctgcttgaaagtcagcttgatttactgtgggttttgctgtttcccccacaaagacattgcattaattttatgctgctgcataagaaatggcccaaaacatcaccactgaaaatagtgcctgcgtgttgtcttgcagtttcccagcatggctcagctgggttcctgtggccagctgggctctgatccggagacctgggaggactcatccttcaactcactcagagttactttgcatttgtagatcaggtccctgttcgttattgactgccagccagggttcactgtcagcttctagaggctacctatatctgtaccacatggccctttccatttgcagtgctagtggtacacgtgggatcctcaggtttctaagctctctgacatcttttgtgttgctgttacaacatctccagtttctgaggctcagctcactaaagctggcatgtctaatagccacattctaaagtggactcacatgtcacctgcccagtattgttcatagcagcagaccatgagctcgataaccacagaacaagaatgattcttggggggctacttttagatttttcccagaggaatcaaaccaattttggggtgacccctgacctctgttcttaatgtaatttctactcttgtctccatcagtaagtggtaaggaccacgagcctgaactggaggcagaagctgggcaaggtgctgatgaagccagccaggacatagcatctgcccacaggggagcagagagccaagaagagccggtgctggagctagagccagaggaaagagcttcactgagtgaaaaagagaggcaaaacgaagaggtgaatgagagggacaactgttctgcttccagcatctcgtcctccagcagcaccttggagagggaagagaaggaagacaaactgtctgaagacagggcgaccggtaaatggaaccccttctccatgtgcagaggctctgctgttttagagcctggccataggctaccctgccaaggtgaactgtgggatctgcttactccctcagctgtgtcacctgtcccatggtgccagtcagccagcagcttcccactagagctcaggctctgtggccttctgtgctgtgggatctcttagttccataggtggtaaagagggtccaggtggtagaatgtgctgaggaacgagctgtgggaaaaaaaaccactaggttccctttattggttccaatgttgataatggcaaatttggcgtgttccaatttctgcttgaagtttagacaggttatgatgtcatctattcctttagaagacttgtttgagggaagtatattaaaaaaaccacggttagaatagatatatgaaacaaatcaaattagtacttgtaaaacagcatgggtcacagtacgtggaggtgacgttggcatgttggaccagcacatacaggctttaggtagttgtacacattgtattaggtccactggtaaatgtaacctatgtggttttccttctataactctctcttttcagtattacccctggactccattcaactcagttataactgagaaccttacagctagggaccaagcagaatattaggctgtatatctagaccttaaggatctcatcagggttttggtgacttggctcaaagggtttttcatactacctgtgacggcattgggtttggttttcctatccgtgatttttaagccatcaaggtgataaaaaccagcattccttatcagcagaggaatggaccatgctctagccttcattgaaccatgcacacactcaatcccaaggctccccttgccattctgagccaagcactgtttagtcttgttagttacaacattgagaatacagtttctgaagctcagaagagttagtgaatgaataaattaatgaaactatgctctcttccaacagatctgccaattagcttagtctaaaatacttatttcttatgtttttcccagttagaatgtactactgaatttgatttcacatattacttatcaccaagatataataagaaaggaatccaagactattagtttatatcttagatattaatgcactaaaaatctcgtgcctacacatgtgctacacatgttttgcatacacatatgctaagaaggactatttcatttcctccaagtagtaatatagttatttccaaattctagatgtattactcagttttaacagaattatgatcacaagataagttctaggtaactttggtcctagctgatttccgtacattatgaatagtgttatgagtgttactcaacattttggggctcagcatatcaacaaggtggattgggaaaactaaaccagggaacagaaccttcttggatctcagagtacagctttctcccctaaaaaggacaactttggaaaaatggagcctctgagctcccaggaacctactattcgcttccacaaagagcaagtggaatccaagtgtttagatgtagaaactggagcttctggtgactttgctgcttcgcctgaggattgggaagaggattagttcatttgtgggaacttactggctcctcaaactccacactgttcacagtgtctaacagcagcagggtcaaggcaactctgtcatgacagcattggatgctcctcatgaagtcgtagagacattgtatttctctaactattgtgtctcttaggaagaatcgaatttgtagtgataccaagtaaagctcgaaagagctgcagctcattccaggtgcctttgtcttcattttgtttcatgttgagccctgaacgtggtaattatcctagtttgccatatgacacttgcagaacagctggatgggcgctgggcatgtctgtcttgtttgctgtgagccctcacttcctagctgtgtgcctagaacacagttggcctagaggttgctgagaataagtttgaaggttgaaacacagttgccttgacaattaacactgcaatccctgtagagaaaatgccccaggtgctttgaaaagcccagaggccaatggagcgaggtttctgtactacacttacattataaaatcagtacagtagactgggataatttggaggtgttgtaatacccagagcccactatgaacaatgtgtaaagatatgtactttaaaacactattttttttcatttttaattcaaggtgaattaaaacgatgatgatgttcacacatcccactggagaccaggaggagagaaaccaagggaataaatgaaaaagcaaataaacagcacatttaagccctgaaacttcaattattagtttagcagtagctgttaaaaaatacaccaattatccctatgcaaaattctttttttcacttttgtttcatacactatattcaggtcatgcttttacccccgcccaactcctctcagatttcttctcttcctcgcccacccaaccccatgccttttctctttctttttaggaaaaagaacaggcaaacaaaaagacttcccccagcccccaccaaaaacaacaataaaacacaagaaacacacacacacaccactccacaaaaatcagaacccataatatataagcaaaatatcaacaagacaaaaaatacccaaactaagcaatatgagactaaatgtctacaaaaatatcattgagtaactcttgtcaagcacactgacagaggaaatgaaaagttaagaagttatattatataatatatcatatgtatattataataattatatataataataaaatatagagataacttatattaatatcaaataaagtagactacagtgcaaagggagttgtcaaggacaagagggacaataaataatgtataaaatgtacacaagaattaaaagagtaaagaaatagacaagaataccagcatctttaaaataaccaccctgttgtgttgtcataagaaaagccaacatttcccgaacaatggagaaagaatgtgactatctcttaagaaagaccattatctgctatcaaaactgactccctgcttacaaggagagctgtgctggccagctgggatggtgcaagagtgagataggaggaaagaggctaggatctggctgtggagggaatgtctgtcagcaggatgcccagctctgctgtctactgaggatcacaaagcaggtgccaaggattggaatggtactagggtggagaaagctgccatcaggggacggaaacccactccagaaggaagggtggggttgcaagacccattcatgaatagctttaaagaaagctctgagactagggtgagtgggactgagagagtgagtgagacatgcagtttgaggacaggtcaaggtcaaaggtgaggaaggggcggacagaaagagggaaacagacccggtgagtgtgaagtctggaatggaagactaggacactgaaccccaccagctgcctggaaaaaacagttggaaagggctgagtaagcagaagcttgtgtctatgggccttacaaggagagaaacaggagccgcgagtgaaacaacttttagaagcaatattatcttaaagggaaagatcagaagctgggagtgaggtagagataaaagaggagtcaggagaagccttaagacaggagaaagtatacctgtatttacgggagagccctggggatgggagaggcagaaaggtctcagtaggaggggcagagaagtactggtgagaggaccaagaagcagggcagagggttgcagagaatcacccagtggtttcctaatgcacagagtggttgctctaataagggacagctgcagacagccacaggagaaaggctgtgactgtgctctcatggaggtaggaggctggaagctgagtggcagagctctttggacctcatctgttaaactggtaaactgcagaagcaagacagcccagagaatgagctgtgcaggcaagtgagagggaagagggggagtgggtcataacagaggaaggagaggagaggtagcattaaagctccttgagatgagactgttcacctgaactgatagcatagttgtggtgtagagtcaggggacagatgtccctctagcacttgccctggagtaggggggcacttcccgccttccctagtctagctatgacagatgtgccttacctatatatggtggcttagattttgacctcctgccacggaaggaggaaagggaagatattatgtagtacaggtgggagtcaggagtgctgccatttagaagattctggagacctggactgactgctcagctgtgaccatctagtttgagtgccttatcttagtgttttctttggagttgctccttcatgtccacctgttttcatacataactggttttcttgtggatttaaagctccctgcgactttcttaccacttccttctcgtgtcctttcaggtttgtggtccaccagccttcaggatgtgggtgtgaatggacagtgtggtgacatccttaccagcaaaaggttcatgctggacatgctgtatgcccataacagaaaatccacagaagatgaggaaaaagatgacggcgagcctgggaggtctgcgcaggaggtggaggcagtggccagcctcgccaccaggatatccactctgcaggccaactctcaggccccagaggagagcatcaagagggtggacattggctgtctagacaaccggggcagtgtgaaggcatttgctgagaaattcaacagtggagaagtagggaggggtgccatctctcctgatgtggagtctcaggacaaggtcccggatacacccccagcacagctgaagactgagtctgattacatctgggaccagctcatggccaatccgagggagctcagaatccaagacatggatttcacagacctaggggaggaggacgatatcgatgttttggatgtggatcttggccaccgggaagccccaggggccacccnnnnnnnnnnnnnnnnnnnnccaccccctcccacctttcctgggtttgccacccccccccaacccctccacccctgttggacagcgtgcctcccccaccagtccccggtaatttattggcttctcctgtgttcaacactcctcagggcttagggtggtcccaggtacccaggggtcagccagcgttcaccaagaaaaagaagacgatccggctgttctggaacgaagtccggccctttgagtggccaagtaagaacaatcgccggtgcagggaattcctgtggtcaaaactggagcccattaaggtggacacttccagactcgagcacctgtttgagtccaagtctaaggagctgtctgtcaccaaggtaggctgggccccgcatggttcttgcttgggaggaggagagcagggttagtgcttgatgagatgtcctgtcttgttgctttggctatttgctaagcagtctactgggactcacatgtctaacttttcagacaacccaggaaaagaagcaaaaaaggccaaccatggatggccgtgtagtctgcggtaatgtcggcgcaccccaaaggaactgaacttgcttacttagcaggtgtccggagcatactcatctactgtcacctcaagtgagggaccatagtaccactttgaagttagctgtagccactcagtgcttttccagaggccataattcagtctttgtataatcctctgagctgacataccaaaactacctagatattcagtaatgacatatctgtatccctggaaaaattatatatgcattatgtttttattttcttaaatgtctgagaacctgcaggcatcacttttgcagtattgttaacacaggaattgcatagggttatgcatgggaaacactttacaatgaatggacataacacaatggtcagcaaactctgatatagaaatgcatagcagattgtgtttcccacaaatatgtgctttaataatgcctccatttgatatctcaacccacaaatgtctaattcagggtatactgaactttttttaaggttagaagttatctttccctctaggaatttgggcaatgagaaagtgttttgtaaagtctgatgtagacaagtgtacccagccttttatactgcaacacaaggtcactaaatagctcacgcctgagaaccatgcaaccgagtcacaggaacagctgcaaaaatctttaatgttttacgtaagcttttgattttatgttgggtcagattcatagccagtgggacaggctggaaggcggcatataagagttgataactgtgagtcagttctatcccctggctgattcatccattcgtcatcatttgagctgaggataaagttgcctgagtccagcaactcagacttagaagtcaggtaccagttctaaagacaaaaaaatgtgttgcatctttaggacgtgtgtatgcgcacacatgcatgtgtttctaagaggaggtgccatggctgttgagtgatgctgaggggccagctgggccgcattcattggtcagtcttcttataaatccatgttgagatccttaaacttcttgaccccctttgccaactggtgttttatcctggtgtctatttctgcccaggctcagagaggatatgactctcaattatttcctgctccagaaatctccttaagtcagaatgaaagcttcattactttaagatctgaactactgagctttaatgtaaattatcacatctcatcaatcctgttcttttgttaaagtgggtctagatttcgttctttcgagaatgtaatcaccagtaatgaaacactgaacacctactctcagtgtatccatatcctgatgttttcaggatgttgtcatacagtgcttaggtgccatatgtcctcctcttctttgtacagtcagcctggcattgtggggaggaccagctgagagttagatcatgacccatctcatacactacactggacccactgacccaactgcattctctctctctctctctctctctctctctctctctctctctctctcttctttctcctcttcctcctcctccttcccccccctcctcctcctccttcttcctcctcttcttcctcctcttcctcctcttcttcctcctcctcnnnnnnnnnnnnnnnnnnnnnnnnnnnncctcctcctcctcctcctcctcctcctcctcctcctcctcctcctcctccttcttcttcttcttcttcttcttcttcttctgtcccatactcatttgtctggctgtgctgctagcttcctgcagtagctcatgccctggatgttgctgggtgaggctgcctcaggactgagaataaaaagggaggcaggttggtaatggaggcatgtttaacttcctttatggtaaaattaagttgccgcaagaagacttaaaatgagtgttgcttcacccatctcctcttctctcaatttcactgtggctgacatggttggtgataagctattggcttccatcctctcagcaccccagagtgctattcctacctgtagcagggtgagcacctctccatatagtgtaaggccttgctaatggctaaatgtttccatgtttggtaaagcagggacataagggaatagtcagtcatccacattggtgagttcagcatcttaagattgcatcactgcagatggaacccatttttaaaaaatgtgtatttgtgctgaatgtttatagaatgtttccttgtccatatttctgaaacagtacaacagctagtacatggcatatgtattatgctaggtaatattaataatccagagatgatttagaacactctagaggattttaagggttatggacaaaatatgtaaaaatccatttgtgtaaggcatttgagagttattgtactctctggtggtcctgtaactaatcccctagggacactgagagacaacaaaactgaaacatttattaaattgtttccagaatgttttgcaatgaaacttaggagcatatatatatatatatatacatatatatatatatatatatctttgagggttttgttgttgcttggttgtcttttttttaatttttttttaaggaaatgtgagccagagctaattttcaaaatgctataaggggtgaaaatgcaaattaatattatagcatcaccaccttggagagatggatcctttttgtctatgttacccattcccatataattaattctacacctggttttaatcactgactgtgattttcatacaacacagctgtatacagccacttccgaactctggctcatgagaagtttttcattaaacacaatggtctataacaaaaatgaaatcaacttcacaagacagcaagaaacaaagggagctagttttagtttctattggaaaactaacaccagaccaaagtgatagggtatggctgtgattatccagtcatgccctccccaaagattcactagtgagagccagtgccgggggaccacttaaaaatcccgaggagaacaaaaagatgcctttattttctgggttttttttttccaaaaatagtttgtgaaacagaacccacttttctgacttggcagcagatgtgtatatatagcttttttataggatgttgctcattgggttgtgtggagacagaaaccctgggttaagccttactgtgtatttctgctgctgctctgagatgtggtgatgtatgttcaagtgattccagagaactacttcagggcagagagtcatgtggacttgacatgaagaaccctgtgagatggtcttcccaattcttatgtccaacaaggggctgaaaacccctttactctcagggggcaccttcttcatactgcagttagctaccagaccaagacaagtgtggaggacgccatagagtggcagagagaggactcggtttggctcttgggaacattgtggttccttgggtttatctggggaagggtctcagatggatttggtgacaatttgtgtagctctgtgtgtttcctttttccattgctgcaacaaaacataatcaaaacaagtcattgaagaaagagttgatttgagcttacagctctagagagggttcgaatccatgatggcagagcaatggggtggcagccggtgcaggaagctgggggctcacatcttggactgccagcacaaagcaggagctaactaggaatggctaactctggacacatgtcctcttagcaaggccacagctcctaaacttacccaaacactaccactaactatgaactaagtattcaagtgcttgacattctcatttaaactaccatgctctgttcaccctgaagtttgttaggatagcagaaactccttacccagacttttaaaagaaatatagagatggtgatgtaatgggccagggtgtaagcttcaacctgggggattttgctggttttgttgtttccctgtgtagccctaacaagcctgtgtagaccaggctggctttaactttgcagatgacattcacgtctacttctctctgtgttggggttatgggtctgcacacctgcccaggcctaggctgggggattttgaagtatcttagattatggagtagacccagagtttgcaagtatctgctttaaagtgacacataaacatagcctcctgaccatcttccacagtggcaccctgatctggcctcttccctggagaagagagaaaggtgtctgcacttgccatgcacatctgggatacgagggtgtttgttatgttctttataacactagaaagcccaaattctacctagggattagaaacacaactttttattcctgggcttctaccacagttggtaacagagactcactacatcctctgtttatgatgataggaaaacacaggatgttcagtgtccagttggcttcaggtatcagagtctcaaaagtatgaaaaattaataccctttccccttaataataaggcaagcctgttctggagtagaatgattttttcttttattccctccccccattcatttttaaaaaacagagtcttactatataagtcctaactggccacaaactcaaaataattcccttgcctcagctttctgagtactggggttaaaggcatgcaccaccatgccaactaaagattttattcttaactaaagatttttttgactttatgtagaccttgctttttgtttgttttgctagaaagctttgctatgtatttctttatgactctcatgaaaagactagaaaagattctagagttctcacccttgttacatctgtattattgcaacgtgtaaccctgtaactgtcactttctcaagggagagttttgaaaatatcccatagtgtcattcttggcaggagtgagcagcagggagtctgcaggcatgatttaccacttccagaatggccaggctaagccagacccagacccagggtctccagcacctgctgccaagcagctcatgcagaagccagttgcctttcatggaagtgctctcagattcagcagccttctccaagacttggggagttctccaaagatgggtttcttatccttagatgggtttctattttcaatcgcagtcccttctgagcctacaagttcagtgttttcaatgtttcactctctaaacattttgatcctctgttcctaataaaattactctttaaaacttcaagcgggtgagcccaagacatagctcagtagtacagcatttgcctaacatgcaaggccctgggctctatacccaacagggggaagaagaaatgaatcaaagaggtgatatgttgtgtcagtgtcttagtcagggtttctattcctggacaaaacatcatgaccaaaaagcaagttggggaggaaagggtttattcagcttacacttccacattgctgttcatcaccaaaggaagtcaggactggaactcaagcaggtcaggaagcaggagctgatgcagaagccatggagggatgttccttactggcttgcttctcctggcttgctcagcctgctctcttctagaacccaagactaccagcccagagatggtcccacccacaaggggcctttccccctgatcactaattgagaaaatgcccctcagctggatctcatggaggcatttcctcaactgaagctcctgtctctgtgataactccagctgtgtcaagttgacacccaaagccagcctgtacagtcagcatcttagcaaatgttaattaagcttaatggaaactctgtattgagtataaatgtctttctgacatttcttgttgctgcctgaatcttcatctttctgccttccgaagcttggaggcaaagtgagggccttttctttcccgaggatgctggctgaaatcccgagtgatcatacacttgcatgtgatatggccttacaccctccataactattcagagtcaagtttgagtccttacctgcagcttctagggataatggtttgatctactctcaaacccagtttctacatctctagcccaggaagcattagccatctgtgtttccactaagcacccatttcacctaagcctaagcagggacttgcatttaaagactgtgttactctttcccctctgggaagcactggacattcaggtttctggttctccatctgactctagggctgtccttatcagtcatggcccatgcttgagccttggtagttatcagtctgcccaaggggctgcctctttcgcgcttgtgtgttgtctgttaaaatttccttctaaagacattcatctcggttgtcctatataccagaccctcacccctctgggacagcctgtgagtaaggtgctgaatattcctgtcttccttcctgctccttctctatgaggtctctgttccctatagggtaacctccaaatctctttcatccgtcttggctatttagacaccttaccccttctcagcattgttcttggttaagtgcaaaagaaatggacaaaaagcctcgcatggcacccaggcctgaggcctgtctccagagattgtcttcgggcttgggggtggtaagaggcactatataggctctcaaaagaggaacttgatttaataggcttggaactaaaacagcctggagacttttcagggctccgcccttcttaaatgaacaagtccctccccctctgggacccttctggacatacttgggaaagtagcttgtttcaacacagccctgcagccatttccctcacggggctgcatacctactatgcaaaagcagatatacagtggagatagccctgtttttatgttcagcctcccaatagttaagcactctgtgcctggagtcttagatggtggtactttgttccagcattcctcccatcctgaccattcttgaaacttgctgaagaggagggcagaggttggctgtctttaacctttagtgcaagaactgaggttgaagccacccttcctgtggccctgagctgaccgatggcattggaggcctcctggccctccacagggtatgtccttttcccactcttgcttgaaaagttctcatttgggaactaggcacctacaagctcctctggaaataggataccaaggaggggtgataagtaagcctacagagacaagcaggcaggtggaaaagaaactgttagtgcccagatgtggtgatgcatgtctgttatcccggccctcaggacactgaggcactttaaagaattaatgggttaaagaccagtctgtgcttcagagtaagttaggagacaacctagaaaaatcctgtctgtgaaactgaaacagagtaaacaaaacaaactgttgaagacttaggctggatcctagcctctcctgcctgtgttctgggtttgatctcatgccccgtgatgtcctgagtctactgttggtagaagcagacacaaaccatgtggcagtcatgaatagaaggtctccttaggtgtggccctgatctttctcccctatgcctcctctgtccctgcttttcccttgaccttctcctcagaaggagggcattagtggatcctccacaggctagctgctcactctctatgttcgtctggacttcgtttcctgttctggttacatactagctgtcactccttcatgtcagacattggtctgagactttagtcttagtgagagtgactggggtcgtgctgcgtggtcctttcccacgttgcagtgctgcattgctcttttgcctgtgctgtttcagactagctgactggagatatacagagctatgtgactatcagaaacagattattagtgcgtaactaaagaacattggtggctggaatggtggctcagaagttaagagcataaaaaaccctaaagaatatcattgacttttaaaatgcacatggtcttttattaactttagaatcgattttttttctgtcttaaaataatctgttttagtcatggtttctattcctgcacaaacatcatgaccatgaagcaagttggggaagaaagggtttattcagcttacactttccacactgctgttcatcaccaaaggatgttaggactggaactcaagcaggtcaggaagcaggaactgatgcagaggccatggagggatattacttactggcttgcttccccctggcttgctcagcctgctctcttatagaacccaagactaccagccaagagatgataccacccacaatgggctgcgcccttccaccttgatcagtaattgagaaaacgccttacagttgggtctcagggaggcatttcctcaaaggaggctcctttctctgtgataactccagtttgtgtcaagttgacacacaaaaccagccatatacaaatttactagaattttgatagtattattattaattattattattattgttattatttaccaccaccatcatcatcatcatcaagacagattgtgttcgagttctctaatagaacagaactggtaggataaaatatatctccagtgcccccctccccaggctgggatattttcagttattttcttcatgaagaaatctaagtatatttattcccaaacacatatttaaggacctaaaataaaattgtagcagttgagttgggagggcctaggaggaccagcctatttctccatggtagcccacagctctagtattagccccattaggtggctcgtctgttcctgggcgcagagagcttcagagcagccattcagagggtgcttgtctgcagggtgtggccagagctcctcccccatgctggcttgtgaggtctttcaggacatagcctcatcctcccccatccctgacagctcagcctgagcagaatggctcatcccctgactttctccctggggcctgacagcatcccagatactcttaagggcccagttgaagagtcagttcttgcaagcctggccatttcagcaggtaacactggcctgctgttggaatccttgctcagtgagcacacaccatcactcagtacagttttcttaagagagccaccctaccttctttgacaccataagagtgttccgtgattcaaaaccgccatcctcccagatgcctttgcgtcaaggggaacctgagcagttgtagaggctcccagtcttcccactagcctccactgccacctgcatctaacttcctgacagctgagaggaaaagtggacacaacttgtgtcctagctctggaggtaacatgttggcttagctcctcacatcctgtgtttatctgttgaggcagccataataaaataccgtacaccaggctggagagatagttccctttgttgttcttctagatgactagagttcaattcccagcacccacacagtggctcacagccacctgtaactccagttccaggggcactcgtgccctcttcttaattccacaggctcacacatagtacacgaacaaacatgtaggcataccatttatactcatagaaataaatataattatttaaaaatcacattaccagtggcttaaacaacagaaatgtatttcttacagttcttgaggatatggagttcaagattaagatgctagccaggttaattctgccaagggctttctttctgcctttcagatggtttctttcttgccgtgttcctgtaagaacaccaattctgttgtgaggagtctactcttcccgccctatctaaaatctctgacctctgatactagattctatctctttggatattaggataccgacaactgaatttgggaaagagatacaaacattgtgtttcaaaggcttacaaatagtcatatgctagccctgtcctagctgcaaggataagggaggccaagggtctgcttctgagagacactcatgccattgcaaaagctgtaacccagagttctgtgaggatgccagaacacctccacacctgcttgtcattcatacctttttaagagcacatgccttttcttttctctttcttaggaagccctaccctgtcctgaagcaggcagctgtgtgatggttaaacatacagaaaagatggaggcactctagtctgaagagtgtagggcatttaaatagtgagggaagccctaggaagacccatgaaccaaaggcctgacagaccagccacactgaatgtcctcaccagcctgtctcctcagcctgggtattcactgctataggcacactgtatacactgagccaaccaggacacaacctaacacttcacagcacacaagaaaggaattctaaaaggctggggttgttgggggaaggagacaggttttgctcttgcagaaaaaaaaaattccctattgaaggaaaatcagtattattttgtaatgtgcccgacttgtgatgtttcgttgctgacccaagtttggaggctcctgagtacctaagccctgatctatctaccccttccccacacactctctctctcctgtgctgagtggcagccagttcttccctgacctgaatgtgggccatttgttcttacttctaaataaggagtgaagcccaggatgacacattaatcttttgttttccttttttatcaccaagaaaacggctgcagatggtaaacggcaggagatcattgttctggattccaagaggagcaatgccatcaacatcggcctgacggtgctgccccctccaaggacaattaagatagccattttgaactttgatgagtatgccttaaacaaagaagggatcgaggtaaggcaagttctatgaagaatcgttagtgtagcgaaatgtgcgttacattgttgcattgaatgtaactttggtggtttgcaatcatctttactcaactgaactctgaaagatattaatgattcttagatgtttattctgggctggggcaacaagtcttgctgcctgtgaagttcagagatcttggctcattgatgggcctcaacctttggttcatgggtctcctagggcttccctcactatttaaatgcccaacactcttcagattagagtgcttacctcagaatagaaaaagatcatcctgcctcgggctccttccatgtcacattatgtatacctaggaagacttatcaattgtactctttcattaggtgctgaaggccacacaaagggcattgttttgatcttacaaaaagatgtggtttggggccagagataagactcgcctaccatgcacaaagccctggtttcatccctaggactagcaaaagtgtgtgcgatggcactggctcgcagtctctgtacttggcaagtggaggcagaaggatcagaagtacaagatcatcctcacttacacatagggttgaggccagcttgggctacatgagaccttgtgttcaaaggaaaaaaacaaaacagagatcttgttgttgttgttgttgtcatatcatctggagaacagaacaagttagctgaggtattcatgcttgctgatctgttagagaaagatgagaggtagattgcccagtggagaatatttatctgtttatgattcatatttaatctcaaatctggctttctacccttccttaggtcattcagtttccagataaaagacatataacttttatatttataataagccttgatagaattagagctgagcagacacttgtcttgtaagctgttagaatccacttcctcatcaataaccctgaattataacttcgtgtgctccatctgggctgttcctaattctaattggtcagcctttatagtcatgttttcatagctcatctaccccattgcaactctcctctttccatctctccctcctgtcccctgcctctgaccccaagcttgggacccccccctccaaaaaaaataccaatcttctgcccagctataggctataggcatatttactagccaatccgggataatttggggtgtaaggttacatgatgtcacttgggtctatgtgcacattcttttgtccctggaagcaaccaggccttgggagtgcagtatttgaccttgcaaatgtatatatagtaaaagaccaaacatcaataatttctcactttttttgtctaaataaaaaggcattttctcttataaaaataaataacatatagtaggaacagttaggaaacaattattctatcttgatgagtttagagttctgtatctaaatcagtttctattctaatttctatcctaatttgtaatattaacatcctcctagtcttagaacatcttttttttttttaacatggcagtgaacagagattttatttaaaaagcacatgcatttgaaaagtacatgaatataaacagttatttaaatttgggagaatttgagacaatagcgaagcactggaagtgttatatgtttctaaggagttacatcacatttacaggactggtaaagtggtacagtccacatttaaagataaattgtgctaattctagtaatcatgtagtcacacacatatgaactcacgcacataaaatacatgattaaccttttaaggaacagtagaatgttttttgttttttttttttaattttattttatttttattaggtattttttagaacatctttttaaatcttaaacaatttaagcttatagtaagattatgactatttagtctttaatcccatcagagacctgacaaggaataaatattattcccaggaattgctgggatgtagcttccaaaaattatagaaatgacagagacagctgaccatctggacagtccctagtattctctctagtgctggagcatctatcttcagtcttctggcccaggatatctgacagaccttacaagaagcagtaatatgaagggctttttaccttgtcttggcagagtttggcaatcaactattctgcatctatttgccatttcttgatagcattttgtctgcagatgaatttagggaattattttgcccagtgcctagtttgccataattgaagcaattccatatggagcttatggtgctcatcgccttcttacaagtttaatgtggcattgccaggagttgacattcgttaatgtcaaaaagatcttaaattaacaaaattatggttaaattcaatattccgtgactctctgagattttttgaagaccatctatctattcatagcatatctgaattgtcaaacattgcctgtctccagctatttattttctgtataagccaggatgtatatttctgtgataattcagactagtatctgacaagaccatgagtttggctgactattaacttgcactacttatcctaaatggtttgtaatagcagttattagaaggattgcaattaaacctattattaaaggagatgcataggcataatatctttataagagttgaaacatataaacatattttatgttttaacaaattaatcttaaattttgtatcaatatacaaagatttatattaatgaaaaccttaaatgtgcatcattagataaaattcaataccaatgtaacaaaatatgacctcaattctatatcaaaatataaggatctctaccaatgtaaaattatggctgtaagatgttttttggtttaagagtagattcaataatctactcctatttgtcccattttttataataatatatctatattctactttttcttctctctccctcctcattagtcccccacctctgacctcaagtatgagaacctcaaaaccacactcatcttctgcccaaccataggctgtagtcatcagggatgacttgaggagggcaaaattacatagcatcacttgggtctatgtagggattatcttgtccctgggggaaattaggccttggcagtcaatattaaacattataatacaaagcaaaagattaaacctcaacatttttctagaaacaattcctgtccctctacatggtcatgttctcctgcttctgtgagattgtgccagattgtaccaggtgaaacctcttatcatgatgatggaaaagggaggaactactagacaacctacagatttgcacccataggtaatattaccttgagatatctgggtaaggatgaggagtatggagacactgctttgtgatactgggtgtcctattctattggcaagaagttttccatatctaaggtttgttcatccacagtcttgcttgcataatttgaacatggatgggacctgtgaaacttaactctagaaagaacacaagcctttggcagagaagtccaaagaggaaagcttgaccacagtactaggttctcctaggtagaagagagggcagtaagcatacagtacgtgcaagatttggagcgcagcatgccaggtatacctttgtgctttgggaagaagagacagttgcaagaaaaactatccactgaaacaagaccttggttgaacatacactatccctgccaagttcatgttaatacaggaggtgacctcacttgaaaaggcagttctgttaaaatgggccatcagtcttctgactggtactcttataagaggagggacttttggacacatacagattacagtaccacttgaatcagaggtcacacagatacattcatggaatggaaagccatgtgatagcaggggcagaaattaaagggacattcctgtaatccaagggatgctaacgatcatgttgaacatcagaagctaagagccaaaggaatgttctcctctccagccttcaaagagaaagcataggcctcctaccaccttaattttggacatcatgagaaaataaatttaggttgtttaaagccacttgatttgagcaacattgttactacagcaacaattggacatgcagataatatgctagatcttgggggtacctacccccacacacactgacccacaactagaaatgtcttcatacactgctaacctcccttagggagtaaaagcatcccagccaagagcttctgttggaactacctccatatccaaggactgcctatcgttcggctgttctcacatagctgtgaagaccatggactaagccctcctatagaatgtgcaatgcaggatgctctgagtggcatagaagatctacattcatgtgctgggaaggacccagggcttgttctggactcctgtcattcaagagttaaaataagacggagaagaaaaagcaattgtcaacttacagccctttgctaataagatttgtggttaatgccttcagccagaccttctgcttcctggatacacacattatgtcatggcatctcagcttcatagggccactggaaagctctgtgctgcaaaatacaattaggatgtattaaatgacatcctttgccattgcctagcaactcatggtatgaatctggatttgtcatacaaacctgagtaattaactctattaaggaagtggtttgcagaagaggattcatctgtaggaagttattttcgaatcatctctagagagcatcaataatatttttccagtaaaatgcatgaaatgatcacaaacagaaatgggaaaacatactttcccccctttgcttttatgatttttagagtgtagtccacttaaaaggcagtataatacagtggtctttcatgatgtttaacgtggctcactttggctgtcagacccagcattatcctagaagcagaaatctactttaatcatttgtgccatggtatcattctaaagagtttgtatttcccagtgcctgtccttagttggcttcatgggtgctggacatgggcaagtcttctcatggagctggcttagggaaccaagatgctctgaagatgaaacacagctgttctgtttgtagtgcttgcatccacagatgagtgtctgtggaagatggagctgctgctgtggcatgaggggcagcccctaacagttctccagctctgcatgggaaagcttcaacaagtcatttcatctgtgctggacacaataatctcttgcaccaatgcgcactcttcagagtgctcatgagatggaaggagataccaccagggtccttctgtggcttactttttaagtcgctgcaggaaggtgcatggacagaattccattttctcacaatagtgcaacctttacaaactacccctggccaagctttcccaagcccttctgccacacccatgtccctgttgtatattcttcatcaccatgactacagtctatcagaatgaacaagtaaaatcattatcgctgtgtctcatctgcaggtaaatgaaatggccaaactcaacctagcatttagatccaaaataaagggtacatttccattgttttcagggggcagaatggtaccttctggtatgagaacaagtatagttattgtagtaatacagagacattatttagggcagtggttctcaacctgtgggtcatgacccctgacaaacctctatcttcaaaaaaaatatttacattatggttcataatagtagcaacatttcagttatgaaatagcaagaacaatgattttatggttgggggattcatcacaacacgaggaactgtattaaagggtcatagcattaggaaggttgaaagccactggcctaggaagaaagtaaagaaaaattcaaattattacattttggtcttgttggatgttcctttccctctaaaaccaagtggtgattcaaaaaagaatcatcaaagaacctattaacgtagcaagaatctgacttaagccttgccttctgttcgtctgtatcatttctggtggaggaaaggaccaccaactcacagggggtggctctgacatcctgtcccactgtcctatcgcctttcttattgacagtgatgtaaaggaaggagaaaataaactagcagatcttaggcccagaatcctcagtggcaaagaaatggttccaatcagagaagtaaatagcaaaggagaaatgttcagttccttcaaggggacaaagcaacaaagcgtgcaggaacatgtctcctggaggttagaaaggtgctggcaagcttttgtttggaaattcctgttgtgcctagaacaatttaagcattatgaaaattagagtgtgcttcccccctctaaggattttgagtccaatggtagatgttttcagagtgttatctgtttgaaatgtttggatttttttttaaatccactgactttgtggacagtgtgacctccagaattccaactgaatctctcctgatattccaattctgcccacgtagtctcatcctggagccatgctgaataacaacctctgctctatagcatcttgaggactgtttcattttggtgatgtaccacaatgtgtttacctatttatccactaaaagctttaactcgacacagattgggcctattacaaataaagcaactgcaagtattttaatagtttccagtgaatatgttttcactttcctagagtacatacccaggaatggaatggcaaggtcatagggcaacctctttgctgataagttacagcttatgttttcattcttgttacagtgaaaaaaaaataactaggctatagtttaaccttatcagctgcggcttgtggaaatattttgcctaccatgggtcacaaaggttttctcttgtttctttccaaaatttttatggtattccattttacttttaaaatcgtgatccattttgagtttctttatgaatagaggagaattaagttgagggtttttgttctgtttttttttgtgtgtgtgtttttttttttaatatggaatctagttgtttcaagaccacttgttgtaaactgaatcctttctctgttaaatagtttttcacttttgtctaatggaccatatttgtatgccccgtactgttctgtccttctgctctgttgaaataaatattgacataaatatatgcacaaagcctactttattgttatgtagtaacaacaaacgaattttaaagtgctatttatgatgaaatatacaagtcataaatataataatatataggctatatatgttgaaaattagaataatacatgtaatctataaatttaactcagttccaactaaaagtccaaaacggttttgtatagagacaaacaagctggttctagaagctgtatagtaaggaagaagaaatggaaaaaccttggtgaattgtaaaaggtgatcttagaagtatcattctacccaaattgaagaactataggatcatagtaattagaacaattatatatatgtatatatatatatataatcttacatttgactattgtttctacatagcaataaagtaggttcttgtgacttggccatgtatcatgaaacattattaaactcaattccgtgatttcaaaacatttttgcttgttgttcatagttatttaggtagactatcatagcctttatgaacaattctacctttttcttgtcttctctgtctctgtctctgtctctttctctgtctctgtctctgtctatctctatctctctcttatgtgtatgtgtggaagggaggaaagggttttcatgcagaattaaaatagaaatgataaggacagactaatttttttttctgttttaaaaatataatgaattaggcatttgaaccagtaagaatcaatcagagtctagcatccactgtcttcttcacattcaatagttggtttttccagaggcaaatagaaataggaagctatacttttccatcactgagcagtgtgtacacaactatgaggtttgcctcagtcagatctgtgtttgatactgcagcattgcttctcaatgagttttggttaaaatttacaattaatacataaaggccgacatgacttagtcatgaatgtttcattttttgcaatccgtttatgagatgtgccacaaagcacatgttctcaacacaccactgtatctgctagggagcaggaagcgattctccaatattctgtcttcttcttctcacttatcatctgctctccttgcctgaaacaccctttatgtacaaggcctagaagtcctggagcaggatatttaaagtttactggtgataataacataacaccttgcatattaataaaaacaaaatgatgttaacctcctgcttggaaaattctaacagaaatttgaaaatattgaatgagcagagtccattactaacaaagaattgctatatcaccctatctttctagaaaattctgaccatgattccaactgaagaggagaagcagaaaatccaggaggctcagctggctaacccggaagtgccgttgggcagtgcggagcagttccttctcacactctcttccatcagtgagctctcggctcgactccacctgtgggcattcaaaatggattatgaaaccacagaaaaggtaggcaggttggaggggcatcccacatgcccgcgcttcccagtggtctttacagttggtaaatactaagcttgcgaagccttgtccttgacacggagtttggagggtaagctgctggtcattgtgttatagctcacactgggtggtgggcattgcatctgtggtagctggcgagctccttgctgataccagcctcagattcctggctgtagggagcaaacaaatgacttttttgtgatcaaaatttttcatggtagaaactataaaaaagcacaaagtgggggaaatctatcatgttccacttgttgataataatcccaacttggcaccggtcatggttggcagcttcatgggtacctttgagaaaaaggtagtagctacttttcttattgtgtggccaaatgtctgtggaagaaactacatatgggaggagggttttgttcagggctcatgatttcagagggagaagtctttcaggaagaggagagtcatggtggtgagagggacagcaccatccatggcagcagcagcttaaggcaacaggcagaaaaccaaatcatatgagaactaaaaagccagacatagtagtgtgtgtctgtactctcactgctcctttaagacaggtataaattcatatacagagacacatgtgcatacacacacacacacacacacacacacagagagagagagagagagagaggttgggggaggatttagatggaaaaggtacttttcttattgtgtggctattttggtaacttcctgagtctccctcttagcggtagtactttgatttagaagaagatactactcaacaggtcagtggacatgctcttgtaggctgaatatgggccagcggaaattagatggtgagccggaggggcttaggaccagagaagatgaaggctggagctgggaggagttaacatggggctggactggatatattctacaatagtaggtttgggaggtttgaggggaaatttcaggatgagcatttctaatacaaaaatctgaaacctgtggatggtcaaaataataccgtagtgaaaatttcatacctgacctcatgcgacaggacaaaatgaagcaagagtatactaaaagtattttaaaatattgcctgaacttaccttctggcttggttgcaatgagtgtgttatgatgcctgggtgagttttttccttatgcttagatcccatctctggggtgtcttattagctatattcaaatgtttcaaaatatgaaacacatctgagccccatgtattttgaataagggattttatttgacccattctacatctgaactcatggaatcaagcagaaatgagactgcagggtgactgctgcaactcagttgtgaatcatctggcatgcttacgtgattctagcagagtaagatgatgctggagaaaatgatgtgtgactagctgtggttgaggactggcaaggcagggctgctggagagagtaaggttgaagccctggtatggggtgccaggccagtgaaaaacttcccatgtcaaggccaatgaggctgcaggacaggttaagtgtctggggggggggggggcgacagaaacaagaactgtggctttcatatgtgtccaatccaaataaaacccacaggcttcctgttttcctagatagcaataatattccttaagaccaattcttaaatgtagttaaaatctggagctgtttgtatgtgggtatgtgtgtttgtgtgtgtgtgttaatatggttcttgagtgtaaactttgtacataacaatgccatgtcacaatgtcaaaagatcgaacatacctatttgagtaactcaggctaagaggtgaccctcatggagtgccagaggaaacaggaggggattgaggtggtccacagactgtgaggacacagtgtgtactgtcatctgcctgcaaagaagaaagacaaagaggatcctgcactggtagtgctgaggggtcaaggaaagagagatggccttggaagtcagcatggctgtgggggagactgacaggaatgactgacatcctgcctgaccaaggaagagagagcaagcagtcttcactccagcactagcttcccatagccttcactgtggtgtctgcgggtagacctacccctcagccccctctggtacctttcaggactcttcatatctaggaccaaatgcctgtcacaccagcttgtcctatgctagggactattgcttactggaatacctttagactacacaaacctggaaaagaacaaaacaggccaaaattcttactcatctccctctttctttttatctgaaaggaagtggccgaaccacttttggacctgaaggaaggaatagaccagttggagaacaataagactctgggcttcatcctgtctactctccttgccattgggaactttctaaatggaactaatgtaagactttccagtcctcactccctggcagcctttatcacaaagcctctgccgtcgcatactgatggagctgtaccttccattctctgaagcacagtggaacaagcagcttttatgtcttgctgaaaaattcaaagctttctgtccttgaactatcaggggccattcatttgaatatgaactcttctataagaaagcttgaaaatatgtttaggctttataaagaacagctctaaaacattaacctcagaggattttcatccagagagattatatttccctttaagcttctcactcaaatatttaggcttatatacataaattttaagattcagtttgtttttaactgtctgtgtatatgagcatacacacatggtgtgggttcccatggaaactagaggttttggataccttggagctagagttatcagccaagttgtgagccatccaatataggtgctgtgatgcaagtgatcctctgcagagatgtatgccaccttaactaccaagccatttttccaggcctgatactgtttttaaaaaagcagacagcaagtagctgctgaaggtctgactttggccagaacattgatattcagtaatggtcagaggaaaaagaaacggttactgtgcagatgtcaaaggcctgtgagagccctgggaggtggctcagggatgtggcgagggtgactgctccagtttgagcagcagcagcagcagcagcagcagcaagagtgtatggtccaccagacttggagaaactaaacactgggctactgtagacagacactgaaccagttgaaagagcctgggtaatacttgtttttctcatgtcaccaaacaggccaaagcatttgagttaagctacctcgagaaggttccagaagtcaaagatacagtgcacaagcagtctcttctccaccacgtgtgcaccatggtagtggaaaactttccggacagctcggatctgtactcagagattggggccatcactaggtcagccaaggtacgtccatggacttggaaagtctggcctcatgggcctcactgttgggtcttctgcgtcatcacagaggcatgcagcctctggtagtgcgccattcggtgctcgccattcggtgctgcctataccgcctgctctggggtcgacaattatgactcatttcatgccatttctgaacttttaagatctttttcctatctctggtccttggttagattctttcctactgaggtctgaggggcaggcctgtcctatgatccttattcctgtgttcactggggagagtgttaccttccagactaccatctccaatattgcaaaccttcagcctgattttggtaggcaagccaaaagatactatctgactccttctggaattccatagtactgagggtgagatctggaattagaaactcaagtatgcctggctccagtgctcagagattggccgttccaatgatcttacacacaggggacatttttatagggctataaacaggatatggccttggaccctcagctgtaggctcttaaagtgcagaattaatatctttgttagcatatggctggttagggatgagaccattgcagtatgtggtcacgtagctgcttgcaaggtagggggaccactgagtcagaacaacatccagagaaacccaaatataacagaattgggaaaaatgaagttatgggtgtgttggaagcttatgggggtggggtggggtgggcaggaatctctacagggcacagaagccaagcctctgtgggaaaccttctggaaatacagtgggcatggcagtgtgaatgggaagtattaggatacactggagttgaacaacgaggtgtggctggagagcagagtggccaagaggtggagtcggagctacagaagtgtccttgagggagatctcttccccgccacccattggactagcatgtgaccaggtagctgggagtctctttcagcttccataggagttacagtctggcagtcaccaggtataccaagccatgtccctcagttgacttcatggtatacctgccttgagacacagttgtagctaatggttttttagtcctgagaagaactcacagaagatttttcagcatacattcttctaattgtaatgctcttaactaaccattaagacatttctccaggtcccatcaaatgtatttttttttcctggaccaactaaccccttgcgttactttagaaagcatcagatggggctactccggtcattccaaactctttgcacttcctagaacacttgtttatgctgcatctcctgtgcatgtgtagcttgcatgaactctcaggatctcgtgtctctccacctccatccacacccaggccttgaggatactgtagagcttagtctataggaggcgacccttgctgacgtggattcacttccctcctgcacttgtctttgtgtatgtactgtgctatcttagacttctgtgcatttaatccctgtgaatggggagtgtggccatagctactccataagtattgaatgcatatatgaatgacaatgaaaacatgacccaatcatttttcacataaaatgtcaatttcagtgaagagaagtcagctgtcttggctgggtgagcatagcagagcctccggtgactggggaagttccttagtcttttgtaaaatattggccgccaagaacaagaggaccccgggaaggtttatgagacttctgctaagctcatcttgtaccaggttcctccacttcatgcttgaatttacagttctcaaatattctcagaacgtttcttcccaaacaaggcaagcaaaggggactcttgtttgagttcacttggagaacagtttcatcactaaataggttgatgtggagacaatggaaaatacacatgtgactcgttttttaggccgcaaatatgcttatatttggttttgatgcttgcttccggccagaggcacttgggctcccggttcgggctgcagtccacctgtcttactcccttgctctgttctcccccctgattttcaggttgactttgatcaacttcaggataatttatgtcagatggagagacgctgcaaagcttcatgggaccacctcaaggcgattgcaaaacacgagatgaagcctgttttgaaacagcggatgtcagagttcctaaaagactgtgcagagcgaattataattttaaagatcgtccatcggaggataattaacaggtacaagcgctgaagagcttatggaaaattaaaaggatttcctacacaaggatcaggaggcttaattacaaaaatgttactgtgtattctaggcacacagtaggtcctcccacagcactgatgtctagatacctatgtatgcaaaacagtgccattgggtcttaattggaaggaattctgggaataaattaatgcaaaattcccccttgacccaagaattgcttttgtaagctccctggcaaattgcttcttttctgcagctgctggagtcatctcatctacaaagtgcccaccctctgtgcagttgctctccctgttagaaggattatcttaattctggtctatacacagccatctgaggaccctctggtgtgttctccagctgccctccagcacttgcccctgagtgggggctgggccctgccaccataggggctctcttctgagtcagccttcctcagagtcccagggtctaggcagcttcgggaggcctgcttcacttgcaaggaggctggctcaggtctagtgggcctagtgtggctctgagcctgtctgtaccacttccttttataccaggcatagagtccaggtcttccaaccttccaggaacggctgagccactcttcccccacatcctttggtgctttaccacagcacagggattaggaagatctctggccctccctctttttcttctttattcagcgtctccttttatcattctgaagcgcatgtaggactttctaaaacctggtgtttgtaccttcccatagctcaccccttcttgtgtcatttcctgctttgaggaacatacttcctccttgggctctgtgtgatgtatgtacatagtacttgtgagtgtcgagtcagaggtcaaggtcagatatcatcggcagttgctcttcccagagcctctcactgaacctagagctcactgattgaacttgaggagccaacaagcctcagagattctcctgggtttgttgccccagtgctggtattccgaccacacacttctatgcctggtttttcctttgggtgctgggactctgaactcactgaaggtcacatggtaatatacttttaccgattataaggtataaggccctaatttaannnnnnnnnnnnnnnnnnnnnnnnnnnnnnnnnnnnnnnnnnnnnnnnnnnnnnnnnnnnnnnnnnnnnnnnnnnnnnnnnnnnnnnnnnnnnnnnnnnncaattttgggaaaaaaatagtatttgtaggttgatggcttacccattgatcaggacttttgaaattaggctgcttaactgtaaatccccctgactccatttcagccagctacatctgtgtttcaatcacattatcttgcctttagatgggagaattttaaaagatattttgtcaagtttcttactcaggttatactatccctttgatatagttattaaagaggacatgagctgctttgaccctttattctttttattatgcaagtggttaccaacttttaaaaaacatgaaaacaaacagtttctatttgagatgttgttaaaactagagcaaattcattaaagtcttataaagttgttgtgcctgcttttggtaaccatttttatcaagatagattaaaagcttgtttcattgataaagctattccttatgatgtattttctcaaattgatccatccaaggtggtcacttggatctaaaacagtgctctggtggtagagaatgagcaatttggaggtttaaatgaaaaaatttacattaaaaaagaggagtcagtaaggtcattattacaaatgatgttactgtctgcggagaacagattcctacgttgattcttgcatatgcacagctcttggaaagtgacaggagataatatgcacaggatagtatgccaccctatccttgtaatatctattttgcatctggtaagtaatgtcatgcgtcagtaagagccaggaagctcaggctggagtagtacggggtgagcagtgacaagaaaggtgttgctttatgtagggtggtctgggaaggctctctggggggtgatgatttgtcagacatctgtgggataaagagcatgtccagcagcagcagaagcagcagcagcagcagcagcagcagaagcagcagcagcagaagcagcagcagcagcagcatctatgcaccagtatgtgggcaaaatgttctgagcatagcaaatggctcatactggatacctcgccagtcctatggctctttgctctttggcctctgtgtccttttaggattctttacagactacacaggggccttattccatcctgaagaatgatagccagcggtccaaggtggttggaatcgtgacaagttggcagagagtggagctggccgtgtggtgcttgtgtgcatatgtatgcaatttaggcgttcatctgtaggtgaacattgggttcttagtttttggctgtcaaaagtgatcccgctgtgaacatttgtgtagatgtttttgtatgtacacacattttcttgtctgagtgtatgcacaagaggaaaactgctaagccatgtaggtctgtctttaactttctgaagaactttgtcacaggctttccatagcagttggccctcacatgttcctaccactgctgacggagaatcacagtttctccaagtccttgccaatactcgactatgttttggagagagccctcagtgtgcgtgaggcagtatagcatctgttgtttcaaccttcatttccctcttgactaacaattggaacaggttttaatgtacttcttggctatttgtgtatctttttataaaataagaaatgtctgttcaaaccctctagctgtccgtttctcagccacgagatttctctgtatatcctgggcagggtgccttaccacatgtgtgacttgcagacactttctcccattctaaaagctgtgctttcactgttggtaaagtcctttgaaacacaaaaggttttcattgtggtgcagttcagttcattcttttctactggttgcttatgtttttggtgttatatctaaaaatgcatctaatccaaagtcatggaaatttgtaccttgctttcctctgagggctttctttcttgctgtttggtttgcttgtttatttgtttgttttagcattttatccccctttgctttaaaaacagcttacatgttttactctgctatgttttacaaaaggaaagcaaagtgtccttcactgaaaagcaaatttcatccatatcaaaactgtacaaatcaaagtgatcaaggccacaaggttttgtcaatagctaatggtgtcatttatgtaatactctttgttctacaaaaaaaaaaaaaaaaaaaaaaaagtcccgtattttctactgtcttatttcttgcttcctggtacctaaaatctgtgtgctttacaaagcacaaagcaaataggctctaaggacttcgtctgtggaagtgtcttgcgtggaggctcggattgccttgctctcggtttctctgcctcagcaagcaggagtcgccaggtccagcttagcagcttttaatttagaaacataggaaattgtatccaacttatttgacatgtcttagttcaattaagattgtatatttagtactgcaagaaaatgtttcaagatacttggaagcatctatttagaagccaaatactttataagcatctatttagaacccatttttaaaatataccatccgtacacattcagttactcaagagctaagtgagggatttcaaacacctgtctcttcccatacagttcttatataatctagaaattgtgctgtgtctcccttaagatgtaacttggtcattttcctgcaaagtttggcagatccatttacaaatgtaaagacaagtaagaaaatagtcataaatcttccaccagacttagcatcatttcaacaggtgagaatgggaagtaaacttgaattttgcttcatctttacccgagaagatgcttcaacttaacaggcccaggaatgaatagtgtctcctgcagaaagcctagctcagggatttcttagagaaaagttctacacaagtaattattgtcatctctgtcttttgtgtgcagatttcactcatttttactgtttatgggccatcccccttatgcaattcgagaggtgaacatcaacaagttctgcaggatcatcagtgagtttgccctggagtatcgcacgaccagggaaagggttctacagcagaaacagaagcgggccaaccacagagagagaaacaagaccagagggaagatgatcactgacgtaagtttcctggactcaggtgcttcatgctatggtttttgaaagtaaatcaaatcataagtaggtctacaattttggaagtatatgttgttttcttcttcctgtttgtgaacagcaacacagaaaagcttcctcttctacaaatcgctctcagtcccctcttctgccacgcctgtggaaatctgttgtgtaacacaggagtaccaggacagtgaaaattaagacggggtgcttggagacatcttagttgatcctgaggacagttgacattgctgaggggtgtgtgtgtgcatagcaggtaataccacctagcatagaaaggcaggtgcatttactggacattaaagcagaattttcattctcctaacagtgtcatgtgtcagttagccagttggaccactcagtttgagaaggtgaaatgacaaactgatgtcattcctctaagacgtaacctggtggtcacataatttgagtcacagagtgttggggttggaagatatcccagaggacattaagtctagcagaagtttctccacagcacctgaggttatcttcaacagttatctccccacattgctggctctctacctttcctctcacccatgagcctacctaggtactatatcacagccagggaaaggattgtgaagcagaaaaaatgggcaggctaactacagatgttgtatggatgtggcatgttccataaatggagccaatgtagactggcaaaggtgcccagtgcatgctttctttccaatgtgcctgtgtgtaacatgaaagtgagatgcctccctcatgagttattaccagtaagctacaagtctctttttggaaaaaaatatgaagatattttcttagagtcccccttttctgggaatcttcctttctttacttacttgcctaggcatggatggaacagggagttggagccattagatcctatctggaacgtgttggagagagccccagtgtgatttttttttcattgttttcattagtgtctgtgacctttctccattggtgcaagagctcggtgtcctgggcttcccaagaaggggacagggaggagtaaagggttaagccatcagaacttccagcgcttaagcctcagctgaactcaagtcaggcagatgtctctgcagaggaaagaaatcaattaagcccttctggaggctgccatctgtggccaggggagtgttaatagtcaggcaaaggagggaatgtggttactctgagtaagcattcctgaggcctctgacttcctgcggatgcccagatgctctgactacagatgctttgtacttaaaaggcagttctgagaggagccatagactatctgtcccctatcacccactcactcccaaacctcttgcttccttgggtgctgcttgactgtctcctggaagaagcctgttctgtagcccttcacaactctgaatgtttgtgctatcagccaggctattccagcttttaaaacctagttcccttagatctttgggtttctggagtattcagaaagcaaattggagccacttgggcaagctctgacctacatttcattccaaagtgttatttttaaaagtcttaaaaagggatcatttatttctgtggaaattagacatattgtaaggcaaacaacacaattccaatatgcttatagttaggaaaacacattaaaatttcttgccaaattcctgagaattttttttttttaaacagagcctactaagttttaaatttgtccttctttgagaacatttggctctggagaggtaatgtttctagagtgtggttcaaaagtatttaaatttctattaaaatctggactgtacagatttcttcaatgatgttagcttttagactagtccatagtagcagaggtcaaggtagtatttgtgtggaaagcctgccaccttctggcatattagaatattgctactagagcccgacagtcttggatttgcccaactctgagaaaggcttgctgtatgcccattactagggtgcctggacaggcatgaggacagtgagagacaaggtcataacccagggatggacgacacagtctgattagaaaatggcatacgcacagccaaaactgaagccacagggtagactcagagttgtggagcctgaacattggagttagaaaggacttttagagaattctgcagagagtcagttttattgtagatacaaaataaataggtttgtatgttagcagctcacaatgagaagtctgcaggaacgctggagactgccttctctgacctgctgtctctccccaaccttcctgcctaccaagcatgctatgggcccctttcccacaacccaggagtccttctacaaatggcccagtgactcgttcttcatctttctgtcttaacctggttttagacctccagggggaccctgtaggtgtccaggcaaggtaacgatccgcgaagagatgagaatgaagacagttgttaagattgtctttgtcaaccaggataacaggttgggaagtcggatatcaggcagtttattcccaacacacttaagcccagtataatttggaacagtttcctggtataatacaatcccccactgcacaaggaagtgcaattatatcaaaactcagggtacatgtcatttctgccgagaagatgggttctagagatgggcttaagggcccaaggaaggtcctggcctggtctcagtcagacagacagtgtagaggtcatttgggctgttagcgatttctggtcctggttgtgggagcttggggaagccctggttataagggtcatttagattactagctgcctccagccctagctgtgggagttggcctgacccaatagataacacagaccactgggctattcatcactctcaattcccagctttctggatggaaaaacaggtttttaaaaatctctcccattggaaagaaaatcctgtgtgtttaatattcctagtttctttagtttctctgtggatacagagactttgtgctgtgtttccaatcataatccaaatggtctatgggaactcagcttgtcaagtcacaggactctattgcagagggaagagggaccctaggataagacccttcaccttttaaccctgactactccttctataggaaagggactgatggcccatcaaggccttggggtggctggagatgcaaaacacagcatcttgcatatgtccatatgcctgataaaaatgccagtcatactggctaaactgataattcactgaacaagaaggatggtagagaggacttgttatcttacagtctaaatgtataatcagttctcaaaaaatcatgcctggtctggcctctagcctctggaaatacttatattaaaagtgtgttgagtttgaatcaagatactggcatggtttttcatgttcactttatttataaaagggtcttcaaagcacatctactgataaagtaattgcagtgcaatgtcacttctggtgactgccttgaagacgaacaacaacattttacaaagagcttaacttcgtgtgtttgaggatgttgtagtatgttatgttgtgcttgggaagtttttcatatgtcctgtgtgacctgtgtgaagaaagccccacaggctgggcatcaaagagcctagaacttgtgatgggtacagccaggtaaatgaaggctggtctacttactgaggcccaggaagccagtaggtaatcatgggccaagcagacatagccagctgcatgagtctagaagcttagttgtgttcagggaggctgattactgacctcatgggtttcctcaagagtttgacctaaagcccttcaaatacctcctgcctcctatcagtgtgaccttggagcactgagaaagcaccctgtaaggacagagagagcctggccccttctgacttacgacagcataccctgctgttagtggctgctttctgttttttgtttttgaacatgatctgtcaatgagattatttcatctttgctgatgtctgagccttctaagaatccttctgtcttttccatcttgtcctgccctgtcctttctggtagaccgatgacgaggatgaagctgaggtatgacaattcatgagtgtgaagaatgccacatttgcccttcccctgtgtgctgtagagtgacctaacagtcagcatgaagtggtagcaacatttagcactgggaagctgtgcatgggcattttctgattagtcttcatgtgatcactaaccatctgatccgctctcgtcattgctgtttgtaccagagattggggcactaactacattttgccatgtctctgagccacaactaatcagttctctgtcactaggatcagatgaggctggaaaaagtgggcagtttcccttccagcccctttctgtgctttttacaatccaagctgagcacagagctgcacgtctgtagtcctagaacctagaggctgaggcaggggaattgagaatttctgaccagggacataacaagaacttttatcaaataaaaaagaatatgtaaagggaaaaacaaaattggatcaggctggggatggagctcagtggtgcaggtcttgcttgtgcatcagaaggctttgggtttgatccacagcattggaaacaaaaataaaaacgaagcaggataaatatacagagcatctcagagtcgggaagaaaggtgaagagttacggttggtcctggggaccgaggaaggaaaggcatagacagagtaagtcacagatttgtcacagttctgtagcactggctgagaagcagcaacttggagctgatcttggtccaagctcatcttcttgttcttcactcagatataagcattgtgtgcatataaagctctatatagagttctggaacacacctcagaaaacatatacaccctgcagtttagagaaaaccagcctgggtttagaatgcttgttacagcaagcatctacgttcttgacaatttcaggctgaatttatctggcatgttctgttctgtggtctgatgctcaacacttttgtgacctctggcaagccacttattcttagagagtctcttttctttttccataaaaggtagatgaagttaagtctaccagaattctcagcattagcatagaaaatgaagctcaagacagttgatgggcaaagtttttcctttgatgttttgtcagtctcccctaggtgccatccactccagtgcaggatggatcgcagtgaagttccttctggggcttctctttgtggtgttagatcttcttgtagagagatatttgccgttgttggtattctccatgactgacagaactccatgatatactaaatacacacaaagagaaagcagagaagtgttgcccgggagtgaacactttctaagcttgttggcctccttgacgagtgtcctcacatcttaccctcactttgcttttgcagtctggcaagttctctggcagttctccagcagcaccgagccagccacagggtctgagctatgctgaggatgcagccgaacatgagaacatgaaggccgtgttgaaaacctcctcccctgcgctggaggacgccaccccagtgcttggtgtccgcactcgcagccgggcaagccgaggtaattctgctgacgatgtgggggctggtagtcccaggtaaaccaccccagaaaaattctcttcgttgcagtgtgtggattactatgtccagagagtatatgtgaagcgccattaaatccccagtactctctatgctgacttatccctgcatctccttacagaaggctgtactggctagatgtaaagaaggcagagtgaaagcttcttaggagggggactcctgtactgggacttttcaatataataataataatgataataataacaataactattattattattattattgttgttattttgtgtttgtttatgtgatgagtgagtatattactctatgcacggagtgttcagagaacaagtttgtagagtctggtttctttttgttttgttttggtttggttttggcttttcgagatagggtttctctgtatagccctggctgtcctggaactcactttgtagaccaggctggccttgaactcagaaatccacctgcctctgcctcccgagtgctggaattaaaggtgtgcgctaccacgcccggcgtggagtctgttttatctgcccacctttatgtgggttctaggattgaactgagctttccagacgtgtgtggtgagcacttttgccctttgcagccatctttgtgtgcaaatagaatatgccagagcatgcatgtggaggtcagaggacaacatggaggagttcttctgtctttctaccctgtggatttggggaaaggaactcaggtcatcaagttagcagcaagtgccctgacctgctgaggtctcacatgggccctatgcattcttttctatatgttataagccaagaaagaacatgaaaacatggctgatactctacaggaaagtagacactggaggtatagccctcagtcatcaacatgctggaatgtatactcaaggactggaatgaccattgcaagtacttttcttaaaaaaaccaaaccaaaacaaaactaaaactaaataaatacacacatacaagtaggttaaataaaagtagatgattttacagataactagaatttataagaagactcaagtgggcttcataaagccacaaaataaaacacctgaagtaaggaccatagttgacaggtttaataacagatttttttccaaaaaggaaaaatttattgaattcaaagacaatatatctgaaaatatgcaaagtgaagtatggtgaaataaacagagcaggttgtgtgagctacaggtgtgtcacgaaataatgattttttccccacatgtctacaaaacaagcaggtgggccagagagatggttcagctgttagatcactgtttagcctttcgcagcacacacatggcagctcacagatatctcaaactccattctcaggggatccatgaccacttttggcttcagataccaggaatatacacgatgcatacacatacatacatataaaacacccccacacataaaagaaataagcagactaagtacataataaaaaaatttcataggcatactgctgaaaaccacacataaagataatattttcataacagagaaaagacactttttacctatagcctgggtgtagaaatgatggttcattttttcaacagaaactatagaagatttaagcaaaacaaaacaaagcaaaaaggcagattgacatctttcaatgccagagaaagttctcctctagctagataatccctttggggattatccttcagagtgaaaacaaacatttctctgtattaaatcaacacctctcctgacatgacttgccctttgtaggctgtttaaggttagatttctaaaagggaaacataaatgtctgtttactttcaaacaattacacagcgtgagaaatgaagtgaaggtaaactgatatcgtgctgttatggtctagaatgctgcatccctccactatgtctaatgccttggaatagcccagtgagtcttctaggccattggatgcatgagaggccatggcagtctttctccaatgtctgcatggaggtgcagaggttctaagagcatgtatataagcagaaagaatgattataagtggtaaccaggtagcaaggagaagtgaccaaggaaagagaagatgcaaacaagaaatcaattccacaatgaggtcacaaggagataaagttgtcacagaacagcctggtaatgctttaggtttctcattaactgctacatcaaaaccgagtcactgagaaatgctggtaaggctcagaggggagggtcacttcatacctgcatttctgtccagtgttctcaaagtatatcaggagcaaatggaattgatggagttgtgtgtgggttggtaaggatagtttagatttcatacagaattttaaatcagctggtggaaaggaatcagacaactgctgcatgatacagttttgctgtttggtggctctactctgaggacagccattaagaaatctaagcaaaagtagactttggaaactgtgtcagcctaattggggatgaccttagctgaaatgcccagcagtagggagatggaacctgaagagaccacctccagtagatagacaggttccccagtagagggatggggttaccaacccacctccaaaaattttgatctggaattgttcttgtctaaaagaaatgtagggacaaaaatggagcagagactgaaagaaaggccatccagtgactggcccaacttgggatctatcccatgggagggcaccaaatcttgacactattactgatgctatgttgtgcttgcagacaggagcctagcatggctgtcctctgagagactttaccagcagctgactgagacagatgcagatactcacagcctaccattggactgaggtcaggacacctatggaagagttaggagaaggattgacggagctgaaggggatggcaaccccataggaagaccaacaatgtcaactaacctagatccctgggagctgccagagactaagccaccaaccaaagagtatacttgagctgagctgaggcccctggaacatatgtatcagaggactgccttgtctggcttcagggggagaggatgtacctaatcctgtagagacttgatgccccaggaaagggagatgcttggcgggagggagcaccctcttagaggcaaagggagggagggtggggcaaaggactctgggatagcagactggaaggaggtgcaacattttgaatataaataattagaataatttaaaaaccgtgtcagtaattataacagccattgccacttgacgatactgtccttatcctctttcatatttatagtaagagttcaagctcacatatacacacatggacatacaggcatgtatggacacatacatacaaatacatatatgcttatgcacacacacatacacacatgcataaacacactcacacatacacatgtatgcttgtgcacacatgcccataaaaatcatagtttactaaacaatgattcattgttctcagctagttcaatcaagttctagagcattaacagctaggtacttacaagcctcagaaccttaaaaataacagtaagaaaggagacataagatatatgcatattaacataatgtttattaacagtaaccttcatttaacaaaaaaaacatttaaaaatcatttacctccctcagattgagcagggtggcatttctttggcttcctctagcccttactcaggcacaatatcagtggctatgaattagagaactataacctgtaggcttgtagaactgtacatctattagaaaatgaagtttaaggtatagagatgaatgggttgggatacccccagtatctttccttctgaagaaacttcatcatccaagagttttcacaaggatgttaatctgccacaaaggccatggtcctagatgttaaatcaccattggtttctaacagatgttgcttggaaattcatgctttcttcttgactatagatagaagctacctgtagggagatttggatgctcttagcatgtagttatttacaaaacatgttttcttgtgaaggaacagacaggtatttcagagacaaactatgtcaagatctctactgctgatgtaagagggcaagtttgctctccagaggaaatcccaacataaagtgtgtatcacaaacactattggtttctgtaacattgactaggtacataataaagatgtgattcagtaatcttttggtggctctctgtgtagtactggatgtgcctttctggatgtcactgatcctgtgcagggtattgcttgggtcatgtgccctcagataatcataggacctgcaggtagcaatgtcacacacaggagagagggagagagttagataacaaagagataggaagacagctgtgttgtaggaaaatacaaaataaatgtcccagtttaggcatccacagcaccagcaggatggcagacacaggtggggacaggccatcaatctaggcatgtcactaactctgaagctgccgctgatctttgcaggaatccacttctgatggctgtcagctacatagaaaaacaataacattttgcttctttgcaatgatcacatgagattctctggtggtctaattttttcaggatccactagttcatggactatgggaactgaggagtcacctagtgtcactgatgatgcggctgatgagatcatggaccgcattgtcaaatcagccacccaagtgcccagtcagagagtggtgccacgggagagaaagcgttccagggccaaccgcaaatcttgtgagtacattttgggagggtagggccgtgtccttgcttttcaatattacctggaaggtcagagactcagaaggaagctcccatcactggtctgtggctccttaagagtactcacctgcctccttagcaagaaggccctatcagtatctgccattaaggagggaggggtggcagccatacttgtcaaatgtcctttctgtgtgtgccctatcctctgtaagttaatactctagtgaggtgtcagaggccattgaaagcctctagtagatggcggtagggcttattaccatactagaggctgtgtttacttgctgaggtaaaggctggctcctcccagagcttaccatagactttggtaggttaataccaataaaaagcagggtatcgagaggtcaagcttaccatttaatgttttagcttcatcagggtttcctttttccttccaaacagtattcgactaaatcaaagtaactcgttagtcttttgagtctgaacttgctgcccgaacttgcccctctatctgtactgatcttggcatctgccaatattagctgagatccagggtgttctaggctcattttcctggcttcaacctgcttctgggtcattcatggggcagcttgaatgtccactggctttggctctgacgctaagggatgttgaagagggaaaggaatccccaggtaaaagcagagcaatgccaggctggcagagaacttagtaaggatgcagatacaggacactcccagttatcctgcccatgaggttcacacaggggtgactggggtatggcaagaaatgttagccttgtggttctgcttgtctcaatactgtcttcccttcccttcccttcccttcccttcccttnnnnnnnnnnnnnnnnnnnnnnnnnnnnnnnnnnnnnnnnnnnnnnnnnnnnnnnnnnnnnnnnnnnnnnnnnnnnnnnnnnnnnnnnnnnnnnnnnnnnnnnnnnnnnnnnnnnnnnnnnnnnnnnnnnnnnnnnnnnnnnnnnnnnnnnnnnnnnnnnnnnnnnnnnnnnnnnnnnnnnnnnnnnnnnnnnnnnnnnnnnnnnnctcccctcccctcccctttttttattttaagagcaaagaatgccaaaccaaatccatcatagcttgctttttgcatatgatcttctttagtatctgatgggaatcctttcccataagggaaaataacactggggtcagggtgaatgatataattctgctgaagatggatgggctaagatgagttggcttctggggagcatccaggaagatgctgctgctgcccttggtactcacattgaggatcaaggttctggaggcatggttctcaaccttaaatatacattagagtgttctgccaagatttaaaattctaggtatctttgctcaagcgatgatccaaatcaaccagtgagttcagaactgtagggcctcttagtcactgccccttagagaattagttagtactggctggcctagaaatcactaagtagaaaaagctatctttgaattcacagctatcctctggcctctgcttcctgagtgctgagttaaatgcatgtaccatcactcctggcttccctccaggttctaatgaaagactatcatcgtgtgtcctgctattgttacatcttcaagaattcacttggtttatggttttccgcccataggagggcctttacatttagttttgttgatggtttgctttttccccggtggggctgtgatttttgcacctgtctaacagagaacctggccagagacttgttcctcaaaattgcctcagatttaggggagtttgctgattatcccaaacactgttcctgaaggtccttagtcaagttgatacttgagatccacattactccgagacaactcctgaccattggcccttgccatgggctctgcctaccactgggctgcacagggcccgggttcttaggtctgttcctatctctgtattccctcccataactttgcagttggcacttgctgacccctcctgcttattttcccttcttgtattttcagagccaagttttccattttgactctttcttctctgttacattccaccctaggaagatgagctttccacatagcacctacactctctgcagcgtgcacccatattttcagaaacccagtgagaacatttctcctcttgcaatctcgaggtctctccctgggtactttattcagcagaagcagactaaccctgggctaccttgggttcttaggaagtactggttcaactgagtgccatataccttcttgctaacacctcctttctcttcttgtctttttgcttgtgacctgtggggacgcctgcagtgcgaaggaccttgaagagtggcctgactccagaagaagccagagccctgggcctggttggcacatctgaactgcaactgtgacttttgtaggttctcagaagtgtgctgagcagaggaccagatctggctagacctgcccctttcagtagaggcagggagacttgacctgaacatctgatggttagaactgagtcctcatttctgagtaacacactgcttgtcaccgttgcgcattgacatggatctccagaaatctcctgcatgtactttatcaagtcagctgtgtttctcttgtttccttgatacctggtttattagctccaagtgtgacaccttttctaggaagcaacagtccttgtaaggaacaaatcacttctgtcacagttgttaagataacatggggcaatgtgattagactcagagactgggtctctacaacaaccaaatgtccagatataaatgccaatgctgtacacacatacaagcacagcttgtttaccagttgtggattttagatgtactaaatgtttatacaaactcataaatgtacactgtgtttcaatgactaaataaatagaggttaatgtc

SEQ ID NO: 103 - DNA, 4190 bp, Mus musculus
aaaagctgtacaactccagtggccgagatctaagaagggcccttttctcactgaagcagatatttcaggatgacaaggatttggtgcatgaatttgtcatagctgaaggtctgacctgtttgatcaaagtgggagccgaggcggatcagaactatcagaactacatcctgagggctctgggtcagattatgttgtatgtggatgggatgaatggcgtcatcaaccacagcgagaccatccagtggctttacacgctcgttgggtcgaagttccgcctggtagtgaagacagccctgaagcttcttctggtctttgtggagtattctgagtccaatgcaccacttctcattcaggccgtttctgctgtcgacaccaaaagaggtgtcaaaccctggtccaacatcatggaaatcttggaggaaaaagatggagttgacacagagctattggtttatgcaatgactctagtgaacaagacactggcaggactgccagatcaagacaccttctatgacgtagtagactgcctggaagagctgggcatcgccgctgtgtcccaaaggcacttgaacaagaaagggacagacctggacttgctggagcagtttaatatctatgaggtggcactcaggcatgaagatggtgatgagacagctgagccaccccccagtgggcaccgggaccggaggagggccagcatgtgttctggtggcactgtgggtgagcaacagggccttgaccgcagaaggagccgtagacactcaatccagaatatcaagagcccactgtcagctcccaccagcccctgctccccgtctgttcctgccttcaaacccagccaagttcgagacctctgtgaaaagtcatcgccaagtggccttctcacatcctcgttcaggcagcaccaagagtcactggcagcagagagagagcggaggcggcaagagagagaggaaagactgcagaggatagaacgggaagaaaggaacaaattcaaccgggaatatctagacaaaagggaggagcaaaggcaagcaagaggagaaagatacaaatacttggagcagttggcagccgagacgcaggagaaggagcctagaagccagagcgtgagccggggtagagctgacctctccttggacctgagcttgcctgcagcccctgctccacctcccccttcaagccagagtccctctgctgactcacaagaggctctccctgtgccttcatccccacccactctgcagtgcccccaagtaagtggtaaggaccacgagcctgaactggaggcagaagctgggcaaggtgctgatgaagccagccaggacatagcatctgcccacaggggagcagagagccaagaagagccggtgctggagctagagccagaggaaagagcttcactgagtgaaaaagagaggcaaaacgaagaggtgaatgagagggacaactgttctgcttccagcatctcgtcctccagcagcaccttggagagggaagagaaggaagacaaactgtctgaagacagggcgaccggtttgtggtccaccagccttcaggatgtgggtgtgaatggacagtgtggtgacatccttaccagcaaaaggttcatgctggacatgctgtatgcccataacagaaaatccacagaagatgaggaaaaagatgacggcgagcctgggaggtctgcgcaggaggtggaggcagtggccagcctcgccaccaggatatccactctgcaggccaactctcaggccccagaggagagcatcaagagggtggacattggctgtctagacaaccggggcagtgtgaaggcatttgctgagaaattcaacagtggagaagtagggaggggtgccatctctcctgatgtggagtctcaggacaaggtcccggatacacccccagcacagctgaagactgagtctgattacatctgggaccagctcatggccaatccgagggagctcagaatccaagacatggatttcacagacctaggggaggaggacgatatcgatgttttggatggcttagggtggtcccaggtacccaggggtcagccagcgttcaccaagaaaaagaagacgatccggctgttctggaacgaagtccggccctttgagtggccaagtaagaacaatcgccggtgcagggaattcctgtggtcaaaactggagcccattaaggtggacacttccagactcgagcacctgtttgagtccaagtctaaggagctgtctgtcaccaagaaaacggctgcagatggtaaacggcaggagatcattgttctggattccaagaggagcaatgccatcaacatcggcctgacggtgctgccccctccaaggacaattaagatagccattttgaactttgatgagtatgccttaaacaaagaagggatcgagaaaattctgaccatgattccaactgaagaggagaagcagaaaatccaggaggctcagctggctaacccggaagtgccgttgggcagtgcggagcagttccttctcacactctcttccatcagtgagctctcggctcgactccacctgtgggcattcaaaatggattatgaaaccacagaaaaggaagtggccgaaccacttttggacctgaaggaaggaatagaccagttggagaacaataagactctgggcttcatcctgtctactctccttgccattgggaactttctaaatggaactaatgccaaagcatttgagttaagctacctcgagaaggttccagaagtcaaagatacagtgcacaagcagtctcttctccaccacgtgtgcaccatggtagtggaaaactttccggacagctcggatctgtactcagagattggggccatcactaggtcagccaaggttgactttgatcaacttcaggataatttatgtcagatggagagacgctgcaaagcttcatgggaccacctcaaggcgattgcaaaacacgagatgaagcctgttttgaaacagcggatgtcagagttcctaaaagactgtgcagagcgaattataattttaaagatcgtccatcggaggataattaacagatttcactcatttttactgtttatgggccatcccccttatgcaattcgagaggtgaacatcaacaagttctgcaggatcatcagtgagtttgccctggagtatcgcacgaccagggaaagggttctacagcagaaacagaagcgggccaaccacagagagagaaacaagaccagagggaagatgatcactgactctggcaagttctctggcagttctccagcagcaccgagccagccacagggtctgagctatgctgaggatgcagccgaacatgagaacatgaaggccgtgttgaaaacctcctcccctgcgctggaggacgccaccccagtgcttggtgtccgcactcgcagccgggcaagccgaggatccactagttcatggactatgggaactgaggagtcacctagtgtcactgatgatgcggctgatgagatcatggaccgcattgtcaaatcagccacccaagtgcccagtcagagagtggtgccacgggagagaaagcgttccagggccaaccgcaaatctttgcgaaggaccttgaagagtggcctgactccagaagaagccagagccctgggcctggttggcacatctgaactgcaactgtgacttttgtaggttctcagaagtgtgctgagcagaggaccagatctggctagacctgcccctttcagtagaggcagggagacttgacctgaacatctgatggttagaactgagtcctcatttctgagtaacacactgcttgtcaccgttgcgcattgacatggatctccagaaatctcctgcatgtactttatcaagtcagctgtgtttctcttgtttccttgatacctggtttattagctccaagtgtgacaccttttctaggaagcaacagtccttgtaaggaacaaatcacttctgtcacagttgttaagataacatggggcaatgtgattagactcagagactgggtctctacaacaaccaaatgtccagatataaatgccaatgctgtacacacatacaagcacagcttgtttaccagttgtggattttagatgtactaaatgtttatacaaactcataaatgtacactgtgtttcaatgactaaataaatagaggttaatgtc

SEQ ID NO: 104 - protein, 1156 aa, Mus musculus
MLYVDGMNGVINHSETIQWLYTLVGSKFRLVVKTALKLLLVFVEYSESNAPLLIQAVSAVDTKRGVKPWSNIMEIEKDGVDTELLVYAMTLVNKTLAGLPDQDTFYDVVDCLEELGIAAVSQRHLNKKGTDLDLLEQFNIYEVRHEDGDETAEPPPSGHRDRRRASMCSGGTVGEQQGLDRRRSRRHSIQNIKSPLSAPTSPCSPSVPAFKPSQVRDLCEKSSPSGLLTSSFRQHQESLAAERERRRQEREERLQRIEREERNKFNREYLDKREEQRQRERYKYLEQLAAETQEKEPRSQSVSRGRADLSLDLSLPAAPAPPPPSSQSPSADSQEALPVPSSPPTLQCPQVSGKDHEPELEAEAGQGADEASQDIASAHRGAESQEEPVLELEPEERASLSEKERQNEEVNERDNCSASSISSSSSTLEREEKEDKLSEDRATGLWSTSLQDVGVNGQCGDILTSKRFMLDMLYAHNRKSTEDEEKDDGEPGRSAQEVEAVASLATRISTLQANSQAPEESIKRVDIGCLDNRGSVKAFAEKFNSGEVGRGAISPDVESQDKVPDTPPAQLKTESDYIWDQLMANPRELRIQDMDFTDLGEEDDIDVLDGLGWSQVPRGQPAFTKKKKTIRLFWNEVRPFEWPSKNNRRCREFLWSKLEPIKVDTSRLEHLFESKSKELSVTKKTAADGKRQEIIVLDSKRSNAINIGLTVLPPPRTIKIAILNFDEYALNKEGIEKILTMIPTEEEKQKIQEAQLANPEVPLGSAEQFLLTLSSISELSARLHLWAFKMDYETTEKEVAEPLLDLKEGIDQLENNKTLGFILSTLLAIGNFLNGTNAKAFELSYLEKVPEVKDTVHKQSLLHHVCTMVVENFPDSSDKEIGAITRSAKVDFDQLQDNLCQMERRCKASWDHLKAIAKHEMKPVLKQRMSEFLKDCAERIIILKIVHRRIINRFHSFLLFMGHPPYAIREVNINKFCRIISEFALEYRTTRERVLQQKQKRANHRERNKTRGKMITDSGKFSGSSPAAPSQPQGLSYAEDAAEHENMKAVLKTSSPALEDATPVLGVRTRSRASRGSTSSWTMGTEESPSVTDDAADEIMDRIVKSATQVPSQRVVPRERKRSRANRKSLRRTLKSGLTPEEARALGLVGTSELQL

SEQ ID NO: 105 - DNA, 267620 bp, Homo sapiens
caggatgacaaggatttggtgcatgaatttgtagtggctgaaggtctgacatgtttgatcaaggtgggagctgaggctgatcagaactatcagaactacatcttaaggggtaagtcatgactgggcatgcagcagctgccccagctgcaggggggatctgggttcaccttcaggaacttaactactgagagctttttaaaagacttcgatttgagagtaaggtggtaaagacaccctatggcaaaaaaacatctgcatcaggttttaccagttcctagtaattagcaactgtgctaatttttactgactttcacctggagttattttacacgcttactaggaaaactgtaccactcactgggttctttataatctgtcttatttgtccaggaaggagacatactaaatgggcttgggtaaagcctgcatctcagcagaaagccaccccaaaccaaagggggcaatttatttcttggaaaaaaacattttctcccaatttgagttatcacctggggcttttgtcaaagtgcatatttttcaccttgtcttcctgtttctgattcgatagttttgagcgggtccgggatttgccttttaaagagcgattctgatttcatttataaagcgatgcaaatgtagagtttgaagcactgattcctgttccagtttatagttaatggtgtttttatagtcataggtttttttgtgcaccttcatataaatttcatttgatcctgtaaaaaaaaaaaaaacaaataacaaacctgtgcataggcagggcaggaatgattaggttgaaccgtatgaaattgctgctatcaacagttttgacctacaaaagaagaaattttatatcgtccaatattatctacattttccagttgaagaaaattgagactcaaagaagtcattaaataataaagtcaattcccatagtgtgccaggcagcagctgtgcccaggcactgaggcatgtcaggcgggtcagggttctgccatcccctctgtatctatgcctgtgaccccacagactgcatgttcagcgcttgtaggagaaaataaaactaccaaaaccttcctttcttttcttcttgggtgaaggaagaatgaaaatcatacatgaaaagtatgatttaatatcagatgtctgtgtttggagttgaatgagacaagcaaactgacacagtcatctcagctgttttgttttgccccgagaatgcttccttatgttctgtggcgttttccagccaatcagagccttcatccctctttcccctcttctgtagagccactgcaattaaaagcaacagagagaacgtagggctcattaaaaaaaaattaaggttgtcttttcaagtcagtgttgttttgttcattttgataaacggcaaatgtgtgtgagagttcctgagcctctcactttgctgacccatggtgtgtgcagcagtgtttgtggggctgcggagttggctctttttgtctactttcagtctttttctggtcttgtaatagatcctccattacaagttgtcaggagagatgctttattgctgaattttgctatttctattcttttttttttttgagatggagtcttgctctgtcacccaggctggagtgcagtggcgcgatctcggctcactgcaagctccgcctcccggattcacgccattctcctgcctcagcctcccgagtagctgggactacaggcacccgccaccatgcccagctaatttttttgtatttttagtagagacggggtttcaccttgttagccaggatggtctcgttctcctgacctcatgatccgccggcctcggcctccccaagtggtgggattacaggtgtgagccactgcacccggcctctattcttaataatataaacatttatatcaaagctgttgtgccatgttgcatctaatcgcagccgtctgtgtgtctaaagagatgagtgcaggcctggattctcactcttgtgtgtctgttcactttggtctaacacctagacaggaggaaggtgcagagataagggtgggagagcttcctctagtttattttccgggtataatatggatgcccatatgttgaaccacaggtaatcacctaattctgaatagtgggtccacactgacaatatattttttgttcatgtttaaagtgtacatcattttaacattaccaaaaaataagttatccccaacacacagagacacacctctagagagctaatattataaccatcttctgtttatcctcattcttctgacccttacctaggagcacatttgtgtatttctattgcatcagcgcaatagtttacctccaagcccaggcgaggggcacaactctgcccgctgtggtcagaactcacccattccctagacctcacgtggattagaactggattacatgaccccctgtagctgcacgggaggctggcagagtgagtgccttcctagactccacaggggaggcaacagagagaaaggcttgggcttgaggttatgagtcccagctgcatagagggagttcggaaagaaaactcagcacagctgagaaagccttttctggtgagccacagtgaggcccctcccaccagcggcctgcaggcttttgagggaatccttgtgcatgggcaggttaaacacaggtcctggtggtgaggggtatgaattgtacttgctggcaatgggagatgatgttgatacagggaacttcatccacatcctctaccttagtgaatatttaccatgaagcttacagccgtttattttatttatttatttattttgagacagagtctcgctctgtcacccaggctggagtacagtggtgccatctgggctcactgcaagctccgccacccaggttcacgccattatcctgcctcagcctcccaagtagctgggactacaggcgcctgccaccacacctgcctaatttttttgtatttttagtagagatggggtttcaccatgttagccaggatgatcttgatctcctgacctcgtgatcacccgcctctgcctcccaaagtggtgggattacaggcgtgagccactgcgcccggccacagccatttattttgcagtgttctgacctgaatcagaaaggtgccagaggcaattcccgaatgtttaagtctcagaacactcatgaccaggggagagcccgtcaaccacctgctgcttctgttttctagcttttctgcctgcccttctatgacatgccaagaaggtgaggccctagctgcagataggtcttccaaaatgtgaggagaccctatatttccattgccaccaccaaagccttgccttcatattttcctttctaatagtgtccctttactggcgaccagaaggctccccatgcattatctgaaagacgagcactccactcaggctactgcaagacatccttctttccacagaacagaggtgcctttgcatgcctatgtctcagaagacttggtcaccagggcactgtgcccaattgtcaccacattttgatgtaaccaaccaaagctcataccaggaaagtaacttctgagggatggaaatgacacatttcttgggacgtgacatttgcgttttcctgcagggaagctatgattttccttagttcatacatggagtcactcctttgtgactttgaacaatttctcacgtaggcttttttttaaggttctgataactgctggcagccactggacatttgcgatcaagaacaacctttgaattacctctttatttgtccacccatgttttaactgtgctgtcttcggtggggactggtgagggcagatgcagatcaagagaagaggctgggaaaagttttgcagttattttattcacagttccctgaggagaagacacagcacccatgcagggccactcaggaagcacagaggtcggccatgaggtggggggagaggcagactgtgggcaaacacctgcattgtggcttccaagggacaggcaagccagctgaggattggccccgaagctcagagtggctctggagtggcgagggcctgtgtatagtagcccaaggtgtgagagccccgtgtgggagaaggttggggtgtagacttaatgggctgctggagaagacgaactggctggtcgctagccagggcctcaaaactgggttaagctggacacagtggcacatgcctgtcatctccgctacttggaggctgaggccggaggatcacttgagcctaggaatttgaggttacagtgagctatatttgcaccactgcactccagcctgattaacagagcaagaccctgtttttaaaaaagctgtgtcaagatagcattttaaaaaatgatattgcaaaccgtaagttgggttaattgtcctagtgtcttgagaagtgtgccctcatgaagccacctgaggagctctgctctgtgtggctacatgggagtcctacagccccaggggaaacaaaagcatgtggagaatccaggactttcccagatctgcttttagaactctttatttgtctttatttgcatacacagccccctctcagcattttttttttttaaggcccaggaatccgctgctttcctttgaggatgtgtctgctgagaggtagagataggtttagttacagtgtaggcaagtgctgtccaaagctgtgagcaggctgctgggaagaagtcttaactgtacaacgtggaggaataatatttatctgacttattattcctgggtggttgtagctaatgatctaaagtttttttgggatagccagtatttaatttaagtgtactgtgaaattttgtacctcacaattattcttatagaaggaggacctagagtggtatattgctgggaacttaaactttctgcacacattactgagccttctctatgggccatgcaccatgtcaggccctggggttgtgacgatggaaccaagattcacactgtcttgaagcaggtccctgtggggtcccctgcatggcatgttttatatgctgaattgcatgtgtcttgtatgtttggaaattgcacatatgtactgtgctttggaggagaaaagagagagagagataaatagaaacagtaagaccagctaccctttctggctgtaactcaagagaaactgcctcttcgggctagctttacatggagaaatttaatttggtcatttcatctaaaccaaaataccaattaatcataaaacgcctcagtcggtatcagttattttaaaagctggataagatcttaaaacgcatttaactcaaccttttcattttagaagaaaactgcagatatattttgtttgccctcatatattgttaaatgttttaatggttgtcagcatttaaaaattgggagatttgatatttttttaaaaatgcagatttcaggcttctttggaaaaactgtcccagagttgactatagtccactataggaaaaaatcctcaaatgccattcatattaggggatcccttaatgagaatcaggatgtatggtcagatggtgtttgttggcattgatggtaccagaaatggaaatatcatagatatcatggaaagagattttatgatgttagaaggcagtggcacaaaatgatcaagtggtaattaaactaacatcctccttgtcagaaaaactgaagtttatattttggcactttataaaatgccaaaaagagcagaggttgggttcagactacagggaaggcaccaaactagccccaaggtgaggaaatgggagcaaaggggaagaatttcttgcttcctgaactaaggttaggtctttggctactgtattttccacggaacaacctagcctgactctctgcaacctcatgacactggtcctgtgtcccatgcagctggcttggaggaagctctttcctgcctcttgccagaagggttttctgctttgggtctggacttcagagattatcatggtagctgtacagctaggctttgatgtggatgacccaggagtcttggaggtgtcttcagctccaggtgggttgaggccagtgttaagaatggagtccttcctcatttgatgtctctcctcttgctgagtggtacaacaggactatttccaataaaaaatcactgcagcgtaagcagactggcagcctgtggggctgaatggaacctgcaggtgttttgtgtgccctatctaacaggtttaaagattgtgaattatgaacatttaaaaacttggagatttggcataaaaatacagctttctggcttttcttgaagtactgaaaacttaagccgacccaggccctgtgggatgtggactggggagggctggagaaagtggcccttgaagcagaaagatgcaatcaccacgtggtgtttgctttttcttcctcctgtagttgaaacctctgctttaggtgtcttggggccctggctgggtctgacctccatctggcctctctttcacgtctccttggcatgctgttagggatgtggcctccagggtgaaccagccacactgcccaggagtatggtcaggggcagggaagctgcagcctgtaactccctgggaggggaagggaggccaaatcaccctgttgctgttgatatgtcatgacacatgcttccctggagtgttctgcatgtcccgtctgtggctcctcttgccacccactgtcactgtgcatcaggcctgcaccctcttaagaaactgggccagagagtagctgagacctgcacttgtgtcctcctctttccagcctgtacgggtgcagaggaccccaaatggacttaaattggacagttcatagctctcccctggcctgccaggccacaggatactgtgtccttgtcttgcttttctgcctgactttctgcagtgctgcatttctcacaggagggagctgggtgctggccccactgttcctcctgggttagctgccgtctctctggtgtttctggatggatctgccaaggtcagtggggtgtggttggcctacccctagtctcagggctcggggactctcttgtccatgtctcattggtcatttgggtagatttggaggagggtggtttggaggctcctcgctgtgcttcttctgcaagtgctgaatgatctgagtcatcattgctgtggtctgtggcctgatggctgtcagcccccagcactgtgtgcaggagcaccatgggtcaagtgggcaaggagctcctgccaggggaagcaaggcaaggccagggccagatcctgacctttggtgggacaaagtgtcctttgtacaccctctgttctgaggtaagagagggaagctgggctactccatgggtggggcaagcagcatccacgaccctgagccctttacctcattgggcagcaagtgcgatatttgccatcagcttctaactctacctaagcactttggctctaaggttgattttggttttccctcttactctcttccaaggtattttttcctgtgattagtgaatgcttgtctctgggtaactttagtttatgaagagtaaggcttttctttcattttttttttttttttttaaagagatgtagttttagtctatcaccctggctggaatgcactgttgcaatcatagctcactgcagcctcagactcctgggtcatgtgatactcctgcctcagcctctctagtagctggaaccataggcatgtaccaccatggctggctaatattttttattttttgtaaagacgaggtcttactatgtttcccaggctggtctcaaactcctggtctcaagaggttctcctgccttggcttcccaaagtgctaggcttacaagcatgagccaccacgcccagcctctttcaagttgtaatttttcttaagtataagttaattatgaatattgttgaatatagcaagcattcagttgtaacagaaatacttcatgtagagcatctttctaaagaaagactaggtagccctggcaaacattatctccagctggagcatcattaggctgaaccatgtgaggttgctggtatttgaccactttttacctacagaaagggcaaaattgtatggtttaacttaatattagtgtcctaatttcatcttaatctgactccttcttaggttgattagatgcttcttaaagttcatcctgcattcaatctggaatcacatttttccagaaattcaggccactttgcaaaccaaaaaaagccctggcaatgtcctgcaatcatgcctccgagtgcttcagcttaaagagccattgttgtctcagtcttggccagagagatttctccagaattttagtttctactggaagtctctttctccttccttttatctgagatgagaaggaagaaagaaaaagttatttggccattcctacacagagagtgtggaattttccacgaccaaatctcacttctgtgttcatcaggaatttttccactttattcataccaaagatgtgcctcctcactctgtccttctctccttgctcagtagacttttccagaggagctgctggctaggtgtgccttgaagcacaatcgttatttccttggctctaattttatctcacacatggtcttcttttacaaggtttctatttgtgaatccagctttatgatagaagaaaatgtcaacagcaagatttaaacctagccccaagcatggattaaaactttttttgtgggtggggtggtggagctaagactttctgaggaaatatcagttggtgtgttcatagatttctgcattttggaggcttgagggctcttggtagattgggccagcctcttggcagggtaccacgccttttctaaccctgtgatttcccctgccattaatgtgcccaagacctccagccctggctactctccaatgcctcaggcctgtggagccagctgtgccctggtatctccatctccattgcaccagtatctccatctccattgcaccatgcccaaacccaaaacccatgtttttataccccagtcagttcctccacagctctgttcatcatcccaacaaagcgtaatcattcatcacattcaattcagccaccctagggtcctcctaacccctttctctcattcattctttgtaatcatcacccaccaaattagggcttctctaaaccttgactccctttcaagtccttccatctctgtctatacccagtttttgagttcagatcatcatttgttccttcctaacctgctctaccagctgcctcatgggtctctctgcttttagtcctgcctccctttggcccattttgccctctgttgcatggattgaccatgcaccatgatctgttctccttagtccttggttcagcttctttagtggctcctctcatcctcagggtgaaatcccaggccttctgtgtgggtagagcccactttggtcctgccctcgtgtgtcggtgcagtccactgcagccactccctgccatcccagggagggtgatgttctgtcctgcagaccttggcatctgcctacaaggcctcgctcacccatcttcatctggttcacacattatcttttgcttcctgctcatccttagattggagctcagatattgtaatctccaggagatcttccctggttcccgagtattttggccctctatgcataccctggtcttgactcactgataataaatatttgtgaacatacactatggaccaggaacccaaggctaattccctgcaccatattagccttcgtgcatgtcaggttccatccttgttctgtgagatccttgagagccaggcatgttttaagagctcagtgaaaatgagctgacagaaggaatagaagaatgatagactatctgcagagaaagagaagtcactacttgtgagaaagctgctgatttgtactagtaattggagagccggaatttgcttatttgaagctttagtccacctgctcttgtttctgaagcagtatagcacaaggtgatttggttttggtacttttcaaaaaatgccgatgtactaaactttctttttgataattttactagttcagtaggtggatatatatctactagggtgtatatcttgattttaaataagacatgatttatacagataaaatacatgcaaatatggattatactgtacagcctgttttgtatgtggaggaattatttacctgcctctgaaatagatggactgtggatttcttggagatgggagtagtatcatcacaacctttgcagctgcaccagcctgctcctgagtgcctcataaatattcaacaaatagttgaggaagacaattgaatgaatgcctgggagaggagtccccagagccatgccatggctgtgttgatcttgttgagtgttttatgggtgattccgggtaagcacaaagtttataccaagaaatgtgtgtgcatgatcaggagatgtgaaatgagaagacagcaattatatgacacatgttcaagtgtgatgtggagggcttttacttgatttgattttcagtatcctcactatttcaacctcattatcttgtcgtctttgctttctttaccctgcctcttctatccctagctgcttaaaactggacctttccaaaaccactcacatgggagtttggcctgacttgtttctggagccagttcccacaggcagctagtactccctagccccccaaccacactggagtcgtgtctgccatcagtgctgtctgggccccagcgttccttgaaacactgctggggctgatgttcctagaattacagccctcttttctccttccaggtaacgttggccttgagctgggcttgagtctgcaaggcttaagtgagggaagaggttaaatgtcattggataaataaggggttgcttttagaggaggggcaaaattgttgcccttaaagtcagattaaaagcaacgagcaggagttaaaagacagtggtttttgactgaagacaaactccaagaacagagttggaaaattagtttatttctcttgccaacataaattgatcagtggtgcctttctggagcagtctgctgaggattctgaggccacatccagcatcagcaggaaagagcgccacagctgattagggaagtctgtcagtagcttcagagctgaagagttagggcaggaatactagacatgatttggttcttctggaaaatactaggcactttcagcatgtttcttgagttgatttcaaacaggtgtgtggcagtaaggtttccaacaacagaatatatcactttgcactggaaatgctgtagcagaggccagatgatctgttggggctgctaggcttggggtcaggtggtactggatgacctcttagatcccttccagctctaagattctgtgattctaagtaaaatataaaaagcagaagggatgaaagcagagctgtttaactttccctcttctgcatgctccatattaattgctgtaggattcccaggctgttaccaagcacatgttgtcttctttcagcttcaaagaaggctatctggttacatgacatagaccccagccaagtcattgaaaacaatggtgaactatctttagtcattaagaggcttgtattcggctggacatggtggcttacacctgtaatcccagcactttgggaggccgatggctggcagatcacttgaggtcaggagtttgagaccagcctggccaacatggtgaaaccccatttctactaaaaatacaaaaattagcagggtgaggtagtgcatgcctataatcccagtttctcaggaggctgaggcaggagaatcgcttgaattcaggaagcggaggttgcagtgaaccgagactgtgccactgcactctagcctgggtgacagagtgaggctctacctcaaaaaaaaaaaaaaaaagaaaagaaaagttgatgcgggtgactagcattcatgtgatctacggaattttgaaggattggcagggctagtgttagtttatattcaggaattcatatgtacatggtgaggccaggggcgtaggagacaatggtgagcttactgcttctccagagcctgaggactggaagccaggagggctcacagaaacaccagggagttggactcattgatcaaaccaaagcagggctggcaaggcagactggtacccgtgaggagagtgcgcacaggcagcccacccttgctttgctgattcactggcttccctcatatctacccacattcccaacatggtccacacagtttccatccatgtgtgcatcctgctggtccacgcctgtctttctatctgtcttttcccagctcttccagatcttaatctggaggattgaataaacatcgatctttccccaaatctagatttcgttgctttttgtcagtttgtaggccctgatttttctatggttgggggcttctaaataaagatcagctgactggttcattcagtcatcaccaagtgctacctcattgctttatgtgagtcagtcactttggggtctgagtaaagggtagcagagaacaatgcaaacgaaacaattagaaattgtgccatcaagccaagaataaagtgctaacaggagggaatttataatatagtaggggaagtgacataaatcctgtgataggcagaattctaaggtggcccagaagattctttcccccagtttagaccctgtataatcccctccccttgagtttaggccagacctgtgagtataacggatgtgtaaatattatggaaccatgattaggttacattgcaaaggtgaaagggttttgcagatgtaattaaggtcccaaatctttggattttggaatcagtcagaggggagattattctaggtaggatgggcctaaatagatgaatccctgaaaagaaagtctagaagtcaaagacttctgctgaccttgaagaagcaagttgccatgagttctacagctgcaaggaaatgaattctgccaacaaccacatgagcttggaagaggaccccaagcctcagatcagaccacaactgacaccttgattgcagcctggtgagacacccccagcagaagacccagtcgggccatgcctggatttctgcaccatggaaactgtgagatgataaatgtatgttgttttaagctgccaagcaatttgttatacagagttagaaaatgaatatagttacatacaaagaatcacaacacgaagccatctggacttgctaaatttggtacagaatactctgacctcagaggtcttttgtaggggaatcagggaagatatcatgagggcagcaaccttttactgtctttctgggcttcttaggcaactacatgccatccattcaagctgaattccccttgatcccctgcctcttcttgcatgatcttctcacacggtctgtgcagacctctcatgtgggtctcccaactgttgacaatgtccaggaccactgcaataaaggactctcttccacacacaaaagagtgactaatggagaaggcaatttataagaaaatttggtgtttcctaatatgccagcatcatgagagaacatggtagctttatcaagattgggctgagttttaggaaaagatgatcacttgggtgatcttgggatgatctcacctatgaagacaagcatgggcactgggccacccttgctcttcttcagagatgctcttatctcagtgttctttgcatctcctgtttactcattgattaatccaggagatgatttgcagatgactgcagtgggagatccaagggctcggccaaggcccctcgtcgtaaggaacttggcagtggcttagcataggagccatctaagtaaaagtggatagacacaaaaacactgtatttgttaggcatggaatgaaaatcctgaaatcattctttttttcccccctcaattttgtttgcatcagcattatgtttctaaagatggttgataaattttaagtagttcaatcctgtatcatttatttcaaagatagttattctttgcttagtcactcaagatgtttgctttttcataattcagcttttttttttcttttgagactgaatcttgctctgttgccccaactggagtgcagtggcacaatctttgctcactgcaacctccgcctcctgcgttccagcgattctcctgcctcagcctcaccaccatgtctggctaatttttatatttattttattagaaatggagtttcaccatgttggccaggctggtctcaaactcctgacctcaggtaatccacctgcctcagcctcccgaagtgctgagattacagatgtgagccaccatgcctggcccataattcagctttctaaaaaatagaatcagcttaatatatagtgtttcatgggaatttcataaaacatgaaatgtgatacttgaatcaaatactcattcttgtgtaagcaaacagcagcacaaaagtatctaggcattatcaggcttgaaaataaaggagatatgtaacgtggtgactttgtttctgaaatcatgtggattacagattccctctatatcagtcgaagtcctcacgtgaaaggtgcttggaaccaagaatagctgaaccttttgtaaattacagttgagatgttaaccttctagatgtatgaagaagaacagtcagttttcccaccttcttggacaagcagatattccctggaagctgcatctggaggctgtggaccggggaacactggccggctggctgttcttctgattcctggtggaggggccctgggaggctcatccatcaggagcccctctgactaccttctctggagctgtgcctggtcaactcgtgggcaatgctgttgtagtactgctctttaaagccgagggagagaagcacatcatcatctgaatcatctggtctaaatttgattttctgactaatcatgcaatgagaagaagcataatttctcttaagaagggatttaattaaaaagcaccctaagtgctttgtgagtgctctccaatctgccgtatcatgagagatagtagcagtgcatcctgtcatctagctgaatgggctcctcgaataacaaaactgattcttctctcttcactttttgtctttgcggttgtatgaccgggcagcaagacactgcagggagaaacggttttgtatcgtttcttctccatgtgggtgacagcaggtgtggtgggcacatagggccactgttatctgacagcttctgggtctgagaccctggggtgcaatggcttctcctgaaagttgccatgctgagcacctttgagctgcagcatgtaggctggccatggggaggttcgtgaacctggcacatggcaatggaattgacaagatataccaccagtgtggtagaataccctctattctggatctatatttgggtggatttatatttgagtgacatggaatatctatatttgagtgacatggaattgtctgaatttgccatgcacttgatctctgtgtatgttgagccctccaccatctcagctcactgcaggactttaccctttgtcctaccctttccatgactcatctcctgggcagtccttcgtaaataccctctctgcatgtgaccttccctcacagagtatccataaccatttgccccttgcccttccccctgactaggtggtgttctccctgaggaccacacacttacttgcacctggatcctctgtttcctgcacaagcaggcacctcttacagtgcctggtgcatggcaggcccttcaataaaggaatcagctggggatggttgtcctgaaggtgtagggggagaacaaacctgtagcactaggataagacagagaagtcttagaatcaaaagctagaaggaaagccccacaagataagatcttgagcatagccagaggctgtctgtgcatgtgtggatgattagatggaactttgacattcttagcttgtcccatcaaggctgccatactgtaaaacgggacctgaaatagttggcctggctctgggcatttggaatagtttgctgggagcagtgctgatcagagagccctgtgtttctcagaaataaagcctgtctttctatggctcaccttctttttcctatgtaaagggcaccatgctgagagatccgaagggcaatttcatgatgtccttgtccctcgcttcaaggtgacaacctggatacatctgagctggtgtcctgtgtctccttatggctttcccttttggcatcagataatgtagtaagttcacccctgtggccctctggatactgggcaatttcatctgcttaaggtttacacaacgccagcgccacacgcacagcaaaatgccactggctttgttaattaatcttcttatggcattaaaagaagaacatggttgttagatcatgccttgaagattttgagtgctgaacgacgttcgttgtacagctctgcccttttagaaaacgggaccactgcacaccacctcacctgttctcacacgggcttctgtgctgatagtccgtgccacatcactgtccatctcatttctcgcacactcactgccctgggggtgggttggcattagctggacagaatgtcacacaacacaggtagctgctcatgctcttgggagaggattctgaccccaagcagatatcactatcatttgctacaaagagggtttctggagggcagatggcagcattttcccttggagttgtataaatagatgtagctgttggtgatgcatgtactggttgtggatattgcctctgcagatgtagctaaacgccatcttgtttaacttgaatatgcttttgatggggcattcttgtggtggttcaggaaatatggcagcgttcagggacagatgggtgtaattgcaaattccttatcagactgatagggtttgatggtgattttgtctgatgctcttcgtttagctgctgctcgtgttatacagcaaggcagtggccaagtctctttccagtttctaggttaagatttgggaacagtctccttgagtaacttcatatttccacagaagagaggcttcattgaataagtgcatcttgctgtctgattttttctttaatatgaaaacctaaatgggcatagggttctagggatttttttttatatatatgttttacagatgtaaaaaggttaaggtgggctgggcacggtggctcacgcctgtaatcctagcactttgggaggctgaggcgggtggatcacttgaggtcaggagtttgagaccagcctggccaacatggtgaaaccctgtctctactaaaaatggtggtgagcgcctgtaatcccagctactcgggaggctgaggcaagagaatcgcttgaacccaggaggcagaggttgcagtgagctgagatcgcgccactgcactccagcctgggtgaaagagtgagactctgtctcaaaaaataaaaataaaaattaaaaaggttaaggtggtctgaaccttgaaaaggccacttaatttggagtagaatcccatcgttcagcatcgaaagtcagatctctgacaaggttccctgccgggcttggtagcgacaggctctgtgagggttccaggaacactgctcaatgttgaaaaccttgcttgagagggaccagccttccaaggtagggggtttggtcatggggggtgggaacacatgaatcaggcttatgaacatgggatacatttacattcgaggtggaagactatgtatactctcatctgttaatgacttcccttatcagtcgtgtttgtaatgaaaatcattttgaaacatatcagacttagaaaacggtataaagagtaataaagtgaatccttgtgcacccaccactcagcttaaaataagaagcatgaccagtacgtgatttggcctttcctgaccactgcttaaacaattaatagcaccttctccccacctggcttctccttgcctgatgcttctctgtagggctcaacatagtctgtcaggctatgtgtgttacttaatggtggtttcttttctctctacccccactagggcaggggcatcatctattaaattgagtgtccctgctgcctagaacaacaccttggcacagaggacttgtgtttgtgagtgattgttgagagaatgagtgagtgtaatgatgtgagatccatccatgctggtatcatggctctcgcctgtccattttcactgctgggtagtattccgttgtatggatgtactgcaattatttattagttctctggttggtccacatttaggtaatatccaggttttttgagttgcagacaatgccagcatgcacattcttgttgtatttccttgtgcatccatgtgaatttctctaggatttacctaggggtagaattgctggtcaaggggttattcataatgttctcataacatactgtgtattttccagcccgggtcagaactgctacttctgaacacaggagtcttgcattcatcctgggttgcttcttagtagctggggcttttgttcttagtcttgttctccctgaggcccctgcggtgagtgactgtgtgactgagatgactggagactttgggctgggaaaagacttttccttggcctatttccactggtccccaagggtcttgcctctgtgaccatggttgaattagttcagtgtccaatggctggcctggctggacacaggatgttagagccagaaggtgccttagaggcctcctactctaacctcattttgcacatagggaaattgaggtctagagggctctggtgacttgctggtggttttgtggctggacagtgatcgagctgtagatgtaacccagccagagtgctttctgcatcatgaacagaaggaagacccatctgtgaaggatgcaagcagtcactgtctccatctgtgcatcactgggcctgccacatgaccatggcccagtgcctgcaacccacccctgctccctcccgagggatgctcttctttcccctttgataaccttggctttgcagtttgtccctttgctttttctttcaactgtgccccttatttcagccctcacagtcacagccattcctgtccaaaacactctagtggttgagacccttccccgatcctgagctgcccctccatgttctgcctgctggccccatcttgcctcccttcctaaatcacagaaaagctcaactgggctcatctggagggacagaatgcctctgggatgcatttgcagtacctaagattacatggactcactgatttcaaaggagtctgtttgatacgaacaaacattgctttaatgccatatggatacagcagaagtcacaggaacagcttatagactgaataagtctgaaaaactgtctccaaagtggaactctctgggactggctcttcctccagctcctgtcccacgtcttccgctgtctacagcctgcggtcctctcggaggcaggatgcttgacaccagagcagtttgcccacaggcaggctggctcctgcctgggctattcctgtgcgtgtcacagtctccccaactctctcctgccctgcccagcccagcacctctgcattccctttatccttttgccaagtcttgtactttcttttgaaatatctttcatttccatttctttccctctgctctcctgcctgccctcagcctcactgctggcctgcttctgttctctgcacagctgcctctggagaaaatctccctgcggcgtggctttcatgcagccattggaggaaaaccctaagttcctcccaggcctcaagttgtacctcttaatgtttattctccataaccgtaatttggaacatcagcaaggctctgtgatttctagacttggagtacaccaagaaagtatggagtatctctttctcagtgagtgttcggggaacacagggcagtgattgccacaatccagtctttagtcttggtctgtgtgtttaggaaactccaggacccatacgctcctcttccctggccacttccctcaagtctcaccctccctggaagagagaaggaagaaaagggacatccatagtggcttctgtggcacctgggggacaggggaccagtggaggtgtctttgggctgtcatgcccataggaagagctgctgtggctactggtacttgtgctcagcctggcagagggagcttctggtttccttccccatcagaaatatttctgagtctcctgtctactctactcttggcaggagaatggaaaccgaagctcttccaagaaccctcatgagtcatctcagatccttcccaaccctctttgtgtgaagaatcagtagttaccacgtgttgttccacaaatcctgggttccctcggagacccaccgggtcccacccacacctggaagcagagaaatcaccctctaacctcaaccgcagaacatccagttttacctgtttgagattttgagattgcatggagagttcttttggaaaaggttccattaaaacgtttaaaggcaagaaaccattgttagaggagatgaaatagtgtctcgttgtgtcattcaaggcccttcctaacgtggtctctaccatgtccatgtttgattgacttgctgtccccagcgtgatgccccattgggtggcctgcctgcctgggcttcccacagtgggaggggcttcgtaaggatccaggtgaagctgagccacttggccctctgcacgatattatgcttcctcgaggccacagacatggtgggtctactggagcttcaacatatgaaggaccttagaacttgaactgggctgtttatagaagataggcagccagatgttagtgcttggaactcaaaattctcagaggcacagtttcctcatctgcaaaccaggcatgatgaaagtatcctcctgatagtttggtgtagtgttaaatagatgagcatgtgcgacgcatttggatgcatcgcggcttgtagtgagggctgtggcagtgtctgccctactactaacacagctagaagggacagggctgggacagagaaggttgtgctggccaggtcctagaggccttcctctgctatgtcctgagcgtgtgctcttcaaggggcatgctgctgaagcagcccttctccaaaagtgcttgtcctcaaagtggatggtgagttgtggtgctgtaggtggcatggaatggactcagaggggccggctgctgttatatgcccagctgctcttgaaaaggtctgagggcctttttaatggtctcccgatgagcttcgtaaggatcaatgactttgataactgggcaggtgggtggaactgcggaatctggaggccttctgggaagacaacttatgtcttagttattggggaaaccatggcacagcctgccctgacctccaagacctgctgacacatcaggaggtaagaaaacctgatgaaagaggctccccgaggtatgtttgtaattgtttgaggacaggagtagggaaggagaaaatggaatagtggaatatgatgtctaaaatgcctttgtgtttttgagaaatatcttccccattagagttaagaatcagagtgtgccaggattgcagggcagtgtgaaggccatctggactaacttcccatccatggctccttctctcccacacaagtggacctcctgcctccaatgataagaagctcaccgcccttagagtggtgatgacccatcctgtttgtggacacttctgacccacaaaagtccttccttcccagagtccacatcatcctaacttcctcttcttggccctgaatgtgggacgtgcagccaactctaattcctattgcagtgaaagcccttcaggtgcctgaaaaaactgatcacagccctgctgctgcttctcctatgtggtttaggggagcataaaaccacagctaagtcaggggtgtggtttccttgcctgcctctgggtaatgctgtgctgttgtttctaaagagtgagaaaagaagacagtgtctcatggccagctgtggttgggacagggtgagtctgagaggatgggctgatgaggagcaagggctgttcctgcagctggtcctgagaggaactggtccccaacaaggctgactggcagaggtgggactattttcttttattttatttatttattttttattattttattattttattttattttattttattgtttgagatagggtcgcactctgtcgcccaggctggagtgcagtgttgcgatctcagctcactgcaacttccacctcccgggctcaagcaatcctcccagaaggtgggattttataagggtagctcgttaagcccagcatctgcctatgtaattgccttcagttattattgttgatcagtacattcaaaagatgtagaggactgaatctgttctgcttagcttgcctttcccctgttttacaaagcgctgctgaaccaggtggctctggaggcacactccagcaaaagagaagcttgttttcctggtgctaacttgcaaactccaggtctggcttttactcggctctataaatttgctgtgcttagaaggccattcaaaacactcaggaacatctgcctaagtttaccccaccatgggggcagaggccctactgggccagtctgggccactttgatgtctttataatgtttttcttcttcttctgtttcttgttttactaacttgtcccgtttgttccttcaaactccatgccaccccatcccaggaaatacacattttcagatttaaaaatattgctgttatcaacaaaaaaagtagcactaccaaaacagtgctccctgaagcattgggctgtgagcttatatgcaaggctccatggcttggtcagttgcttaggtgaaatatatagttttcactctctaagagtgaaaatagcatgctctagactgacagtgtcatcccagattggaagatccagaatgagtccttagactgaggttcttcaccctgtctgcccctggagctgcaagcccatgctggtatcccaagggctgggcaaagcttccatccctttccctggttcctagcgcttcccctaacagtcacttcctagtttcttatgcgagaagtaaagggtgaagctcaggtctgaagactggaaggtcatcagtagtaaaaagctgggccactgagggaagcattcagcaggaatcctttaatcaggtccagtgttaattgatttgcctgaagccagaagcactttggagaggaagacccatccaacagcagaaaatctgacttggagtatactttaaaataaatgtgttatagttaccatgtaggcacattgagtgctggcttagttgtgctttaatgaacaataattaaattacttaaaatattaaaattaatattttatgtgattgttgtaacagtatttaatactactaaatatttgtatttaataattcaataaatttttttgccagtttatttatattattaacttatgttggaggttagcaaacttttcctgtagagagccaaaaggtgaatattttaggcattttggtccaagaggcaaaactgagattattgagtaggtacttctatgataagagagaaagaaaatttgcagattttttaattgactaaattcaaactacaatagtaataattgagtacaatgtttttataactcagatttaccaatgatatgaatgaaattttggtgggagaaaataacatttcacttaattggggtccaaagttagtgttttctgtcatcaaattgattataaatgtttatctgtaaaaacccattcttagctctctggctgtgcaaaaacaagttatgaatcagatttggcttatgggctgtggtttaccaacccttgattatgttatacaaattatacaaatgatttgtttagaaaattcatccctcctccccatggatggggccaaggtaactgtctggtcttatacaaatacaatttcatctcaatttcacagtctcttagtatttagaactttgtgacactttgattttaaaccattgctctgtgtatttgagtaattttataaataagtcttggtgacttcctgtcattaacaaaaatggatttaagaagtcagcgcccgctgtgcccatttaggaatcctgtagttggctgtagacaggggtcacatcgctgtactctttctgctctgcacacagctcccctctgcaggttttctgcatctgagctctgtgctggctctgcacatgtgcacatgcccttccttgctgctgcagccacctgccagagaagctaccctgagcacagaggctccccaccgaggcagagtgggcctgaacagcatctggttaggatcaaaggagggaggagagtagggaagggcttgttcccacactcctgtctgctttttttgctgcatggaggcttcccatggggtggcaggcagtggctgcatcacacccagccagtcgggacacactaattctgctagcattccttgccccaatacaaatgcccaaagaatattccttttttccccttacttcagctgaaatactataatttttcaaaaggaaacttctctagaaatgacaagaaggaaagaaaaacaaaggtagagaaaaataaacttatagaatcagtagagcttgatgcagatgtcctaacctgactgaaatctgatgtgatcttggtttcccttaagtccaagttctctcattttccttttgttttaaagccaaagctttcacttgctttgcttgtctgttgcatcaggcttagtgtggatagcttcaggtgtagcttccaggtagtcagtatggcctgtctccactccaaacaggacaccaactccctgactccctgataattgtatttttacgccagggtgagaagcctatgaagtctttgcagacatcctgtcactctgttgctgttcgccacatactccagttttccagctttcttagcattcctatttgtcaccatcatgtcagactgttattctgggattttctactaccatttttggtcactccttaatggttctccatgctgttctcagatggggagctgggactttcattcctgtctggtggtaagggcaccccccttgcccaggagccagtggacaccacatggggaacctggacttctacttccacctggtggtaatggttaccctttcttctccttgctgggtgggtgtcagagaaagccaagtaggcactgagggccttcacatctgcttgtttgaaataaggcaaagaaaattaccagaaacagagaaggacattacataatgatgaaaagttctggccacttaaaaagtaaagcaatcctaatatgcaccaaacaacagagctgcaaaatacatgaagcaaaaactgatagaactgcagagagaaataacaaatccatggttatagcataagactttaacactctaaacagttggtagaataattagaaagaaaatcagtaaggatatagtgtaagtcagtaacaccattaaccaggatctaatcaccatctacagaacacttccctcagtagcagagtcacacattcttttaaagggcccatggaatatataccaagatagaccatatactgggctgtaaaaataaacctcaacaaatttaaaataactaaactcatgcagaatgtgttcttcaaccacaagagaaacaaactataaatcaataccagaaagataagaggaaagtctccaatcatttggaaacaaacaaacaaaacacccttctaaataatccatgggtcaaacaggaagtctccagaggggaaaaaatatagaattgagtgaaaatacaacatatcaaaacttatgggatgcagcaaaagcagtgctgaggtgacattttatagaactaaatgtctatattagaaaataagtctcaaatgaagaagctcccaccacaagaaacttgaaaaaggagagcaaaacaaacctaaaataaacagaaaaagggaataatcaagataagaacagaaatcactgacattgaaaacaatgatgatagagaaaatcaaatgaagttgattgtttgaaaagattaataaaatggatagacctgtagcaagaatcacaaagaaagaaagacacaaatcattaatgtcagggaatattttgggatagggtatattcctacagattctgcagtatcaaatggttaatgcaaggactctatacatataactttgactactttaatggaatgtaccaattgtccctcagtaggttaatggttagactgcagtacatccatactatggaatacaactcagcaatgaaaaggaatgaaattattggcacatacaacttggatggatctccaaggcattatgctatttataggacattcttggagcaacagtattatagaggtgaaaaataggagttgacaggggttagtgatggcagtggtgggaggtaggaatgtgtgtgattatgaaggaatagcatgagagggttctttgtggcgatggaatagttttttcatcttgactggggtggtagttacatgaatctgcatgtgataaaatgatatggagctatccatgcacattttaccaaagtgaaatgcttggtcttgatatagtactgtagctaagtaagatataatcactgagggaaactggtgaagagtacctgggatctcaccatactacctttgtaatttcctgtatatttatatttcaacataaaaagtaaaaaatcagtacgcatcttatgttgctcagcttctataagaccactatccatactcaacccaagaaaacaccacacaattagcataggctggattattacatttgttatgttcaacgaagtgatatcatagtctttgtgttttttatgatgatcagacccacttttgaattcattctgtattcagtactacatactatattctatagactgagttggctgaaatccaggacataataagtaggtaggggaacttgggcaagatttgctaggcagggcatgctgtgactttaactatttgaataattcacgtgtatagaagacatggagttattctgggtgaaggtgcagatgccaaaaccaaggccattgcgtagaaagtgtctagagtgagatgggggcccagtcactgtccagagaggaaagcaggccacagttcttccattgctcagacgtgcctggagtggtgagcagagactgagtgaacacctgctgtggaggtgggcactgcagtggcaaaaatggggactcagtggcacctttcaatggcagacccaggctcttggccaagttgtgatgaaagaaattcagcagcaggtgggcgaatcagaggtgacaaaaccctgtttggggctgtttatcaccattttgagaaaattaaaaccaaagcaatgttttctgagactatttttgaacccattatgagtatgatttctagagtaggaagtacaggattggaggatgatgtgctcattaaagtccccaagaatggacagcagtgatgattcagaacaggcaagtcctggaagaggcctggttccgatgtggcaataggggagtagcttgaggaaacacactgcacatcccttgaagccttggactcaacaaagagaggccctgaagaattaagtgggctctctgctgcctctggcttcatgtcgcctgtatttaaatcatgatccctttcatcatgttgttccaacaagcatactttccagagatcaaagcagattcctcgatgacacacataagaaatgcaggcgtggggtggaggtgacatgagatattagacaggtttgtagggcctttaagaggggaaaattctgcatctcaagaatgcccaattcagccaggttccaattatggtggtaatgtcacgtgtcaaagcagtgatgtctaattatttaccttatttatatttgtcagcacacagagcagccaaatgtaattccttcaacatttctttttggaatgactctcagaactgtggtgactggaagttagtagagtaaatgcctccatgaacaaagacgttgtgtttccgtgtcagacatccttgtgtctagaaggtgggcttgcttaagctggagctagggctttcgtagacagtttggaggtgcagttggggaaaagaatgctcatggtgccaaatgccacttagcactcctaggggacttttgtttaaattaatgcatttgcagtgatatatgtgacagtgctgctatatccaggtctgcttcttcctgaccaggttctacttaactcaatggcacccagtgatttaagtgggaattgggagagggtgagatagaagagtatagggggagaagggagagttgtacaaagtgtgaaaaggaagggtgattgactggaaagtgtgattcaaggaagaaggtggaagtcccttataccaattcctgggcctgtagttaatccatctggcatctctgcttccagggcctacgttgtggggcagggcacacctaatcccattcatacttacattagtcttgacttcccctaatcctcttctccatattggtgtacccgcaacaacagtaaatgtgtttggttctgttttgtttcttttcctgttagcatagcctcaaaaggagattattaaaagaaatgttgggctgggcgtggtggctcatgcctgtaatcccagcactttgggaggccgaggcaggcgtatcacctgagatcaggagttagagaccagcctggccaacatggctaaatcccatctctactaaatatacaaaaattagccaggcctggtggcatgtgcctgtaatcccagctactctggaggctgaggaaggagaatcacttgaacctgggaggtggaggttgcagtgagccaagatcgcaccactgcactccagcctagcgacagagcgagactctgtctcaaaaaaaaaaaaaaaaaaaaaaagaaagaaaaaagaaaaaaagtgttggcagggcatggtgcctcatgcctgtaatcccagcactttcagaggccaagatgggaggatttcttggggctaagagtttgagacaagcttgggtaacaaaatgagaccctgtctatacaaaaaataaaacaaaatgtggtcccagcttactcaggaggctgaggcaccaggatcccttgagcacaatcctgtcactgctccagcctgggcaactgagcaagaccttatctctacaaaaaatgaaaaagaaatgatgctatacatttatttttttgctttcaattttagcaatcaaaaatctagaacaagatataaatgtatgtgtttactccttccaaataaagtggaaagtgagtagtcagtaaaatgcagaatgagcccaggacgttaggataacagggaggttgtcatgcagttgaggttctgggtccatgatttcctataaccttttaaaagttcaaccttttaaaaattggcatttaacatgcttctctatggggcagaattggaatgaacctcagaatggaactgaactaaatctccagcttatcccccttgagaattctgagaaggtaatgccctttcttctaagtactcagatcttcagataacaatgctttatgcttttaaagtactctttgctggtatactagccccagggagaggtagatttgtgccagcatctaaggctcccaggaaatattcacccttgccagtccagtcttcaccagccccacatcaaagctgttttacaaatgggaatttggatcccggtttataacaatggaattaaaaggccaacctaccatggatatagctatgtataatgtagatgactttaatgtgttccttacagctctttggagagtgagtaccatctttgtctttttatgaaggcagatgttttgggcaaattaaatggatcagagctagatcccatacaggaagcatcacccatcatgatgtccacggttaatgtgtttttcatctcatggatgtcaggggtgggggtagatgcctttatctctgttatgaactcaaatcccttcaatttatctttatttttagggatttaaaaaattaccattaatttgagtaaaattctaataaaaacagtagatggccttttaatactaatattttctacaaatcaaaacaaaaaattaaaggaaaggccactcaatttcattgagtattctgtattaggtttcttggctccagcatttaaatagcttttgcttgctaaatatatagggtattctctgaattatctttttattgtttcccaaaatcaacttgctgaaaaggaactatgttggaaaacagttactatcttaaaacacttttctgttttcaaaagtttgaaaaaaatggcatatttaaacaacaaattcttaaacttgagattcatatgatttcctcttaaaggggatgaatttgcaaattgccaaagatggtttacagtgtctgacttgctgggacacctgtatttgctaagagaaatgttatttaaaaaacacctaatatatttggaagcacaaaaaaaaatgacgaagggaaagtggggtgcattagctccctgtgagggtcatttttatgtatcaactcagctggaccaatgtccctaaatatgtggtcaaacattattccaaatatttctgtgggggtgtttttggatgagattacatttaagttagtaaatgtaaggaaagcaggttgccttccattatgtgggtgaaccacatccaatcagtcagaaggaattttgcaaaagacggtgctaagactgcaacaatgggtccttcctgagcgtccagcctgacagtcttcaactccaaatgtggtatcagttctttcctggatcttcagcctgccagcctaccctgcagatcttagacttgccagcctttataattgtgtaagccagtttcttaaatctatatatagtgtgtatatatacatattatatgtatgtcaatatactttatataaatatgtaagtatatattttatgtatatatgcatacatttcctatgggttctatttctcaggaaaatcttgactaatacattcccctttcagagagatccactagcagagaaatttttggtcaagaaatttaattgcatggtgttttccttgatggcctggttggaccatacgctgtcatatatgtccccttcttttgtccagaaaagacagtgctggacagtcaggaggaacagccaagaagaaaccctaatcagtccacctacgatgaacaaaatagaacattcttgaagtttcctgatgctaaaaaaccttttaaactcagctggcctgaggtcctgcagacccaggatccctgtcacccactggggatgtgaggtagaggagcaagccccgcgtactggcctcacactgaggcccagttgagctccaaaatgggacaaagtactgttttccctaaaacttgttctctttactcttcaaatcagcatctggtactactgccagtgccagtgctggtgctgagtgtttcaaaaacagttctacttcttaaaataaaaatgtttatggaaaaaagatcatatttctaatctctttcagttatttctgcggtagaagctaggaacttcgtatctgaacacccagattaattgtccttggagtggggcagacagtagagattgaatgtagctgtagcaagttaaatctccaaacaaaacatgtaagatgattttaacatcttatataggcttctggcacaaggtatgtgttcgttaaatatgtcacgtgagtgagagcttcttggagtgctccctggagaggtggctgagtgtatgtgtttctcggcagtatcatcattgaatattagagcagctgcgggttagaaacgaaggcagggcttctgggcagactgcctggcaggagagatgctctctgcagagttagtgccgggagctggtgccacctccccacccgatctccctgaacatgtgtctcatgcagggccacacttggaccactcagagtggtcaagggtgaagagcacatgctgtttgcttgttctgtgttgactttcctttttacttcttgtttgttacctgtctaattgcctctggtctgtgggtaaatgctttattagttggggccaaagcccaggcattctccgggcctactgaatcaggctgcgtctccagggagctcacagtgtgaggtgcctgggcacgtgagtcactgggctgggtggctgcagactcccgtcacggcagtcggctccctcactgcctctggacttgccaaagttttgttgaggtggagaggtcgccacaggctgaaagcattaaggagaaccaccctggcatgcggagcagtcggtgtgctttggaggaaaacatacaaaccaggtgagtgtgtgtggacaagctggggcttggctgccagatgccgccctcccctttctggtgggactgctcagggacatctcctcctcctctcttaacatcttcccaggtgtttctttgaacagagcaatgggtgcttttccagcaatataaaaagctttgaacagagaaattttacagatggtattaactttttaaaaattagacaaacaacctaacttcagaagttggtatttcttacattaaaatcctgggaaaattaaatattttgccactagtttttacatctctaaaactagggtaatactgactacctggtgttggccatgaagagtcaatgaggcaatgcttgtagattaacttcttgtagattggtagtgtaaacttcagaatttaaaatttatccatgctcaccctccctccctctccttctttatctctccccctctctccctgtctcctcacctttgatttaagtcaacaaaaattcattttgtgccccgtgtgccaggactgggcatacagtggtgaacaagacacacatggctctgcctcatggaactttccattctggccaagatgatagacaaggaacaataaaggatatatgtaataatgacagctggtgataactgctgtgaagaaaagtaaagcaggtgtgaggcttctagagggtggcatgtataaggtgggcagacactatttatacagggtggacgaggaagacctctttgaagacgtaatgtttcacccaaagaatggagccagctggaggtaaatctgcatccaaaatgtaaaaagcaatggattaaggcattcgaagcagtttctgaatcgtcaggaacactgttgataacatgtcagtgttatcagctgagggatgattatcatgaaactttttaagttctagaatttctaaatatctgtgtgtgtgttgtatgcagggaaagtgcattttcctcagcatggattatgctttatctctgtctgtgaaaacactgttgcgagaagctcagctcaatttagcagaacataagtggaaagtagacatttgaacgatactgatggttgatttccattaagtaggaattgaaatgaactgttgaattgttgctttttgatatgtggaaatgagtaaaaaccttacgtatctcttggtctttaaagaaaatctactttgatataaaaattctttttaaaaagttggcttatacccccacaactatcagaaatgcagctaacagagctagcagtttgtaaggagttaccttggaaacttctttcctagagagaaccctccacatgtaatgtacggcttgccgtttggaaaacaaccagtgtgaaatccttctcgaatctgtgggtgtgccaaggcaggcttttcctcatggagaagtaagtgctggtgctttaagggaacccctttttcataggtgtatgggaagaagaaatccctgtcagcctgcattggctctggctggtgttacattccaccgcagttcatcttgagatgtttctggcaaccctctgttttcagtgctactacaaatagggactgtttaccacccctggtatgtactaactgctaaggtacttaatggcaccttggccttttttattccacatctgtgttttgactcatagttccttttttttgtcgcagttccttacatgtgtactttagagttttgatatttcatttaaaaggttgacctgggccaccttaaagtgactttatgtatgtttgcagtatttagttagtttaagctttagtgtaatcaacagaaaatggctatcttagcggcatattaatttttcaggtgttaatcttttgttttcttcagagacagtggtgttagtgagcgactctaggaagttccccttgttccgtatccagcaccaggaagggagggtgtcaggctggaatggtaattaatgagagttcaggtttgtctgtcgcaagatgaggcaaatgtttttacttgcactctgggatctcaagtgcactcagatggatgggtgttttggttcacgttctggcattcccactgcacatcatgcatttggagtgatgttaccagagctgtgaggggacacagcgtaggcagcgtgtggagtttagcaggaatttcatggtaacacagagcactcacttcacgcttctttacggtctcctatgttgactccctcaaatcatccattctttttccatttatggggtaatcagcatagaacctcgaagcaagtagtgagatctaagggcttgaaagtcaatgtgcccatgacatttggcttcagactagagcatcaattcacactgcctcacagcgctgaccccgctgagggtggagttggctccatctgccctaagccgccccctgggaaggtcctgcatcctggccctgtgtcctgccgccttcaggggcaggttggagctgggctctgtgctcctgagtggcatccttgtggggacgaaggacatatgagagtgtgggtgaggagaggccaagctcctggcagcaccaggccggcctgttcctaggttcgcattcccaggttcgaggcactgacttgagtggaaagtttttccttcccatctctctccaaggccatggttgcacatcaccacagccgagactcacaggagagccaccaaaggcagaaaagggttttatttttcctcttttttgaaaagtaaaaccaaaaaaattcttgtttttctgtgaggtagatttgtcacaggttaaaccatctcattttatatttttagtagagaaggggtttcaccatgttggccaggctggtcttgaactccggacctcaggtgatctgcctgccttggcctcccaaagctaagattataggcatgagccaccgtgcccagctgtaaccatctcattttaaaaccaaggacaaggaacataagcatttatgttccttcagaatacaataagacaaaagggaacagaacacgggagggaggaaaccttagagaaattcgggaaggaacgtcgcagtgtctgtgggagctgctcacccgcagatcgttggaggcagcctgtgttcttcacaccccacagccaccttgtccgctgccactgtgaggcgcctgggtagccagctgcttcgtgaggttggttgttttgagctaagcctggaaagaaaacaggattaaagcagaggagtaagattgggtttgattaatgtttaacacaaaacaattttgggcctggcacagtggctcacgcttgtaatcctaacactttgggaggccaaagaagcggattacctgaggtcaggagttagagaccagcctggccaacatggtgaaaccctgtctctactaaaaatacaaaaattagttggtcgtgatggtgcatgcctgttatctcagttacttgggaggctgaggcaggagaatcgcttgaacccaggaggcggaggttgcagtgagccgagatcgtgccactgcactccagcctgggtgacagagtgagacaatgtctcaaaaacaaaaaaaaaattctgtacattcactcactcagcaaaaatcagttgataatcaacaacttgccaggcaccgtgtttagctctgggagtgcaaagatagagtcagcaatttatcaatttgttatggtgatatttcctgttagttttgtaggggacttatttttctcttttgttaggttcagccgttgattttaaaacagatgcttctgatctgtgggtgaatgtgcctttgaggtataattgacaataataatctgtacatacttaaggcataaaatcttgatatgtctggacatacgtgtacacagttgccgccatcatcacaaccaagatagtggctgcatccagtactccagaaagtctgcttcaacgacttgggattctcttttatcccaatgccacccatcccttccccaggcaaccactgatctaccttctgtcactatgcattagattgtattttctacaattgtgtatgaattggatcatacagtacatgtccttttattgtctggcttctttcactcagcatacttctttcacacgtcgcatggtcttcatagttcattccttttcattgctgggtagctttccatcatctggatataccagagtttctttatccatacatgttttggtggacatttgggtgtttccagttttagactattcaaaataaagcctttgtgaacatcagcgtacaagtgtttgtatggagatgtttttatttctctgtggtaaatacctaaaatgaaattgttgaatcataaggtaggtatctgtttagctttaaaaaatacttccaaacaacttccaaaggagttgtactatttcatatccacactagtgttgtatgagagtctagttcatctacattctttccaacacttggtgtggttagtctgtttaattttagccattctactaggtaagtagtggtacctcactggggttttaattggcatttgcctaatgactaatgatgttgaacatcttttttatgtgcttatttgctatccatccatcatctttgggtgaattgtttgttcaactctttttgccaatttttaattgggctttctgtttcttatttgatattattgttttttaatatttctctattactgagttttgagttcttaaatgttctagatataagccttttatcagatatgtgattgcaaatatttcccccagtctgtagcttattttttcattctcttagcagggtttcattctcttagtttcaaagagcacacattcttaattttgaagaaattcagtttataattttttttcttttatggaccatacatttagtgtcagatctaagaaatctttttttttttttttttttttttgagatggagtctcgctctgttacccaggctggagtgcagtggtgtgatctcggctcactgcaacctctgcctcccaggttcatgccattctcctgcctcagcctcccaaggagctgggactacaggcgccctccaccatgcctggctaatttttttttttttttttgtatttttagtagagatggggtttcatggtgttagccaggatggtctcgatctcctgacctcatgatccgcctgcctcagcctctcaaaatgctgggattacaggcatgaaccatcacgcctggccatggccagatctaagaaatctttatctaacttaaggtcacaaagatttactcccatttttttttctagaaggttttagttttaggttttaaatttataactgtgatctattttgagttaatctttacatgtagtctggatcaaagttttatgtagttcatttttgttggcctatgtgtaaacaactgttccagcaccaactattgaaaaaatgatcttttcttctatcttttattagcgaaaacttctttagtttccttagtatctagagaaaactgccttttctcagagactgaattgtctgtacatctttgctaaaaatcactttgtgtgtgtgtttgtatatatatgtatatatcacttgtgtatatatatatatataggccagtggtagaccatatatatatatatatatatatatgggtctgtttctgaacttttcattccataccattgatctgtttgcctgtcgtattgccaataccacactgttttgattactgtagttttataataactcctaaagtaggtagtataagtcttcccattctgttcttctctttcaaagacctatgttaggtcctttgcatttccataagaattttggttttttttctgtaaatttctagggggaaaaaaagcttgcttagactttgattgggaatgtattaaatccacagatcactttggggagaattgatatcttcaaaatgttgagtcttttaatctatgacatgatatatctctatttaggtcactaatttctctcagcaatgttttataattttcagtatacagacattacatatctttcatgtaattcatcaataagtatttcatatttttatgtattttttaaaattccaatttcaaattgctcatttgtattttttagacatacaacttaattttatgtattaatctagtattgtacaaccttgttaaactgacttattagttctactagcttttctgtagattccataggatcttctcagatgatcatgtcgtctgtgaataaagccagctttaccttttcctttccaatctcaactgctctttctttctttccttttattgcactggctataatgtggaatagtgttgaatagaagtgataagagtagacatccttgtcttactccccatcctaaaagaaaagcattcagtgtttctccattaagtatgatgttatctgcaggggtttttgagatgtcctttatcaagttgaggaagtttccttttatttcttgtttgctgagaacaggaatgcatgttagattctgataaataattttcctgcatatattgaaatgatcattttttgtttgttgatatagtgaaccacattgtttattttaaaactgttaaactggggtaaactgtacctggtcacattgtattttccttttaatatattgttggatttggttggctaaatattttttattgcatctatgtccctgacagattggtgtatagttttcttttctctaatatctttgattttgttgtggcaatgctggtcttattggatgagttgggaaatatttgcccctcttcaattttctggaagagtttgtgtagaattggtattatttctttaatttaatttgattaatttatttaattaattaatttaattaattgatttaattagatcccatttgtcagttttggcttttgttgccgttgcttttggtgttttagtcatgaagtccttgcccatgcctatgtcctgaatggtattgcctaggttttcttctagggtttttatggttttaggtctaactaaagtctttaatccaccttgaatgaatttttgtataaggtgtaaggaagggatccagtttcagctttctgcatatggctagccagttttcccagcaccatttattaaatagggaatcctttccccatttcttgtttttgtcaggtttgtcaaagatcagatggttgtagatttgtggtattatttctgagggctctgttctcttccattgatctatgtctctgttttggtaccagtaccatgctgttttggttactgtagccttgtagtatagtttgaagtcaggtagcgtgatgcctccagctttgttctttttgcttaggattgacttggcaatgcaggctcttttttggttccatatgaactttaaagtagtttttcccaattctgtgaagaaagtcattggtagcttgttggggatggcattaaatctgtaaattaccttgggcagtatggccattttcacaatattgattcttcctatccatgagcatggaatgttcttccatttgtttgtgtcctcttttatttcattgagcagtggtttgtagttctctttgaagaggtccttcacagccctttaagttggattcctaggtattttattctctttgaagcaattgtgaatgggagttcactcatgatttgatgctctgtttgtctgttatgggtgcataggaatgcttgtgatttctgcacattgattttgtatcctgagactttgctgaagttgcttatgagcttaaggagattttgggctgagactatcgggttttctaaatatacaatcatgtcatctgcaaacagggacaatttgacttcctcttttcctaattgaataccctttatttctttttctttttcttttttttttttttgagacagaatcttgctctgttgcccaggctggagtgcagtggcgcgatctcggctcactgcaagctccgcctcccaggttcatgccattctcctgcctcagcctcccaagtagctgggactacaggtgcctgccaccacagctggctaattttttgtatttttagtagagatggggtttcactgtgttagccaggatggtcttgatctcctaacctcatgatccacccgcctcggcctcccaaagtgctgggattacaggcatgagccactgcgcccggccaataccctttatttctttctcctgcctgattgccctggccagaacttccaacactatgttgaataggagtgatgagagaaggcatccctgtcttgtgccagttttcaaagggaatgcttccagtttttgcccattcagtatgatattggctgtgggtttgtcataaatagctcttattattttgagatatgtcccatcaatacctagtttattgagagtttttagcatgaagggttgttgaattttgtcaaaggccttttctgcatctattgagataatcatgtggtttttgtctttggttctatttatatgatggattacatttattgatttgcatatgttgaaccagccttgcatcccagggatgaagcccacttgatcatggtggataagctttttgatgtgctgctggattcgatttgccagtattttattgaggattttagcattgatgttcatcagggatattggtctaaaattctcttttttggttgtgtctctgccaggctttggtatcaggatgatgctggcctcataaaatgagttagggaggattccctctttttctgttgattggaatagtttcagaaggaatggtaccagctcttctttgtacctgtggtagaattcggctgtgaatccatctggtcatgggcttttttttgttggtaggctattgattattgcctcaatttcagagcctgctattggtctattcagggattcaacttctcctggtttagtcttgggagggtgtatgtgtcaaggaatttatccatttgttctagactttctagtttatttgcgtagaggtgtttatagtattctctgatggtagtttgtatttctgtgggatcggcttctgcatggcaaaagaaactaccatcagagtaaacaggcaacccacagaatgggagaaaatttttacaatctacccatctgacaaagggctaatatccagaatctacaaagaacttaaacaaatttacaagaaaaaaatcaaacaaccctatcaaaaagtgggcgaaggatatgaacagacacttctcaaaagaagacatttatgcagccaagaaacatatgaaaaaatgcttatcatcactggccatcagataaatgcaaatcaaaaccacaacaagataccatctcacaccagttagaatggcgatcattaaaaagtcaggaaacagtaggtgctggagaagatatggagaaataggaacacttttacactgttggtgggactgtaaactagttcaaccattgtggaagtcagtgtggcaattcctcaaggatctagaactagaaacaccatttgacccagccatcccactactgggtatatacccaaaggactataaatcatgctgctataaagacacatgcacatgtatgtttattgtggcactattcacaatagcaaagacttggaaccaacccaaatgtccatcaatgatagactggattaagaaaatgtggcacatatacaccatggaatactatgtagcataaaaaaggataagttcacgtcctttgtagggacacggatgaagctagaaaccattattctgagcaaactatcgcaaggacaaaaaaccaaacactgcgtattctcactcatagatgggaattgaacaatgagaaacatggacacaggaaggggaacatcacacactggggcctgtcgtggggtgggggtgggggagggataacattaggagatatacctaatgttaatgacgagttaatgggtgcagcacaccaccatggcacatgtatacctatgtaacaaacctgcacgttgtgcacatgtaccctagaacttgaagtataataataataaaaaaaagaattggtattatttcatctttaaacatttattataattcaccaatgcagccatctagtcctagcgatccctttctggtaaaaatttaactgcaaattctatttctttaatagatgttggacaattcaggttatctatttgttcttgaatgaggctttgttattttgtacctctctaaggaatttaagcatttcatctaagtagtcaaatattttgtgtaaagttcagattttcttattttatatctgcagaatctgtagttgtaataatctcatttctggtatatgtaatttgtttcttctctttttattaatctggctagatatatatcaatttcatctgtcttttctaagaaccaaattgattttctttgtttccttttttaatttcactgatttctcctctgatatttattattacccgtattttgtgtaccatgggattaaccagctcttatttttctaatttcttaaagtggaagctgcgttcattgatttgagacttttgttgtagacttgcaatgctgtaaatttccttctaggtacttctctttagaagcatcccatacattttgatatattgtattttcattttattcgtttcacaatccttttaatttctcttttggtttgttctttaaccctgggttatttagaagtgtgttacttacaaaaatattttgggatacaccagagtttttttatttgtttataacttgattccttaattccattgtggtaaaaaaaaaaacaaaaaacatgctttatatgacttcaatcctttaaatataccgagagtgtttttgtgggtcagaatctggtctgtccatgagcacttgagtagaatgtatattctgttgttcttgtgtggaatagcctataaatgtcaattaggtgaagttgatggatagctttgttccagtcttttatatacttattttctgtctcctttcagtaatctatatagattactgtgagattattgttgacgtttccaaccataactgtaggttttactatttctcctttagttctatcaatttctgcttcaggtactttgaagctttgttattacaaacagagcttaaggtttacatttgtcatatcctcttgtcaaattgacccctttatcattatgaaatgacattcttcatctctggcaatattcatgtctctgaaatctattttgcctggtattaatacagtcattccaactttcttttgattagcaattaacatggtatattcttttttcatccttttaattttagctgatttttttctctttatatgaaaagatcatttctgtaggactcatgtaatcaggtcttgcttttttatccaatctaattttaaattgatctgtttagatcttttatatttattgtgactaatgatatggttaggtttaaacctgtcattttactatttgtttgctgtttgtctcatctgtactttgttacattttcctctttttctgcctttttttgattatttattttgtaggatttttaaatagtgtctttttagctgtaattccattatcttcatggttgctttagggtttatagtacagttgacccttgaacaatatgagtgaactgtgagatgtgtggtccacttatatatgaattttttttcagtaaatacagttggccctccatatcagcaggttcctcatctccaaccaaacttggatcaaaaatacaatatttgctggatatgaaacccacatggagagagggtcaacattttgttctggtggtttagcagacccaactatggaacttgagtatgcacaggtttttggcatccatgggtgatcagagaaccaatcccccaaggatactagacacaactgtttttatctttaacttatcacaggctttgttcagatgacgttatacctctttgtgtatagtataagaaacttacaataacagtgtcatgtattccctcccagtctttgtgcctgttgtcatacctcttatatttgcaagtgttaaaaaccccacagaacactgttatttttctgtttaagtagccagcgaccttttaaagagtttttttaaataaggggaaaaaacgtgtatttactcttgtagttatcttttccagtgcttccagtgctctttattcctttttggaggtttgtatttctacctggcaccattttgcatatgcccaaaggatttccttgtagtgcaggtctgctgttgatgaattattttacctttgtgtatctgaacaggtctttatttcacctttgtttttcaaatattttttcacctggtataaaattctaggatgacaggttttttctccagcgctgtaaatatgttgatccattttcctcttacttgtattgtcttcagtaggaaatttgctgccattcttatatctttttgttttgtttcatatgcatctattttctgttcttctgtatcaatggttttcatcaatttgattatgagctgaattgatatgattttcttcatgtttcttctaattgtggcttgttattcctcttggatctgttggtttacaattttgaacaaattttgagaatattcagcattatatcttcaaatatttttgtatcacctccttcatcttctctctgtcaggaaatccagtaaccaatatgtgctacgtttaccgatgctatttattttaaatttttttttaaattttaaattattttttctgtgtttttattttggtttgtttctattgctacatcttcaattttctgaatcttttcttccatgttgaatcttccattaatcgcatccagtgtaattttcgtcttggaaattgtggtttcatctaaaagttcaatttcggtgtctttactatctttcatgtactacttaactttttgaatatacagaatactttataatcattatttcagtgttcttgtctgataattcccatatgttttaattgatttttctccaaactagtttcataatttcctacttctttgcatgtgtggtaattttttattgaatttcacacactgtgacttgtacttattgcatgctgatatttttgtattctttataaatatttgtcacatttgttctaaggcccagttacttgtaaacattgaatttcacacactgtgacttgtacttattgcatgctgatatttttgtattctttataaatatttgtcacatttgttctaaggcccagttacttgtaaacagtttgatcctttaaggtattatttttaagattcgttaggtgaaaccagagaagcattgaatctagggctagctagcccccatgactaaaacaagatccttctgattgttgtgccctatgccccaagaattatgagattttcttgtctggctggtgggaatagctgtgtatgaatgctgggtacttttctttccaatccttttggaaaggttcttccctgactgaagtacattcctgcactgattaatactctgttgactacccagaaggaacccttggtagattttcaggctctttttttctaggtggctctgtcttagtctgtttggagagttctatctaccttgctttcttaggtctcccaacttggaggtttggatgagctatgccagggttccccttccctgtgtgatgctatgggaatcttctcaaggtatcatagtaagctgggccactggagggctcacctcctttgttttccctagaatatagtctgttattgcttgctgtctagtgtcttgaaaagagttatatttagtctagctttttatatgtttcaggcagaaggggaaatttgatctctattcctcttttggccagaagcggaagtcttgcaaacatttatatttaaaatatgttgatagtgtacaatgatttacaaaatatataaaactttttgacctaataatcctacttctgggaatatatcttaaatatttccaaaaaggaaacagatgttacatacacaacattctgtacagcattatttgtaatgagaaattagaaggaatctatgtttatcaaaaaggagaggggttaagatcaaggcatatctatgcagtgaaatattagtggtttattttaaatgacagtttctaagattttcaacatttaaaacactaatactaaatgtattaaaaatatgttaaaatagtccatggtgtgtcatcattggaactttataaaagtatacacattcttatgaactaaaaactcaaagagaacgggctgccttcatgtcagtggtgtcactgctgagttgcagtgcttcccgcctgcactcatacccacattcagacccctgtgctctgctcagtgctcagccctcagccctgcctcctctgacaagctattctattgtcaccagtgttttcacaggacaggaagaatcacctggctacaaccaactcggtcatcttcacctattgtagtatcttctctctcctgacgttctccttagaccactgtcaaccatcacttactcctggtctttgacagtatccttgagttggattctttgggggcttattcaggttttcagggcgggatgatgttgaaaagcccaaaagatttcaaaactgtccagcgtttgatcaccttgctattgaaagacgacccacaactgactactcagtagtgttgtttgtcctcccagagtcctctctgcggctgcttctcttggctcagcagaaagaagaatgagttaaagatgaactgagcagcgggaccggtgacatcagtcctcctccactcagaaggaagctgttaaaataggacgagctgactttgccctttcctcctttctgaataataggcttcatttgcatgtgattattgtttactaattacctaccattcacctacagcccccaccaatactacttcttccatacccctctgcactacattttagcatcttgcttgggcaggacacacaagccatttaaacagctgcacagtgattgtttttccctccttgtgtaaggtttgtgcctccctgaggatatgtctattttggttttcatcattatcatatcctgacctgagagagagtgatgaaatcagcttagatagagcccgtggccttaagtgattgctgttaaaataacttccctgtgcaagttgtataaaaatacagggccatgagaacacattgctagggcccctcccaaggtctgggaaggggcctgtttgaatgagggactctgaaacataagctttgttagccccccggtcccacagcatgaattatgttaactgccactcttgacccttacctttctctgtggcaggtatccattgggaaagacagttgcagcaagctgagagaggcatacttttggaaagtgaattctttctaggatccctgaaatcaaactccacatgcagcagacttttttacatgcttgcttgtccaaattttcaggaaccgtccttgggcacccagagtgagtgaatgagtgtgtaccccttgttgggtagatgaattagcataaaaaacagggttacaccttgcctaagttcgtcctttgacttagaaagctgttcactgctgctcctttctgtctgagggtagttagtctgggccttgcatctaacctgctggagcccattctcaagcaagcttatactaaagccagagcttccccaaaacatagttgcgagaccttggaatgaggactgttgaggatgttgataaacagtttccactggtgaaatttaagtaccagaggtcaaatcacttgtacaacattgcttgtttggcaagaggcagtagggatggcctcaaacacaagtttctttggctttagagcctgcacttgccactacttgcctggcctacctcccatgtcttcccttcaaagctcttgtggagtaacgggtctgatcattctccattcctgaccattgcagtgctctgtccatttggccaaggggattcctgccagatgggcctagcagagtgcctggtgcttaacaaatgctgcaactgtttgcatgagtgggtgtgtatgtcagtctttagaaaagctaagagagtttgggccaaaaggagggtaacacctctcatagatcgccacagtttgggttgaaagactggagagaggctgcagcacagccttgcagtagtttttcattaaaactttcttctatagctttgtgtgtgtgtgtaaagagcagctgttttttttttttctgttttttttttttgtttctttgtttaaggaaatatttaattatagtgtataaagcagtgtttgtcaaccttctgttcagaatcatccccctaaggtgccttttcatatatttttttctgaatcacccccataccccaaccctcatgaaatttaaattccgcagacattctgtttatgtattcttcccctgtggagggctgtacacatttgtgatatctaagatgtttttgttcccaagaatcaaatttcatgtttctagctcctattaagaatttatggtctgaagtatttattccatttcagtagctgataacatgagaaatgcttatataattacagaaatgaaagcaaaatactagtcattgattgacagccagtaattactataaggatggcaaaacaattctgttctaatgaacacgtaattacagctgctggggaatagctattaaataaatggaatctaatgtgttggcccaggagacaggatgggtggcggtgaggtctggggacactcagccttgtcacatgggtcagctccatagggctgggctagtctcatacctgtttgtgcacaaggaaccacctcccaggactgttagagcacacgtccaagtcaggaggccttagttgcgtttatgattttctgctgtggctattaggctgctagttttttgagaagtactatttttgatatgatttgattttgacttttttattgtggatatatcataaaaacacgttaaccatttttgtacaattcaatgacattaaatatcttcataatgttgtgccaccatcatcactatttatttctaaaatgttttcatcaccccaaacagaaattatatacccattaggaactagctcctcaatcttccttacccccactccatcttttttctttgtacactatcaatttagagctaacagagatgactgagtgtggtcacaataggaagatttctcgttctttgaccattatgcttgtgttggtattgttgtaggccataaaatacacaaaaccaatatgattaaaaatatgttgggcaggcttgtaatacttcccaagaatttaggtttcgctaaatggtaggcaagtgactactactacactgtgtattgtattgtattgtattgtattgtattgtattgtattgtattgtattgtattgtattttttgagatggagtctcactctgttacccaggctggagtgcaatggcgcaatgttggctcactgcaacctccgcctcccggattcaagtgattctcctgcctcagcctcccaagtagctgggattacaggcacccaccatcactcccggctaatttttgtactgttggtagagacaggatttcaccatgttggccagtctggtcttgaactcctgacctcagatgatccacctgccttggcctcccaaagtgctgtgattacagatgtgagccactgcacccggccatgacaactacactggatcttcatttttaaaaagtcccattatagaggtctataataaaggaattaaagtcctctgagaagaaagtaagggactgtcttgtttaaaaacattatttactatgttgcatgatatgatttaaaaatgtttaaagagttgaaattttgaaaccgtgtctatcaaacatgcagctgtgcagcttagcaaatatggatgacattcagatgccatttccagccatttggagcctgctgggctgaagcggaccagtgcctcctacttcgtacctatccacagttctctgcctcattggagagcaggacgtggaatcttaggttattcctgggtttgcctttgagcttggttttggtgagaagcaggtgttgatgctgagcctgctggggagagccataactcaagcacagcctttaaagtaatagtttggtttagcattgagcagtggcttatatccctggccatacaggagactcacctgtggagccctgaccaacaccaatgccaggtctactcacatgcccaggtcaatcaggtgctggaagtgagatccaaggcgtgaggaggggcagtggtttaaggctttgctgtgatgattctcctctgtggacaggcctaggaaccctgagcctgtcagtcagggcctgggatgccggccatcatgtaatcgcaggacacagtttatgtggcctttgcatgggctcagcaacgagtcccctcaggtacgtgcttctagacacagagtcttcatggttggtgaaattttagtaaggaagttgagtaaattgagggtttttaaagttaaaattctaaaagtgttgaaatcctaaatagagagaagtacagaattaatatactagcatgtactcttaattgttttacataacatccaaaaacctatttctgatttttacagaggactgatttttgaagggttgtatattaataaggcacatttgtggaatcatgtctgaaacctcagactgcagatagaaatacctagtgaaagcttgctccctagtgccagacacttcataatacacccccgcaggggctttcgagtaatgttaccttggaactgggagttttggaggtctttgggttaaacccttgtgtctctcagatgataccattgaagtccagagaggttaattagcataacagcatcaagaacagccaaccatcagccacgtgctgtgctaatacatcagcatatttcatcctaaccatacaggatccaggttggacttgtcttccatcttatgactgcgtaagctccatagtttttggaagtaagaaatggtggagattacatgcaaaccagcttctccgtgggtttaagtcccgtgagttttcttgatgcggtactgtcttagaagcaaaaatcaggggaactattctggtatcttttcttttctcatgccctggaaactcatgtgtcttctcccagctacatgtgccccatcctttaaggtatgtttcttgtcagcctctccatgaatcctcctctaattactcaggctcatatcagctgcacccttctctgaatctgggtgtttatgagctccattccactctgcttgggcttaattactcgtctctacaccttgtgttcattgtctctgtcacctggtaagcagggatgtcagtcagggacagatgccctaagtgtatgtgtcctgcatgggccgtcactaagctaggaggagctgcttttcccgggttcattggccaagcccttgtcactgactcggtgtcaccccaggtgacaccccaggtgaacacatgagcgcgaatgagacagtccagccactgctgaccctgctgcagagtccatttctggttcattccacctgtggctgtgacctgttttggagaggctgtgtgcttccactggtatttcattggatgtaagtcttagaagatcattatagaatagatcattaaaatgactgttttactttccatagagaacctagaagtctgccaaaaatttttagaggttcaaaacttgctaatctgttatactttccttcattcctttggtgtctccttatctaaaatatgggggactgtagaacgggaaagactgggagagggtgaggagcataggtgtaactgaggctgctacagcccagcagtaatgaagcacctgtttctgtacaggtggctgatgagggctccttttaaatctttagcatgggaatcttggatataaactttgctgctgttgggaagatgaatgaataggccagaaacaaaccagtcttctgtgtgtattagatgggagaagatgcagagagcttagctacataatgtcctgctgggaagaaaggtctatcagaaagaagcacatcagtgtcagtgtttctgtttggaaggcctggggaggagggaggggagacgggccctccctcctttgagagttactaagagttaagcttgtaagtgttaggggagaatattaggtctgatttttttaacaacttttttgggggaccttttttagaaaatggtcattctaaggtagagagagggtagtaatttaagactgctttagaaaaatttgcattgcaaatgctgctaaatgtcagcaagggactcaaaactttgacaccttgttggagctctttgtgctgattaaattcttgtctccagcctagaattggcagcttattctccttaattttcatgctgtaataggtattgaaagagtatttctttgacagttgcccttggggaaaactggaccggagcttgttatttagggcagacaattaagtggaaaagaataataactagactccaaggtcttcatttagttccaagaatgtcaacaatatcaacctctttttaatacttactgcgggctctggtgaataatggaaattaggggtagacaaatccagttcagagttaagaagaatgaattttaatggtctgattaaaattaattgaaatcccttctttaagatgaattagcccttcccagaagataaggggtgagtgatactaatagttttgttttgtttttctctctggagattactttgatttaaaaactcactgcacattttcagagctcctgtgttctaattgaagaaagcagtgcctatcttggtgcttagtgatgggctcatggaagaactgattgtaccctacagtatccccatcttcattcccaatgtgcaaatcacagatcattcctcccaaaacaaaataaaacctagttaccactgatacttgcttatagcagaatgttgccctgtggtaagtttctttaatgtttcataccattcatttatttttttttctgtacttttggtagaaataaataggaattatttccagtcacattctcaaatggcaaaatatcttattgaatggcaacagaaaagtattttctttatactgcttctgtaaaagaaaatgaagtgaagagtgggaagacagacaagccaaaatactcacacatcagtgagaggaatcttgcgtttcatggtggaactctgtggcctcaaatatgcaagtggacacttggtttttgaaaccaaagccttgtctcatacataaaaagggctggtttgtggtaaaagttgtgatatatctatagttataataatgctttaaaaaactgcatttaaaatgctgagacctaaactagataactcccttaaacgggattatatctctgtgcccatttacagaacacatgcaaccttaatttcactgtcatatagaaaaaggaagaatggatgaggaattgattaaaagattacacagagcagcaatatttaagagctgtttgtgcaaaaagtcagatgattttgccaggaagagatcgtctttcaacttcatcaatggcgttttggtatctttggctggaggacaggacatgaacaagcaggcaaataactaatttggtatcggatccttgtatgtatctctaatgtatctctaagaaaacatttttaaaaattttaaacatttttaaaaaatcaagtctagctctgtttgtagaatgaatatttatttattttatatgtaaggacttctgttaaatgtaaggcatgtttaacttacagaaaattgataggtttcaagtcaaagccttcagatggtagcaaaaggttcagagacaaaggagcccagatggtctgggcaggaagctgaagggccagagggttggctggaggtgtagtggggaccctgggccctgtcccaagcaagacggaaccagaaggtgttccagcttcagctgaagtatttcatgccttggaaaagtcattggtaagaacatctattatggatttgaaaaggagtgggcatcaaaggcgggagaccagccaggacccgcagttgctattgtccaggagagatcatggtatctgaacctggggcagtagtagagaggaagagaagacctgtctcagaggaacaattaagggaattgggtgactcactgaaggtggaggatgaggaaagggaaggagtctggaatagcagattccaaagttttctgattggagacctacaggaaaaaaaaaattatacttatataaaatgaaaataagaacaatatttcccttaataagtgcagtgtactgcgttttctgttctatttcatttattgaaaaatatgcattactggtcttattagatggatttttacaactttctagtggtatttgaaaatgcaggtatacagtgagctccattgtctagcctgggtgactgggtgatgtgtcctgttaacagggtcccttaggacctactgaggtaggcaggatgaggagtatctagtgctgagggggaagggaagtcaaaatccttcagtcctgcttccagcaaagcatctgggagttagctgttgtctgtgaggcttccttttaacagttcattgcagtaaagggctaccagttttaaaaaggaagggaagaagaaaagggaagtaaagaagggaggaagagatggaggaagggaaaaagaagagaaaggattaaaaaccatgggcttagcatgctgagacagaattgcaaatggaccctgggcccaggagttgctccatccaggccaccttccacatcgctgttagatttcttattgtaaaaacagagcaaggaggagttttggtttggagtaagatggagtaagtacacaggaccctgtctttcccgatgaattcaactataaaacctataaagacaactattcaattgtccttcccaataaattcaaggataaaatagagcaactatttgaagactctgaagagtaaatggtaggaggcagattggggaagaagactagaacttagaatattgaactgacagtgcttttaacatttttcttctggtattctctggtctggactcaaattagtgcaaaacccagaagtggacttgggtgtggacagagagaattcaagatctttctatttctggcttgagtaggaggagtctcacatgtttctcactctgttatcttgccccctctcccccaggtaatcccatggtgagaacagcaggggcatatgggcacctaaaactctgaggagtggggtggaaactcactcacagaagtctggtttttccttctctgtttttctgcttggccccagttgtggctagctatagtcatggaaattaagtggctgaacaagttaagtaatgctccagctctctggctgaaggactaagaagggggagcctcagctgggtgtggtggctcaagcctgtaatcccagcactttgggaggctgaggcaggtggataacttgaggtcagcagtttgagaccagcctggccaaccggacaaaatcccatctctactaaaaatacaaaaaaaaaaaaaaataaattagccaggcatggtggtgcacatctgtaattccagctactcgggaggctgaggtaccagaatcacttgaaccggggaggcagagtttgcagcgaactgagatggcaccagcctgggcgacagagcagactctgtctcaaaaaaaaaaaaaaaaaaaaaaaaaaaaaaaaaaaaaaggtggtggagggagcctcagggaacctaaaagtatcaggaatataatggagaaggagaagctcaggaacgtgaaagttttatgtgaacccctgggctccacacacgtgaaagttttatgtgaacccctgggctccacacagactgcatgcatgaatctgaccctaaacagcatagcaatgactttgagaactgaacaagatagatactgcccaggccccagactgtcgactttgtagtacacatacagaggtcaaccaaatggcacggcaagggctctgaaaactgaactgatattagagccacagaagacaggtcagaacttgtgactcaaactgaaccaggttaattgcctgcttaaacaaaaatgtcaacattttctgtaatatttaaacaaaacccagagtttcataacattattttaaaaatatccaggagataagccaaaattacttggcgcgcaatgaactaggaaaatcccaacttgcatgggaaaagatagatcaccacccctgggccaagttgatacagatacttgatttttcagtttttaatgcagccattatgaaaatgcttcaggaagtaagagtgaacattcctgaaatgaatagaaagatggaaagtctcattaagaaatagaatatatagagaacccaatggaaaatttagaaacgaaatttacaatgaaagatacaataaccaaagtaaaaagcttaccagatgggctcggtagcagattggaaatgatagaccttaaataagacacattagtacttatattacatatgactggtctaatcacagtaattaaaagacagacattaatgaataaatgaaacaagacccaactaaatgctgcttacaagaaacccacttataatgctataggtggtttaaaagcaaaaggatgcaggagaaaaaaacatgcaaacactaatcaaaagaaggtgaagtgactatattaattattagaagaagtaggcttcagagcaaagaaaataattagaggcaaagcagacattataatgacaaaagaatcaggtcacccagaaaactagagcttcaaaattcataaagcaaaaacagaactgaaataagaaatagaaaaaattctgttgtagttggagacttcaatacttcttttttggtaatcaatagaattgacagactgaaaatcagcaaggctatgaaggaactgaatggcaccatcaaccaaatagttctaattgacatctttagaaaacactacccaactacagagaatacatattactttcaaatatgcataaaacattcaccaatataaatcatatcatgggtcacaaaataaaccataaccaatttaaaataattgaaatactgtaatttctgactggaataaaattaaactgtaaatcagtaacggaaggagaacatgaatatgtccaaactcttagaaattaacacacttctaaataatccatgtgttgaggaattctcaatggaagttagcaaacgttttgtactaaatgaaaatacaacacatcagatttgtgggatgtggttgaagcaatgcatgagggaaatttctagcattacctgcatatattagaaaagagggaaataataatgtaagcacctaccttaagaaactagagtaagaaaagtaaaataaaaccaaataagtagaaggaagaaaataataaaagtagaaattgatgaagttgaaagcggagaaaaaaatagagaaaatcaatgaaacaaaaagctgattctgtgaaaagaaaaataaaattgaccaacaagaatgacaaatgaaaaaagagaagatatgcattgctaacattaagaatgaaaggggattaaacttcacttcaatgaattatgacagaatactatgaacaactctcagcacataaaattgatacattagatgaaatggatcaattccttaaatggatcatttccttaaaaaccacaaactaccaaaacccacccaagatgaaatgataacctgactagccccattactgtaactattaaagaaatttaatttgcagttaaccttcttaacaaaatatctccagccccaaacagttgcctggtgaattccaccaaacatttaaagataaaataaaaccaattttacaaaatctcttccagaaaacagaagaggaggaaacacttcccaattcattttatgaggtcagtattaccatggtatgaaaaccagacataaaatacactgaacaatatttattatgaacaaagatgcaaaaaatcctcaacaaatattagtaaatcaaatccagcaatatatgaaaagagtaatatgccatggtcaaaaaggatgcaagactcattgagtatttgaaattcagttagtataacctactgcattaacaatctgaagaagaaaaaacacaatcatatcagttgatgtagaagaagcatttgacaaaattcattcattcatgatttacaaaaagctcttagcagactagaaattggagaaactttctcatcttgataaaagacaatttacaaaaacatatgtctaacatcataattaatagtaaaggattattaatgctttctccctaatattaggaacaaggcaagggtgttcactctcaccacgcccattgaatattatactgaaagtcttcactagtgcaatagggatgggaagagggatatagattgggaaggaagaaataaaattgttctttttcacaaacagcattattgtctatgtacaaaattccaggaaatctacaaaaacaaaacaaaaaatcaaacactcctagaattaatgtttaacaaagttataggatataaggccaatatacaaattcaattttgtttctatatactaacaataaacaattaggaatggaaaggtttttaaaacaccgtttgtaatagctccaaagaatgtgaactacttataattttggcaaaaaataccatcccaaacaaacatatattgcatctatagttgaaaactatagaacactgataaaagcaatctgcgaagatgtataataaatagacataacaggtttataggttagaagattcagcagagtaaagatgtcagttctcctagaatttatagattaacattatttccagaaagattttgttgttgttgttgatttagacaagctgcttccagaatttgtattaaaaggcaaaagaacaagaatggctgaaccaattttgaaaaagaagaacgaataggaagaatcatactacctgattttaacatttactctaaagctatggtgatccagattgtgtggcattggcaaagggttggacagaccaatgggacagaaacagacccgtacaaacacaaccagttgatttttggcaaatttgccaaagcaatgaaatagaaaaaggacagtctctttaacaaatggcattagttggacctatgaaaaaaaaatgaacctcaatctatgcttctttgtacaacagttatctcaaattggatcatagagctacatataaagaggagaaactacatatttttagaagaacacataagagaaaatctttgtgacttctagttaggcaaggagttttcccaccacttctcatgacccacagctgggtaaggttagcctggagagcttgctccctgttttctgtttttgagagttgttcagcgtgtgcttctgttcattggaggcactgttctaactcattcctcaccacacccctgcaaaatagatagtatggtatagctgtgtcatttttgagatgaagaaactgaagcacagaaagatgaataaatataccttgagtgtaataagttccatgagtggcagaacaggaaatgctctcttcctagacctgtggtgccatctacctctgtgttctgatagacagtctcagcctccacattcttcttgaaaacacaaatcatgaattttcatggctcctgtgacccagacgtgtgttttcagggcatctgttttgttcttctgtgtgggttttattctcaggcccacgtttgaggttggtgggtttttgctgctcatagtgcaatattaacccacatgaatctatttagcgccatctcgtgtctggagcggtttacaggcgggattgctttagtagtagtgggtaggtacaaaaaagatgtagtgggaaagatttgattaccaaaatatgaaaaattagcgtgatcggacacttgaattccattagacatgaactttgtagtgatgcacctcttccagtatgatccagttaatagaatgttgcggggaacagatcaagtcagcttttaaaccttagtttgccttctcccattgtaatagtgtcctggcttcttgggcacttggccagtaccagaggccctgagctcttggggggaggccttcagtcccagcttctcagccttgtggagagtcttccccgtggatataccttccagaaggctaaagagtctaccttctctctccctgtgtggttagctgatttaaaggaaggtgccaaaatgtacctcaggattggccttttcagcagcgggactcagaatgggaaaaggacagtggagcaaactcctcttccatggagacttgccagtttgtttgggaagggaaggagggaagaaatgggaaaaaatagggcagaatgtgccgaattcttggagctcttccatgaggtaggggctgcatctttctgcaggagggtgggggtggtggtggtaagaaaggatgcactagtaaaaaaattctaaaaacaaaagcatgtaacacctcacattattcagtcttatttttgttcttttttttttttttaacatattttacttttccattacagaagtaatcgatgctcatgttagaaagctgggaaaataggaaaaatacatccaaagaatatatactcaatcacaatggttaatattttatggatttccttttcttctttgtatgcatgaagattggagtgttataactgggcacggtggcttatgcctgtaatccaggcactttgggattccaaggctggtggatcacttgagcccaggagtttgaaaccagcctggatagcagaaggagaccctatctctacagaaaaaaaaaaaaaaatagcttggtgtggtggcatgtgtctgtggtcccagctactcaggaggctgagatgggaggatcatttgagcctgggcggataaggctgcagtgagccatgatggcaccactgctccaacgtgggtgacagcgtgagaccgtgtctcaactaaaagaagatttgagtgtttaataatgtgatgttgctttttacttattttatttaattatgtgatgttgctttttacttatacttgctttttacttattttatgagaaacattttacaagttaggacatagcttgggtaaatgactgtgtacgctgagttctaggaccatgacaggtatttgtgttttagttattattttggtatattaaataatgcttcagtgaacacctttgcttccttttttattttgtttaaacttagagctatttccttagaataggtttcccaaatcatgatgactgggaaagggcttgaagaggacttcgaggctcttagtataaacacatacgtgctcacccaccctggctagaagtgggctctgctacttaggcagtgatggagattttggtcacatcccttcacttctcagagcctcagttttttcttcttccaaatggaggtaaaaatacccactgcatatggcttttctattaataatacctataaagtccctctggagaacttggcacacagtgagcgctaaatacatggtaactttacaaaataattatagttctagatagccttattacaggtttctaccagtttgccctaccaccagcaatgcatgaagttatttaacctctctagtgtttgatacataatcatttctttttaaaatacctttgccaatttgagtgaaaacactaccttattattattttaatttgcatttgttttattatagtgagagtgaaaaattttgcatgctattataaacaagtttgttgtctctcatataaaatgccttttttctattggcatttaatattgtcttactagtttgtattaactatttaaagaaattattctttaacatatttgttgtcatagatccacttatctagtataattttatatcaaactttcatatgctgcattcaaatgctgcatacagatttctcattaggatgagaaatgtgattataattgtaatctctttgtaataaattctgtgaatttttttattgtatctataattttacttgcaaattatgacaatatgtatttccaacaattttgtatcttatcatttttcatatcttattaaatttgcctgaaattctatagcagtgttaaataatccatgggtttaatgagcatcatttaaaaattatttctgattagtaggaatatctctagtgttttaccattaaatagactatgaatctgttatttctcaaaatatactgcttattgtgtcaaggatatgtccaaataatttttaaattttttgagttattacatatttaggagcatattttttctcagaataatgtggttttctttttcttttttctctttttttttttctttgttcagacagagttttgctctatcacccagactggagtgcagtggtgcgatcttggctcactgccacctccgcctcctgggttcaagcaattttcctgcctcagcttcctgagtatctgggattacaggtgtgcaccaccacacccatctaatttttgtgtttttagtagagacaaggttttgccatgttggtcaggctggtcttgaactcctcacctcatgtgatccacctgccttggcctcccaaagtgttgggattacaggcatgagccactgtgcccagccactaatgtagttttcttatttgatcttctgttggataggatgcattttctaatattacatatatatttgcatacttagaatttgtgtttactgttttctgttttgctctttctaatcaacgtatttcatgtagaatgtttcctacaacccacatataaactttgtgtgtgtttgtaatgcataaaaaaagaatgtaagaaaatacatcaatattttaagaatggttatctttaatttatgggaacatgaattattttcactttattcttctgtatttttctaattttctaaaataagctgttctactgttaccagcataaaaaatgttgtttagaaaaatgtcaatgccctgacaattagttatgggtgaaatatgattaggagcttagatgtgactggtggagtccttcttcctttagggcatgtaacttctgtttgttcattatctatcagtcagattattttgataataatggagttgaaaaactgagtttaatgtttacttaaaaaacatagctagtgttttctgtttggagaataatgatggtatatggtgactatatattttcctaaactaagaatttaggatttggtatgtgacgaatgtgtgatatcatgtattttcatgatacctgatgtttttacttgaaaatctttaaagggaattactcataatatttaactatgcatttattgctgacctattggaataaaattggattaacccaggatgatcccacagaatctaagacttgctgaccacagactggggcactggacaggttgcttttggaaacttcgtttgtccttgtggccccagtgggaggccacaacccagacaccatctcatgaatatctttgtcctgtctgggactacacacagatatagaaacagaaaaacatgcatttatacatcaaggcacacagaaacaacaatcactggattggtgccttaattgcatcttccgggagcctggaatagcccttgtttcttctagtgttcgacactttctctctgaaatgagatttagttaatttcagagctcaggaattctcctcagatttgattcttaacatactgtgtacttaaagtatgaaaatcttgatcagcattatgatcactgaagattatatttctatatacatctataatgtctcctttttctcttgttttctgtagctttgggccagattatgttgtatgtggatggaatgaatggagtaataaaccgcaatgaaaccattcagtggctgtacactctcattgggtcaaaggtaaggggaagttatggttgactgttttgttcacttgtcatatcacttgcctttcttttttctctgagtcagttttgcagaaagaaattttattcagcttttttcaagccgttacagtataaatgaggattactactctacaaattttaagatacacttaaattgcaaatagctcatgaaattttaatgcatttctcttttctcttctcttaagctttaatcaagtgcctttggaaccttcggtttttaatatttaatcaaatgttataccatagggccgggcgtggtggctcacaccggtaatcccagcacttggcaaggccaaagcgggtggatcacgagatcgagaccagcctggccaacatggtgaaaccctgtctctactaaaaatataaaaattagctgggcatggtggcacgcgcctgtagtcccagctgctcgggaggctgaggcaggagaatcacttgaacccgggaggcagaggttgcagtgagctgagatcatgccactgcactccagcctgggtgatggagcaagactctgtctcaaaaaaaaaaaaaagttataccatagatgtaagatctgtgaaccatctgtatttcatgttcgtgtgtacatatatatttatatgttgtacatatgtatatgcatattcctatatggataaagaatccgagattacctttcagctctaacatcaattataaaagtaatcaatgtttattacggatttgccaggcaccaaactaggtattttattttattttatttattgagacagagtcttatactctgttgccaggctggagtacagtagcatgatctcagctccctgcaacctccacctcctgagttcgagcaaatcccatgcctgtctcccaagtaggtgggattaaaggcatgacccaccaccctgggctaatttttgtatttttaatagagacaaagtttcaccatgttggccagtctggtcttgaactcctgacctcaaatgatccacctgccttggcctctcaaagtgctggggttacaggtgggagccaccacatccggcccatactaggtgttttataagcgtgatctcatttaatcctcatgaggccactgtcaggtaagtaatataattcccatttggtagttgaggaaatagtgcttgattatgaaagcctagctggtttccccatgcattttggcacatcaccaccagccacgccttggctgccaggtccctgaggtctctggaggtcctgccaaggaagcagatctattccgtcacttcaggtgcgccgaaagctgggcaagcctctggcatagtcttctctggtttctgccggggtgtggaggagcatgtgttagggacctgactgcagggggatttgggagaagtagtgaaagggaccctgtcctgagcaggtgcacatgcaccaaggttaaagtgctgtacgggtggcacgttatggagatcagagtggctgtagtgggcaacatggtcagatggagtgggggatcttgagggcctggatacagaatttgaacctgaattaaacaggtcacagaatcagcatagctttgtagggtccctgaaaagcatattggattaatctgttctcacaccgctaataaagacatacctgagactgggtaatttataaaggaaagaggtttaatggactcacagttccacatggctggggaggcctcaaaatcatggcggaaggcggaggaggagcaaaggcacatcttacatggtggcaggcaagagagtgtgtgcaggggagccaccctttataaaaccatcagatctcagaagacttattcactatcatgagaaaagcatgggaaaaacccaccctcatgattcacttacctcccactgggtccctcccatgacatgtgggaattattacaattcaaggtgagatttgggtggggacagagaaccaaaccatatcacatgtggtctgcccagactgtcccccatccctgtgttcactgcccacccccactagagtgagcctttccaggctgctgttcacagtgctgtgctctgctggggagtccatcccctggccctacccctggagtcacctgcctcccaaggattctgctgtcctttgggagcactcagccctggtttgatttggggaggagtatggttctagttttaggctgtatctccttctcaggcttctcagaatcctggtgattgtgtccttgtgtggttggaagggctttttctctgtggctggcactggcatgcgaatccccatggggtcccatatccgtgggtgaccctcacatcttgccctcaggttttctttttctagtacttattgatgagagaatttttccccatttcagattagaaacagctatgctttccctcagaagattgaaaatctttaaaaaaaaatgtttggctttgttttctatggaaaatggaagtgactctgttttgaaactgatgtaggtgaccttggacactgagtgaaatgctgggctttctaggttgcatcagccagaccgagggaagatttatatctcatatcctgtttcagttttttctcctttttccttgcttgtgctgggaagcctccctaactttcatgttcatttggaacctgctccctccccaaggcactctgaatggtctcaaggacataaaagctagggagatgggaagagattttgcaagaaagattgactttttgtacatgacacagctgaattaagatatctttatggttttatgatggccatgataaaacaccaacaacttgccctatttctaaaaggaaataaaacctaacatgcttacaatagaaaaactgacagtctgttagctcatcaccagacagagaatagagtgagggcaaggttagggaaggtgggatgggtatggggaagaatcactgtgagcagggagagattacatagagaatgctgtggtctgaatgtgcctccctaaatttttgtggtgtaaacgtgatccccaatgcaacagtgtcaagaggtgtttaggtcatgaaagctctgctgtcatgaatggattaatgccattataagaaggatttgtggaaggagtgcatttgctctcttttgattctctgccatgtgagggcacaaccttcctgccctccagaagatacagcaacaggcaccatcttggatgcagagagactgggccctcacagtcagtgccttgatctgggacttcccagcctccagaactgtgagaaataaatttctgttcttcataaattacccagtctcaggtatttctctttatagcagcaaaaatagactaagagaggaaaggcacaaagaaaagaagagggagagatagaaaagagggaggagaaggaccacggaggaggaaaagaagaagagcagcagagaaaaaaaaaaacagaaataacagaaatgcatgccatggctcagagtctctgatgtggcaacagcatcatattgatattactttggaatcattctgtaaggaaaataaacaatcaggaaagaataaacacacaggaaaatctttattgcatttctaaataacatggaaaaattataaaattaaaaagtttcaaaaatacatttgtaggaattgtgctttcccagcctccccatcctacacggtgcactcggtgtgtgcttcctcagtggtggttcaggactctgggctgcctcttcagggcctctgtctaaggtggcacactcgcctcctccctagccatttgggccgtcagcactggatctgtgtggatttctgtcttcatcttttattttcccaaaggcaggtctagaatagtctctggctcctgtgttctgcactgtgctggtcataatgaggacaagagagtggagccaagagtcagcctgtgccttggagttcactgtgttgttggaaaggagaattctggggaacagtgatgccacagcccatcccactaactgtgatgtcacatgaaggtctcctgcccccctgcagggtgtgctctgttctaggcgagttgctgaaagttaacaaaggcagtagctgccaagtttatttccagtctacatagttctaatgagatcacctcttatttacaaaaccaatagagtgtctgctgatactcttccctcacccccatctgaataatgagaaattgaaaagaacaacagatacatcaacccaagacccttagattttgagaaggaggcctcagtctcctccttaaacatacagtttggtcaatacagctgcaatgggttttccccaattcaaattaagaaatcagcaaagccaggggccctagcatttccttttgacaaagagtcagatttatcttaacctggaaaggttaccttgacatccagttgcctttgccttatacagtcacagagttgataaaggaagtactggagcagaaacatcttgtcactgtgttttcataattcatcatttttcttccatgaaaggcaacaagatgtgattttgcagcctgccagaggctcattatgcaatgcatatttgcagatatttgagactcatagccaggggagaaaataatgcattcgtagccaaataatgactttttaaaagaaagaaaaaagtgttttcaataaagtgtttctttctatttacaagagccaatctttaaactctccagtcagaggtaagaggcagatgccaggcccatgacttatcacaggatgtggatttttttctcttcatacatctggaattctaattaattggagtaagatgattcagtctatacagcatggccctttgtcacccagcacagagagtctgtctctttatctctatggatcctcttttggcccaaggggaaggcctcagggccctgagcctggcaaactctcacctccttgctgcctcttaggggtgcctcagggcgctggcatggaagcttccctgtctgcattgctctccaggttagcttgccttgctctgtctaagttcccatcagccccattggatctcatccttccatctgtgccccatattgctgatcacaggtctccagacttcctttctacttgtgtgagggtgtgcaggcctccctactcctatgtaggcctatctggaggagccctggccaaggccctccttgcacgcacgtacacacacatacatacatgctcgtgctcatgcgctctctctttctctgtcatatacattagagaacctatgagcccacccgccagccaccccacccccaacactggggacattgctgaaagtttgtttaggactgcaaaatgaagaaaaaataagtaacgtggtgtgtagaatggagtggtggaggaggggaaattgacagggatgggaaagctgggtgggaagggttagctcagtatcacagctgtgaggtgagagtagcagtggaaacagaataatgaaaaaatagagacattttgaggactagccttctaggaggagatttctggatataggaaaataaaaggaatcaaaggttgggggtcacagtttgactctgcagctagaaatatggcagtgccaatggcagtagaagagttggacattggggtttgttggcaagaaaactttggacacactggtttggagatgaaggaaatattcccaaagagagctaagtgccatggagcctggtgctccatgtgccccaggagacactggctgatgggcaaggagaggagattcggtgagccctctggtcttggagccactggcatgtcactgttgtgtgatctgctcagatgacccaaatatgggggtgagagctgaagacctttgtaagttacgtaatgtaaataatagaatcctagccttgaagagatggcaatgtcatgttaaaggtgttcctgacatcatcagtcccattcctcatacttctagatgcagagggatcatcaaatcatttgcctaggttgcccaggaatactgttgcatgctggaattggtggaaagccttcctttttcggacatgcattacctgtcattaaccaaatgcttgtgcattgttttgttgaacaagacactctgacttgctgtggaagcaaagtatttacaggcagttaccatgtgaaccctgtccaagctaaacttgatggctgctacagatagtacttggggatataattttcagctcctcatcatactggttaccaactcttctgttcatgtagtacaaagaatagtaatatggtagctgggatgcgatgtcattcttccacaaatcccacctctgatatattacatcttttagcagcagccttggctgttgcctccgtttgaaccggtaatccactaagccttccggatttttgtcacacatttttatctgccagtttcttccattctgcgtgtctgcgattgattgattcacgtttaaattcagggccttgcatttttcccccattgattgtgggccagagttccagcctcaagataattaagaattctgttctgcttctttctcttattaactgttagtgctaattttatttaacaaaaaatgaataagcagatcttccatgccattgatgaaaatgtctagtgggacagagacaaggaatgcataaaccagtgcagcctgcaggttgacactgatcagtcaaggcattttagggtcattgtacaattagtgggaagccgttgaactctgaccatccagctgtgtttcttcattggggtcacaaggccttcctggaatcacgatatgctgcatctgacagtcagtgccagagctttggggtcacacacgcctgcaccatccttggggtgggttgctttttcatctacaaaatgggagtgataatagtgaagaagacgtaaaacactaagcaacaggagatgcccagtatggtttcctgcccctgccctaggagtacagggttttattcttttcccttctcctcccccaccttgttgaccttccctgtggcttaaggcttttgtctcaaagaggagaagcctctggctggggtttcccctccttttcacagtgctggctgctcccttcctcctttagggttgttgctgttctgcctgctgtgtggctgtgcaccgctaggcctgcactactgggaaagtttcttaggtcccagccctgcccccagcttctttgtgagtgccatggagagcagcctactggtggctgccaaatccctttgtgtctgcagttccaaggggtttatgctctcatggtagcccacagttgacatttgacaatttgctaaaactattatctgaggttttattgtttaattattattattattattattactattattattattttgagacggagtctcactctgtcacccaggctggagtatagtgacacagtctcggctcactgcagcctcaacagcccaggctcaagcaatcctcctacctcagcctcctgagtagctgggaccacagggaacacaccaccacacccagctaattttctgtgttttgaatggagatggggtttcaccatgttgcccagtctggtctcaaactcctgagcttaggtgattctcccaccttggcctcccaaagtgctaagaatacaggcgtgagccagcatgcccagcctgagtttttcctgctgctttgtataaatggcttcattttcctcccctaccctgcctcagatgatagtccattgctggcctctcaccctttctgggtggatagaacactctccctccctagatttcaggctacttggttttcctgcaaccccaggtatatgatgggctcaagaaaagttatggcgtgaaagattgtttgtctctctcttattattaggttgggagtgacactcgacatctttccagctggaagccagaagtccaattgttaatattataaaaacactgtaaatatactgcaatagcatgagatgtactcagccagcaaattctatatggtccaggcaaagggagttgctagaacattatagttagttccttgaattgcactattgtcttaaatccatccttgatattggatgttgtgtttataattcccacattaattgaattgaaatatatttcattaatagaaattcaattaagactaatttttttataattcagttaatgattacagattaaagaaaaaatatggcaactgggcatggtggcctgtagtcccagctatcgggaggctgagacaggaagatccctggatcccagttcatgatcagcttgaataacacatagaccccttctcaaaaaactaaaatagctaaagtttactggtataatatggaaatcttgatagtaaaaaataactttttaaaacatttactgaatttttttgtgattacaaaaataacatactctctttgtataaaactttagaaatacaaaaaaagtaaaataaaaattacctagaaacactaccacataaagatcatcattttttggtaccttttcttctgattttttaaatttttcttacaaaattaactctgagtatattataagcatttcctttgttactacaaaatttttaaactacaatatttaatgcctacataatatacagtcatatgaatgtactattattcattcgacttttctcatcttgttaatcgaattgtttccaatgctgtgctgtgtttaaagagctttgtttctaatggcataaaaatatgtttagtgaatgaggttgtgtttgaatttttgcatgtttatcaacattatattcgatgagatttctaaaattccatgggttttaatggcatagtcatgtaatatttgtgttggagtcattgtgggtataaagtgccagcttcttcattagggctgttgctcttctaccggccacttggctgtgcatacccagaacactcattctcactgatttgatatgttagagtcccccatgtgagaataatctcagtaggaaaaaaaagggaaaaagcaagttttactagttattgttttaggaagacctcagagtgagagagaagtgattcaggccaggcctcaaagagggcagcaggctgagggggccccactgtccagacaggtctccagacacagggctaaacagcagtttcttccattcactctgagatgatcatcttcagggagctgattgtggttcctcaattcttaagaggcttgctgataaaccagaattttaacttacaaagacattatttttgtgaacgcaagaagcagaaactaagggtgcacctttgactcttctgcccctgtagcccagggcaaccagatgagttttagcagttggaggaagagtagaagtgggtggctctaatctggaagaacatttagggaaatgcagaaacaccaaagtaggcagcatgctgttccttccagagagatgttctgcccttttctaggagagttggatgagcaagagtaccagaagcagcacaggcttctgggagcctgcagggttctgccactctctactctagcccccatctgccagcccttctccccctactccaaagagatgtgagctgcctgccacactcttctaacagcacatttgccaaacctgggttttagctgttcattttcatgtttccagggctggttatttacttaagagagttctttcacctttattgttactcagaagataatatttgtcacattttcccaaggcttaagtttttgcaccagagtgaaagatgggaacctccatagtatagtggaaagaatcagattgacctgggtttttctttaacttcttccagaaatgggctatgcgacaagttacatagcctccttagaatgtgaagttttgtatttgaaaatgggaatgctgccaactggaaaagtacccaatcttgttgatttccctcaaccacgaatttcattctgcatatactatcaagatgctccttcgggcaatatcttagtgcagggattttggtattccttagtaaacaataaaagatgtgcatgttacttttttttttttttgagacagagtctcactctgtcgcccaggctggagtgcagtggcacgatctcggctcactgcaacctcctgccgcctcctggcttcaagtgattctcctgcctcagccacctgagtagctgggattacaggcatgcgccaccatgcccagctaatttttgtgtttttagtagagacagattccaccatgttggtcaggctgaactcctgacctcgtgatcctcccacctcggccccgcaaagtgctgggattacagacatgagccaccgtgcctggtcgcgtgttacattttgtcaattattcataattaccttgaatatctgaagagaaagttagccaagtggatgttttctgactcttgcccacttttattaatggttctttaaagaagctcttactgacaaagccagtccccaaaaaaggggggtctttccctgattggtgctgtgaagccaatacacaaaaccaaaagtgagcaccaagcagtacaggctttattcgatggccatggaattgagaagtggaagcgtggttcacaaatcagctcctcagttcgagagagtggggaagtcacagatacagggcatcttcaatgaaggggttggggcattaaaagcaagggaaggaatagtcatgtcttttctggagatggtggggggaacttctcaaagtagaatgccacttttctttttgtccttttatggtttcttctcattgttgtcatggtgattatcaactgtcagggtgctggtggaagtgtccttttgcatgagagttagatgataatgaagttagaaactcttcagaggccaagtgagcggccaccctggatcccagcagtcggagccagtttagtcaggagggggaacttctgacctcaggcatcgtatttcccaaaggtaagcagagttaaggtaggatagaaattcacttggtcatgtaggcgatttccggggtaacacaaccttcatctaagccccagaattttatctcaatagagaaaatgccagccaggcgcggtggctcacgcctgtaatcctagcactttgggaggttgaggagggtggatcatctgaggtcgggagttcgagaccagcctgaccaatatggagaaaccccatgtctactaaaaatacaaaattagctgggcttggtggtgcatgcctgtaatcctagctactcaggaggctgaggcaggagaattgcttgaaccctcgaggtggaggttgctgtgagctgagatcgcgccattgcactccagcctggtgctggaaaaaaaaatagaagaagaaaatgccaatttgtagcactatttattgttatttttaattattttgagttgtctgctatattttacattctgtaagatttcctgttcgctagcaaaatcctaagggctacccagccttacacttggttactataccttctgcaaattgcattgtgtcataagcaggttggccatcaggccctgaggctggaccacatgggttcggtgcacatgacttcctgttctggtggatgtgccaaccatagtctccacactctcccttgaaggacacctgcaaaacaagacccggagttctgtacttagttaatatgtttgggcctatactttatttctggtaatatacacctcatgttacagataacctgttagaggtcgggaaggttgagatttggagtctgggatgtctgttggattgtttgataaccagttacgaaggctttagggcacactctgagctgcttgctcagaaattctgagcttaagtatatggcattgagatacaatgtttaaataaagagtttgtatcctaagtcacttgagatctttttttctttatagtaatacttgtatattctaaagtgctgatgagcttgtaaacaatgtggtaaaactttatagatcaagttatcttaccactttcgaattcagttttaataaccagcatccatttatgtaacatatatttatgatgttttagtggaaaatgaaacaaataaaatgaagcatggttttccaaccccctttgtaatttcaatcttgaggtttggaaattgttttcttttttggctgttgaatttttagaagagaaattaggaatttgaagattttttggaattcttttatttttccttaacgagcagcatatttgacctgctaagtatagttcttgtatttctgtaagtgcaataaaagatgaaaggacttccagtttgtttttacgtgtaaaagtattaagagactgtctttttattaccttcccacatatttggtgattacattttatctgaaatctagatacacaggttctgtacaggcaactccacactcttcctgtgggttgacctagaaaataaaacaacagcaagaacaaggctctttgttgacaccatcctgctacccttccctccagcccagcctccctgtcgcagagctgacattgagccctgtgttatttatggaatatggaggttcaatccctggactgaggcttgacttgacaaatgttacttccttgggtcaagaggaatctctggtcctctgaaggcttttagcctttattttgagagtgcaaaatgatagctgcagtagaaagtaaagctcagctcagtaacccccaaaatgtgctaaatcattatgaaatgtgtaacaattcacagccatctgtatattcctgcttttgcaccccccgtatgcaaggggattatttcagatttctgttatatactgtgatttagctgcatgctttagaacaacataaacatagtctttattataacagacaactaaaaatggaatactagtatttcctagattgtaattaaagaaaatgtaggtaacagaaagcccaaaggctggatctagagctccagtgtgtttctccagcccaaagaaagtgaggttgtttgtgtgaacaggaccccaaaagccatcacatggttcttttgctccatggaagctggaaagggctggctggatccagttctgagccttgctctcatctacaatgccggagctgtcctctaagaaagctctctgtttgcatctgtcctcagcaacccggcactcaagacgctgttgaaagtagaagcagagaatcttggattcgcagggaccttacatggggtcagccagtccaccctctgcaggctctgaactccttctgcaaaggccttagtaagtggccgtgcagagcctccagagacagcgaatctactccctctccaccagcttggttgtcttgagaccactgatgctgatgctgcctgcttgttgccctgtactcctgtgtgactgctttgtgactgctgtgtcttccatggccttggatgctccataagaatgagaatcaattccaattgatttctctcggtgctggacaaatgggcaggtgcttgagcctgtaagttgtagtgaaacccttcgttaccacgtgaaggcatgccaggcaaagctggaaatcagaaagttcagattggagtgatgctttgctgacatgtctgggccacactgtggtgtgtgctctggcatccttgcagcttgttccactcgcctcgtttgtgacactctctcttgctgccacactgggcctgcctctccttctccgtcattatcctccccgatttgcctcttctcagcagacgtgggctgtgaatcttaatatccactccatttattataaaatgtgtctaacataagcgcaaggggcaccaagggtggatttttaagagctatgggatgagcagtgtctttggacttggagagggtgtgtggcctccactgtggctgttccaagcttccaagggttttgactgcattccagatacatgagggcatcagagtaagtgatttctggattaatgaggttggctcatagaattcttttgatggaatgtaccttttttactttcaagttgatgcagtaatgctagtaaggtacttctgaggaggatcctgcaggacatattttgacgatgagttagtatgtccttgaaattagtaccatgcatttctacaaaattagtgttctagtgctcttttttcctaaagtgatttaactaatatgcttattattaatttacatagtaaagcttccaaaggtacatccacataaacttaaactcagtagaagccaaattcatagaaacctaaaattatgcatcagaagatgtttggggatttttttaaaaaaacaaattacagtgccaaaaaagctccaaacagagcctgtatcacagaggagagaaagacaggaataggcatgttgagaccaatagaaaaaggaggctttgctagaaaacagtggtttcttaattagagagccacatgtaggagaatggcttagggattctgggtgcctgagaccgtatcggtcaaggccccttcaccacagagatactcagagggagcctctgtgaggtgggctaaggggccctgctgagaccagctaatggggggagtgggttgggcagcagccaggttctttcctggggaggcatttagaggcttaaaccacataataatagtccacccactgaggaagttgccaagcctgaacttgctaggtctttttatttacttgaagaaatttcttcagccctaaacgtacaaagcacaactcgtgatgccataccttctccttcaacctccaaccgtgtagttgagaaaaatacactggaatgtagtctattcctacagaatagaagcagagaagcaatcgtgggcctcaagttatgagggcagatactctccgaagagttcccagcactctaaagtactcagctccctgtgtggggaggaggttacctccagaatggcagcccagggcatgacttgccctcatcgcaatggttggggcggaggcggggcttggctttgctgggggctactacgaggtaagaaagggaggctgggggctgggagggctcacttcacacagcatagagggatggattcagaggacgggctggcctacccttcacacatatgctgactgaacagctcatgggtcagataaagcctcttcgctgctgtgaagcttacattcttagaggcaacagaggcatatagtaggtgaacaagcgtctgtagcaatttcaggtcatgataaaggacgtggatagaaaaggccgagtgtagtggctcatgcctgaaatcctagcactttgggaggccgaggtgagaggtttgctggatcccaggagtttaagaccagtctgggcaacatagagagacactatctctacaaaaaaaatttaaagaaaattaaccagatgtggtggcatgtacctatagtccagttactcgagaggctgaggtgggaggatgacttcagcccaggagtttgaggctgcagtgagctgtgcttacaccaccacactccagcctgggtgacagaatgagaccctgtctcaaatgaaacaaggtggctgggcacgatggctcatgcctgtaatcccagcactttgagaggccgaggcaggcagatcacctgaagtcaggagttcaggactagcctggccaacatggcgaaacaccttttctacttaaaatacaaaaatcagccaggcatggtggtgcgcacctgtagtcccagctattcaggaggctgaggcaggagaatcacttgaacctgggaggtggaggttgcagtgagctgagattgcaccacttgcctccagcctgggcaacagaacaagactccatctcaaaaaaaataaataaatcagggtgatgtgttagtgaccaaggggctcctttaagtaaaagagtcaggaaggcattttctataatgagaatttctctgatctgaaggatgaggtcagtcctgtgatgactggttccaggtggctttcaggcagaaggaataaccagtgagaagacgctgaatcatggatgaactctgctgtgtgaaaaacgctcacacaactgtagagcttagcatgtgaagcgcactgggccggagagggggtgtcaagaaaggagatcagagggcttggcggaggccagcacagaaagcctgctgggacaggcagcaccctgagcatgatggggagtgattgaggcttgagagaaggagggtgcagtgttcactctggctgcggtttggagaatggacttcagaaggaccaggccagagcacttaggctcttccagcactggtgggtggatttgctgtggagatggggtgagggaagtgcaggcaaacccttcccagtgcttagggtggtggggctttgtcctaaggtgggggctttggagggagcaggctgggagtggtaggtggaagggggtaagcatgaatgaaaattgagagttctgttttggccacagtgaatctgttagcatctgagtggagatgtcaggagattatatgatgcctgctcaggagtttggtcaggcctggagtgcaatatttagcatctgatcttagatggactttcaaaccagggcactggatgaactcacctagagagtgtggaaagagagaggaggagagtaaagaggagtgaactcagaggtcttcccacactgagagactgagcacccaaaaagaaccaatgaaaaaggagccactcaggagactttggttgcccagaggcagaggaagttgtttttggagagagcagttagttgtcacatggtgctgagagttgagcaaaaatgggcagagaagtaaccactggatttgataccatggaggccactggacaagtaatcccagtggtggtgatggaagtcctatcatattggggtgatgagtcagtgggaagttaggaggtggagccaggggctgtagcacctctttgaagaagtttcctcatataggggagctgagcacctgggcactggctggagagagatgtggaattgaggaaaagacaaatggtgtgcttggtaggtatgacagcagaggagagggaagcaagggggtaaaggggttgcatgaatgtggatgaatgacttggggtgagtggtgtttttaagctattccctgtggactgcacaacacagtcccctctttgggatcccccaaatttacctataaattctacccatgtcccctaacactgtgatgtgggcagatgtgtctgagaggcacagaatcttccttgggctgcagaacacaggaagtagctggagctgatttgctacaaccagtgatacaggctcaaggggtgggcgagaggtcatggattgattgacctggtcactgactgatttattcagtcaacaaacaccttccagctccctctgtgccaagtgccattccaggccctgcagccacagtgcaaataagccccctcaaagcgcattttgcccatagcgggatggggccactgacaagccagcagcttggggtggaatgtacagcccgaggcaaccttgctgtttctcggctgcacagtttgaatccatttgcaggaggtgtatgagttcctttaggaggaggcttttggaaggaagtggagtcaagggcaaaattgtgggcaagtccctgcagcagcacctaaggggccccggaggctgacccagagaccccaaggctgccgcagccccagggctggtaaagctggggttagaaatctgtggcagcttcagttgggaggtttggggttttctgtaggtgaataacctgtgacctccccgagggtgcatactgagggagggcttctgcctgtgtgagggaaggcctctgggcttcatgtggctcctggcaaatgctgagccctggatccagggagtaggggttctatggctccaggcggccttctctgcttggctttaagaatggggtacttggttccggttcccttccacctaagctggctgttgtgactttggatgacttgtttaacctgctgtttctgcttcttcacgagaaaaataagaatggtgcttatgtctacctcacagtgttatagttggggtaaaacgaagacgtaatcgattcagcacatactcgtgtttgagagttgccaggtgtgagttctggagccatgcgtcctgggttcatgtcctggtgctgttttttactgcgtgactgcaggcagggaactttgtacctcagtttcctcatctgcacaatggggatggtactaacacctgccttctgaggtgtctaatgagggattgtgaggatctgtgaaggaatctgtgtaattgctgagagcgtctcatctaggaagtgctgggtgcccgctgcggttaggaagatgctctctggtgcacagggccttgttggcagtgatgtgatggttttatctcttctgccagttccgcctggtggtgaagacagccctgaagctgctgctcgtctttgtagagtactcggagtccaacgcacctctcctaattcaggctgtcactgctgttgacacgaaaagaggtgagtagtccctgcccccttatgtcatgaaggtgaaggtgtctaatgtagggaggcttctgtgttgtacatgcttgagacagatataagaattaacagaattcccgagatgtggacttcccactgcaagaaacgttttttaggatagtaagcacacaaagcttagggccggaatggggtttgataatgaaagaaaagtgctcatgagcttacctgggagaggtcagatcctgagcttgtctttgcctctacccagctcctgccactgaaacacagaagtctagctcctcctcctgttcttcctgtcttgttcagggtttccctggctccttcctcccctcccctctacgcttcattgcttatgacccccagatgtttctagaaccttctcccttcctctcctccatcccctgccctgccttactcaggccctcactaggtttaacctatgctcctggccaccctcccaaacagttcggtcacatccaaaacctgccagtggcttcccagtgcttatagcataaagtcagtcccctggctaaggggacccttcacccttcaactcctgcccagctgccacccccttctcccacctcggctgtacccccacccccttaccttgggcatgtgcttttaaagcccatgtatgcacctcttctctgctgtggtggtgttgcccatccctgtctctccaagtcggggttgcctgctcaaggatggagtctctgtctcccagagtgatgtcccagcactccagctggcccagagccagcaggcatgctgcaaacacgtggcgaagaacgagcttctgctctggtttactgtgtaacgtgctgtggaccccgtgatattgggaagcctggaattaaaatgcttcccaattaaaatgatttttctccttttgtcttttgttgtttgttttcttccccagtaggactcaggtattattatcatcatccccacaaagactcaagaacaaaaacttgacaatactttttctttttatgattataactgtaatactactgttacaatcataaaaacttgggaaaagtttaaagaagacaataaaaattcacctctagtttcaacaaagataatcactgttaacctgttggtatatttccttatagttgtgtgtgtgtgtgcgtgcacactatgcataaaccagccaggatgtgtcgggaagaaacgaggggcctaaattgcacttttgattcaaaccatttgtgtctgtgatttttttttgtttttgttttttgtcttttgtttttgagacggagtcttgctccgtcgcccaggctggagtgcagtggcgcgatctcggctcactgcaagctccacctcgtgggttcacgccattctcctgcctcagcctcccgagtggctgggactacaggtgcccaccaccatgcccagctaattttttttttttttttttttttttttttagtatttttagtagagacagggtatcaccgtgttagccagcacggtctcaatctcctgaccttgtgatccacctgcctcggcctcccaaagtgctgggattacaggcgtgagccagcgtgcccagccagttgtgtctgtgatttagcattactcagacccacctttgaatgctgaatccaaatgtgaaagaaagtagcttgagttattttagaagtttaaatgaaagttaatgaaaagcatccaggacctttaactggggctcctatacccttgaacatgcagatagatgtcggcactagacatggctgatggcaggcaaggaggcaactcgaggtctctttgttgggggtgtgttagggaggcaaactctagtacatggacgggggctgtgagtctggaaggtgtttcccaggctgaggcaagtttcttctgccacaaaatgttgccctctgctgctaggtagaaagacccttatggccaagagtagatcatggggccggcccagaatccttgataaggaatgccaatttcacagaaaccaggtctagcatttccaaggccagtcaattaggtataaggtcagcagtgtgtgttttggcagctggtaggcagcagcttctctccttcatccttggaggatttgtgtttcatctcctaactctggcggttgcttgaggacaactaacaaactcttcatcttactgtcctaagcttcaggtaaccccagggcccttgctatgggtgtgggttataggggccaacgtctcatgacctgggttctcctttggctttgctgagcttccagctcggagttcccttccttgaacttcatatcccataaagggaatgttgtgatggatgagggcatgatcctgaaatgaacccaggcctttgtgtatcatatccaagactccatccatagccccagccagagattctcgtctgtcagaccaagtctctccatcaagataaaacaatggccatcttttcctgattagtaaaaataataataataataataaaaacagctaatgaattgtcttcttagctttattgtttttgtttttgttttgttttgttttgtttttgagatggagtctcactctgttgcccaggctagagtgcagtgtcacgatctcagctcactgcaagctctgcctctcgggttcacgccattctcctgcctcagcctcccgagtagttgggactacaggtgcccaccaccatgcccggctaattttttgtatttttagtagagatgggctttcaccgttttagccaggatagtctcaatctcctgacctcgtgatccacccgccttggcctcccagagtgctgggattacaggcgtgagccactgtgcctggacagctttatagtttttgtctatacaatttcttaaacctttggcaactgctgttgtctgtctgctgctgagcactagcagctgaaaaaaaaaaaaaaaggaatggcactaatgaaaaaactcagaaatagcttatcatgtgtggctcaatagcatgtttctttatggacatgtgtggtcttggctgtgattttataatgcatacatataacgtcatcctattttactgctagtagaattgttcctgaatcctatgatggaattaaacatataaatatgccatggtattctgcagagagcaacattacttccaggtgtgtttccatctagtgggtttagaagcagctctccggttccctctcaactgggtgagagagcagacaggtgccagaggtgatttagggtaaactgagcatatccatttgtccacaagtttgtaaatcataaattttacttctcaaagtggctttagactcattcctcagcagggatgagtggacatataagcagttgtctttttgaatagtttctttcggataatgaaaactgtcagatttaaggaatcagcaataaaaccaacaaataaactcccagtcctcaaaaatcattactacctaaagcaaatgaagttgtccagaacaaattcctttggttgcattataaatataaacatcatgcatgctgcacgtgggctaaccagaaggcttcattctgcagtgtgggcaatttggtctggggccaagagtgggccagttagcagggataaaagccaaaggggttaaagtccagcgtaaggagtgatcagtgtttatgaagaaggaaatttgtttttaaatttttttttttttagacggagtcttgctgtgtcgcccaggctggagtgcagtggcgcaatcttggctcactgcaagctccacctctgcgttacgccattcttctgcctcagcctcccgagtagttgcactacaggcacccgccacctcacctggctaattttttgtatttttagtagagactgggtttcactgtgttagccaggatggtctccatctcctgacctcatgatccacccgcctcggcctcccaaagtgctgggattacaggcgtgagccaccgcgcctggccaaagaaggaaaatttaaaatgttccatttgacccaggctattgcacttttgctcagggcctgagataaaaaggtggattcaggttcatctgtggggcatggtatggtattaatatcagaccactggatcatcttctctttgcttgcaccttgaagtcactttctctttctggtggccagggcctggcaggaagagagaaaggctcatgggagcccttagagagccttgctttgtcattttgccatattggagactccctttccttaaggtcttccctgtggtggttgacaggaaattgattgacacccctctgctgtctgggtatggggtccttccttttgagtgaacaggtttgcctctcccacagagggtgaggcaagtgaccagagaggataactcatgttgaaatttgtcctaaatctcaggtcccactaatctggctcagcagagcttttgaagtagttcaatttttcatttgataattcttaaacataagaattcctgctatcacgcatgattagcaggaaaaaaattcagccatcctttcaagcgatcccatctctactttctgcttaagagtatatctatctgtgaagatcgtgtaaagtgtagtggaagctacaggttgacagaactcaaactctctttccactgttatttatagcagaagcatccacattgagtgtgtttatgtagtatgtgaaaagacatggaacatgctgtgaggagcttctgttttcgtgttagaccaacccatgtctgaggcactgagctaaataccttattttccttcagatttaatgtggagatttaggaaagtaagaggggagaagtattgagcaattgattctgtgtgtatttatttatctgggttaagagaggactggccggggagtcagtgcaggtggtccacctgggggtaaactgggtatctccaccaaccaccaccattacaattacagctactgatatttgagtatctatcatgtaacagacacaactgtaaacattcttcacataggacccatttattcagcacatatttgagtatcaattgtgtgcttgcagtcatcaggaaaaaaggctctcacagaacctgtactccagtgtttggggtgggggtggggggcagtggagttggagagagacagatgacaatgattaagtattgtcttctaatgtactccagcagcgctaaggaaaaaagacaaagtgctttatctcaatgacaattctcagtaatcctgtaaggtaggtacagtcatcccagaggccttaggagctccagatgagcttcctgagcccctccatcccactcctttgggatccagtttctttctctgttatgtgaagggctagcattatatggtttatgattccagtacaggaaccctctcctctgcaacacacacacacacacacacacacacacacacacacatatgcacacatacacacacacattgtggggagttaacaaaggcaatgaggagagtgagtggaccccataattctgacaggagctcctaggaaatgtgcaagtgctggtgttgaacacaggcctagcctgaggcctgccaaggctatttttgttgaaccaaatgtttcttcccttttaccttcattgtaaatatttccgattttctgccccaaaacaataaaaagaatgaacatccatcctaagagtgtacaaatatatgcacatttccagacttaaaatccttagatggtaataagagactcagataacacagctaaaaacacgtttttcagttaaattaagccagtgtttgagtgttcttattataaaggattagatgcacacatgtgcatgtgtctgtttaaggggagtaccaatgtagtctggctacctttccctctctctctgggctgcctgccattgttccttggcctttgctccctgaggacctgtttcgcatctttggctccagagtaagcaaccaaaagtagttctgggtccattagcaccactagaaagtcttagtttcgatactttctcccctgcacattcttcctttgagccatgcatgggtaactcactacaacatgtgttctatgccaaggttttatacaaaatgtgaatgttagaagctgcccctgttacaaacacaaatggcggcatccagatatcttaaactggacagtgagacccaaggcctgctgatcagattgattgactgtcttgagagctgagatggttactttgcagtggttggaagaacaactacaccgtggtgtggacttcaaagtagtttgatgatcaatatcagcaaggagataattcagtagtcagcaggtgaaaggagaaagaacatgtctttgtgctcagttagcaagggtcatagaagattgcccagttctgactggctgggcaacttagccaaagcaaaaggctttctattcacttaggaaagccaggagatctccatattgagctacatttgtgccttttacgtcttgtagtaagtaggtacctattctttgtttaatcctcttaaacaaatccccttaaatcctgtcttctctgcttttcttactgtgtgcatctgcttcctggttcttttaaaattgcttcagcttaacccacttcctgccttctcagagatctccattcactattcagcagacattttactgagcatgtactatatgccaggcactgtcctaagggcatggagatcaacaagacagatactatcatggtccttgggaaacttttgttctcaaggccaaaatcagctctgacatagcccatccaaggaccagcatttggaaactactgtatttaggttatttccaagtttacttttctcaagtaaaaataagcaatatccctttgagatctttatagagaaagcacgaaagagcttcatgtcgcaaaccaccaagccaagagcaaggcaattcttatttcacttcacttcaaatattcatcttgggcctagaaaaccatgtcaaggtgttatgtgcctctttttggtcttgcccttggcttagtggtcctgaatgtgaatgcggagtatctcctgtccctcctagatcctggaaataaccacccataagccttcgcctgcagagcccaggcagcagtcatctcttgtgccaagtcccctgcagtcatccctgctgcaagagacctcacttgcacagtgacaggcttagctgcatgcttggacacttctcagccattgctctgtactggtgtctgttcttgggcttatgcctagctgctccattagattataaacctattgagggcagctgcccagtagaccttgtacctagctgatacttaatagtatttgtgccttgatggagtagatgtaatatacttccgttcttgagatatttgctagacaggcatgtcacttatttctttgagtcactgctagagggatgttaagatcttccacatccccttttcttctgtgctaatggatattcttagagtacttaccaagagttttctaatctgtaggcctacagagttgcaatgattggatttttaaaaattacatatttaatatgaagaaattttcaagcaagtaagcatccagacactgaagcgtacacaatgctcttgccaaaaggacaaagatgatgtgagatagggttccctactaagaaatatcctcaattagaagcatgctcaaatccatcctaaggataatgtcacactttgaaatttggtgactgaaagacgctgccatcactggatacgtccttggataataaactgtgatgtgagttagataaagaatgttgatgaattgctgtttctaatgatttttgctttactcataggggtcaaaccttggtcaaatatcatggaaatcctggaggaaaaagatggagttgatacggagctactggtttatgcaatgactttggtgaacaaggttggttgactatgttatgggttgaattgcgtcacctaaaaagatatgttaaagccctgacccctggtatctgtgcttgtgggcttatttggaaatagtgtcgtagcagatataatctggttgtgagggtgggctctgatgcagcatgactgtgttcttataagaggaaaagagacacagagggaagacgatgtgaacatgcaaagaagacagccacaagaggacaggcagaggtcagaataatgcatctacaagccagggaacgccacagattgttggctgccaattgaggatgaggcaaagacagacttcctgtagagccttcagggaaagcatggccctgctgacaccttaatatcagacttctagtctttcaaactgagacagaataagtttctgttattttaagccacctagtttgtggtactttcttatagtagccatagggaactaatacattgtgaaaatctaaaattttccctctgaataagagccacaccatgtgtacacccatcacagtggctggaaccacagctgcagtgtgcagtacgggagaaaatcctttatgcgacacgtggagtggatgcgtgcaggtgtgtgtgcttgtgaaggcctgtgggtgcctgcgtgtgttcatgctttggtcttttctagtaaatccaggaaagtgacagtgagaattttatgactgcttttcctatcaagttggccccttaaaataataataataataatatattattattattatttgaggcagagtctcactctgttgcccaggctggagtgcagtggcacgatctcggctcactgcagcctccacctcccaggttcaagagatcctcctgccttagcccctctagtagctgggattacaggcacgtgccaccatgcctggctaatttttgtatttttagtagagtcggggtttagccatattggccaggctggtcttgaactcttgcccgcatgtggtccacccgttttggcctcccaaagtgctgggattacaggcgtgagccactgtgcctggccaaaattattttttaaaatcatttttccttgagggaatataaattatgaagttttactctaagaaaattgttcacatgtcaggaagacacgaggtgcacgtgttccactgcatattgaagttggactcttgggctgagataaggaatcctgggggtaggtcccacttgtctcacgtgatggtgaccacacctcttgctgtcattcctcctgttgcgtccctccctgatcaccaccttgtagggcagtcttggtccttggtgctcttcctcagaggtgctgctctgaaacaagggggcccatgctgacccagaacaggcccagtctcaggtctggagtttctccatttggatcgacatgccttagagcacaggcacctcgccagccaccccatgggccttccttgtactctccttacacgctcatgctgggtgtgagcctgcaggaccatctgcagtgatggttagggcttcagaaagatccagagtccattcctgaaatacagctggagaaacattttccctgatgaagtggggataagtttgtagaaagcagtataattatgaagagcaccttctcctactagagagtaaaatgtgcagactctgaggattacaacaatgtagtgtggccccttcctcagcagacagatgattggtgcagaggagctctgaaacagacctcagtgtatagaacaactcactgtacagttagttaacattggtggggacgggttaggtactgattggagaggtgttgttaaatggaagtaaacaaaaacatactttaaccatacaccacagtaagccccaaggagcttaaagcatttaatggaacatagcaaactgtaggaagaaaaaaaagagagagagagatgaagactaattagtctgtggttggtaacgtttattttaaaaataaaaccagtgaaacaggttccagaggaagagatttaactattttactgcataaaattttaaaagatcttatttacaaaatgaaaatcacaaattataactaaatgcaaatgacaaactaggaaattgtttacaaaaagaaaggtagaaaatgatgttatcctaaatatattatgaattcagtagaaaaatgaaagacattaaaccaactaagaacaaaagaaatacatatgaaaacaacaagacatgtttcccaggtcacattggcaatgattgccttttaatgaagtatcatttcttgatgaacacccaggaaactcctataaccctggtgggaaatgggcacaacttttctgaaacataatcctaagaattctgcttttattttcaaatctttttgtgagctcattttaccatttgatttgaagcaattttctgttggtttctaaggattaaagtcatctatttcctgtcctttttagtcactgccattgttttggaaaacaccgaattcagcaaaaatggaattttcacactgccacagtgttccccattgtaacattacctattttattgataaggccattcccagctattcttatgatcatagcagtacccacacaatgtggtactttgttgctaatcactggcagagacccagtgcctgtcaccctctgtttggcattctgtggcatttgatgtccaggaatccctcacttactctttctcttctggcagttctttctcatcctttgttagttctggccaaggagacatccagaaagatccttgaggtcattcattcaaatgtaatcctttccttaactcatttatgcctagtgttccgttattggaacgctaagcttgtgtgagttatttatatcctgcttctcaaggtcatcaccaaggtataatttttcacacacaaaaaaaaaaatttgcaacctccggcataaatgcgttaaacaagtcatgccgggtttgttttgttttgttgtattgtagtaatgcatgttgcccaatgagtaaactcctctgagataccaaacaaaataacaaattaaaatgttaatctgggtctggaaaacattcagactgtgaaatctgggaaattatattgcaagttgggtggtttctaagtattgatatcaacaaaataaaggcccctaataacatggaatttttaaaaatggacatttccatgacaaacaaaacaatgacactaagtcctatcctggtaactgttctaaaactgattgccttgtaaaataggagaaagcacactggggtgggaggtacaatgagtaacaagaggggttaccgtgaggctggcttagggtgttcagggaaagcaggaccccaggaagccatggggagaggagttgttcagtggggctaggggataactaacctggatggtacatgctgagtagttgcctttgtttttacatttacttttattgttttaaaattattgtcttagtccattttgtgttgctgtaactgaataccacagactgggtaatttataaagaaatcaatttctcacagttttggaggctgggaggttcaatatcaaagtatcaaggtactggcatcttgtgaggacctttttgccatgccatccatggtagagggcaagggggttgtaggggaagagaggagaagggggtgaaacttacgctctgttgggaacctattccttcagtaagtaacccactcctgagataatggcattcatccgatttacctcctttcaacactgttgctttggggattatgtttctaacgcatgaactttggggggcatattaaaaccatagcattctgccccctgtccccaaaattcatgtcctcctcatgtgcaagatatatccattccatcccattagccccaaagtcttaatgaattccagtacagactcaaagtcccaaatccagagtctcatctgaatcaggtataggtaagactcaaggcatgattcatcctggggcaaatttccctttagctgtgagtctgaaatcaaacaagttacctacttccaaaatacgttggaactggcatagatgttcacattccaaaaggcagaaataggcaagaaggaagggataactagttccaagtccaaagcccaagagaggaaaaaacaatattaaatcttaagacaccagaataatctattttgactccatgtcccacatcctgggcacactggggttggggttgagcccacaaggcctcaggcaaccccatccctatggctttgctgggctcagcccacgcttcagctctcctgggttggagcttatgcctacagctttcgcgggctggattgcacactggtagctctacagttctggggtcttgggggctgcctcactcccgtggctccactaggcattgccctagtagggactttctacagtggcttcaccctgtgacaaatctcttcctgggaccctaggctgtccataaccttcttttagatctaggttgaggtcaccatggctccacggctcttgtattttccacacctgcagaattagtaccatgtgttttatggcttgtaccttccagagcagcaaggcctgcttgagtcacagctggggtggccaaaaaatcctgcaccagaattctgggagcaggatcctgagtggccctgagcagtgaatgctgaggtaccgctggtgcctgtccagaaaccttgccctcaaggtcctagcttgcttagaaggtctttgaaatgcctttggagtttttctcccatcgtcttggtgaataacgctggctcccttctatccatactataatccttttagcaaatggtcacttggtcatgcctttggtttgctttccaaaagatgcttttttactctttacatggccaagctgtgactttttcaaatttttctactctactttccttttaataaactccatctttatatcacttctatcctcttgcatcttcctataagcagttaagagtaactatacaactccttcaatatttttcttagaattttttttcaccaggtatcctagttcattgctcttaaattctgactttcattagagccctaggacattgacatatttcagccaagttcttgccactttaaaacaaagatggtttttattctggtttctaataccttgattctcgtttccatctgagacctcttcagaattggctttaccatttgtatttctaccaaccacttcagcaatctctaagaaggctctgacttttcgtacaactattctcttcttctgagctcccaccagagtcaaccagataatgctctagtcaatctaggctttttctagcttgcttctccaaatttttccagcctctacctgttacccaattccaaagctgctttcacgttttcagttatttgttatagcaacagcccacttctctgtatcaattttatgtctttgttttgtgttgctataacagaataccacaggctgggtaatttataaaggaaataaatttattactcacagttcttgaggctgggagtccaatatcaagatgctggcatctggccaggcccttcttttctgtgctatcccgtagtgggatacacagggtgagggaggttgtagggaagataagatggttgaactcatccatttaccaggaaactactcctacaataattaacccagtcctgagataacagaactaatccattcattacctaatcactgcttaaaggttctcccttccgacactgctgcattggggtttaagtttccaacacatgaactttgggtggggggcacattcaaaccataacaatgcaccttctagaatatagctatatgagttttaacatgtacatggagatggatcaccttcacaattagaatacagactaagaatagcatagtattcccccatgttatccttttatactgacactctgagctcctatatataatcctgagaaaccactgatttattctctgatcactgtaattttgtcttttcaagaatgtcagatggaatcatacagtaagtaaccctttgaggctggcttctgtcagtataatgccttttgagattaatcttttattgcatatattaatatatgcaatatattaattaacccctttccactgctgtgtagtattccttgtagagatgcatatgtgcttacccattcacctgttgaaggagatttgtgtgtttatagcttttggcttccacagatagagctgctatgaacattcatgtactggctttgccacaatggttttatcctacaagaaagacttggtgcaatcaatgaaaacccagggagggggaagaatgtcctttaggacggaatttccccctctgagagagatttgtaaagatttacttgtcacaggccttgtcaagacaaagtctaagaaaaaaacaggaggagggataccaagtgtcaggcagctatgctcggcacctttagtgtctgagggtgaaggcatcaggaaacatttacctcgcagactttcctggggaagctgccatttttgtcagaggtggacaacttagcagcagaggctgcagggtggaactgggaggggaggcccagggacaggtggaagtgtggtagaatttgatgagcctattagagaatcagccaaaaaaaaaaaaagatgaattttttaaaagatgtatagcaccctcttgcacagctggaaaaagaagctgcatttgtgagtggcagaaggccatcatttcccccgcagcctgcataaaaggtgatagtacgcaggcttggctcaagcccatattttcactgcggaaatgacaaatgacctgctgataccctcagttcagggcctattactgagcaaggggcaagagtttcccgagtctttttagttcttttttttttttttttttttgagacagagtcttgctctgtcgcccaggctggagtgcagtgacatgatcttggctcactgcaatctccgtctcccgggttcaagtgattcttgtgcctcagcctcccaagtagctgggattacaagcatgtgccaccacatcctgctaaatttgtgtatttttagtagagactgggtttcgccatgttggccaggctggtcttcagctcctagcctcaagtgatccacctgcctcaaccccccaaaagtgttggagttacaggtatgagccactgtgcctggcccctgcttacttctatagttctaatttttaaattatttaccagtgattccctcaccctttatggttggacttgctaaagcaatggggattaggtttagcagtttaacctcctggaaacttctgagtgaaagaacctcagttgactcccagaaaggtgaaaggggaagaagaaggtgggggaacgaggtgaagagactaccagcggcctctctctgtgcctggggctggcccccacgctgctgtgtaggaagttttaattctgatgctagatgtcccttcacctgcattcctcaggctgtgcattttgcagagtcagctggcagttagggcatctctaattgttcaccctgcctgggcctggtattgtcatttccctctcatcttttaataagttctagagttttcactaaaagcaaaggatgataggattctttgaatgatgtgcaatttttcaatcaatgttggaagcagaaggcagccctgatgaccgttattgcctgtcagtgcgatgtggttagcctggttcctgtagacactggtgtgtgctgtcatacgtggcgtggcggcccaagtgtgaacacctatttatgatggcttcagattcacagcttcctgccttgtgtccttatcggggccttgaataattaggctatcacattacaattagttttcattagtttctgatctcaatagcagtgactggtgtcctctttgctcagcttaaaaaggaaaacgccattattcgagttatgaatagaggccttctttccaacactgatagccccaagatagaagtgttagagaagctggtgctatgaaatgatctttacagaagtgttggtcttattccttcctaggcaagttatcatgtttagaataattttggaatgtgtgtcttgttcttagaaatgcaaagatagtgaagtaagtagggactaaaggctgagactggaatggcagctctgagcccaggcttttatcccagtgtcttcagtcgcttcctgttgcctcaggcgtttatccttctctccctcctgtataagataaagggcttgcagtaaatctcaggctccttccatctgtgagccagggccttgtctcagataccctccttctcttaagagaggtagaattcaaagagaagtcagctttttctttcttggttctctttttgtctcttaattgctgccttgaaatttctcaagtttttctaaatttcatagaccacggggaggccctattgaatttaaatacagtttaataaaattaaattgttacaactccagttgttggtgtatggatcttaacaggagtttctaattacaaagtaggttagttttctattgccacgtaacaaattactgcaaacttagcagcttcagacaacatccatgtatcatctcacagcttccgtggggcagggagtccaggcatggccttagtaggtcctctgcccagggtctcacaaggctgcagccgaggtgtcgcccaggactgaagtctcatctgagacttggggtcctcttccaggcctatgtagttggcagaattcatttccttgcttctgtgaaagttgtggttgctcctgcctcgaggccagtgggataatctctttccagtccagctcagagaagagctaagccttcttttaaagggcctacctgattatcacctaggagagtcaccccttcgattaactcaaaatcaactgcttttggaccttcattacatctgcaaaatcccctcacctttgccacctaatgtaacctaatcatgggagtgcccccctctcatgggagtgcccagcccacactcaagccaaggagattatgtagcacttgtacaccagaggggagaatattggggttcattctgcctgccacactgaagaggcttttgctcaaataaatttgtcatctgtctggattgattagtggccatgattataacaatatgcctggattaggcattggaaaatgccctgagagcctcaaggcagtcttctgtggtgtctctgtagctggttcttctcttcttccagacgttatcaggactaccagaccaagacaccttctacgacgtcgtggactgcctggaggagctgggcattgctgctgtgtcccagaggcacttgaacaagaaagggactgacctggacttagtggagcaactcaacatttatgaggtaccagaccatgccttttgtaaggtatcgtacagctttggcaattgtcaaaggctgagatggcgcctactttagaccacgcgtaaagcgtatgagcaccaccagcttattagaaactcagcatcgtaggcttcaccccagacctactgaatcagaaactctgagggcccagcagaccatgttatgacaagccttccaggagagtctgatgcatattcaagctcaagaacccttgatataggggaaattggttagctattttcctttaaagaacatgccgtttgtcagcggcaccttcactcaaggagacggggagagaaagagatagagacagaaatcacatttcttatacctgagtggggtggaacttcaggcagggccagatacatgatttgtagcaaccaatgcaaaacgaaaatgaaggaccatttatggaacactcaagcaaaagtgctgttaaagatactgaaacaactcttcactttcttctgtggtttctcccaccttgttatggtgattttctaatttggtatgtaattgtcgtaaggaaagaaaaattaaaaattaaaatttaaaattattaccatgaattttaccattcatctttatattatgaagtgtcagtttagaatgcaaatataagagcctttaacttgtaggcagaatcagccaaattacctaaatcatattttgtagctcccatatgcacgtgtattttgttcttaccaaaacagcagaaacagtacgaaaccgactgcactgtttttacatcacttcttggggtgtgtgcattctaccaacactctgcctttaacttactaaagagtaagaaagggctgaaagaaaaaggatctaggagctgccctatcttttcctttctttatgttgtcatttcagcataagttgttgtctaacatgggaaggtaacagggtaagaaaggatatgagaagctccatgggttgtcttctgtctgcactcaaatccatcttgaagggaaacatggcccccagggctgtcagtgcccctgcctgcccagttgtaggtgtaacatacttaccttgtactcacttccagtcccgcagaactcctgcctatcaccagtctaccagaatctgtgcacatgagcagcaaggaatggcagacatgcatgttgtacctctctcctctgctggtgcaacagcacaggtcactcacccgtgacgccggttctgctttgggctacatatcagggcttcggaccctgttgacttgagttcagactgttccctgtgggttaattttaggtcaaatgccctcacggtattgaaagtacttaactatgagagtgttgaaatgacactctttcttgctgatcctcatcatcccagtgtcctgccatggccagttaggggcagatctgaagatgtgttttctcttgggtggtatgacctcaaccaggaaagtgaattcctctaggcccaaacttaaagaatacaatgacccaggcaatccctgaggacattccaccagtggcattctgtgtgtatgtcattgcaagagcctttggggcctgtataaccttccacctctggttggttggttgttggttgttttttgagacagtctctctctctgttgcccaggctagagtgtggtggcgcgatctcggctcactgcaacctctgcctcctgggttcaaatgattctccagcctcagctttcccagtagctgggattacaagtgtccaccatcatgaccagctaatttttatattttagtagagacagggtttcaccatatgggcccgattagtcttgaactactgacctcaagcaatccacttgcctcagcctcccaaagtgctgggattacaagtgtgagccactgtgcctgaccctggttgttttttcgttttgttttgccctccacccatccttcacattccacaaaattcaccattttaaagtgtacaatttaatggtttttagcatattcacaaggttgtacaatcatcaccactatcatatttcagattgcttttgtcactcccaaaagaaacccccacacccattagcagacactctacattcttccctgtcccccatggccccaaaccggtaatctactttctctctctatggatttacctgttttggacatttcagacaaatggatccatacaaaatgtggtctttgtggctagctttcacttagcgtgttttcaaggttcacctacgtttgcagaatcactactttgttcatagttgtgctgacagtattctattatatggatacaccatattttgtttatccatttatcagttagtgaatacttgagttatttctaccttttggctattatgaataatgctgttgtgaacatttgtgttgaattgaagtttgtgtacatacgttttcagttctcttgggtttatacctagaagtgaaattgctggtcatatggtaactatctttaactgattgaggaattgctggattggtttctaaaatggctgtcccattttatattcctaccagcactgtataaggattccagttactccacacctttgtcaacgcttattattgtccaccatttttattatagccagctagtaggtgtgaagtggtatcttactgtagttttgacttgcatttccctgttgactaatgatgtttagcctctttctaagtgcatattggctgtctgtatagtttctgtggagaaatatttattccgatcctttgctcattttttaattgattttttttttttttttttttttttttgagatggagctttttctcttgttgcccagactggagtgcaatgatgcaatctcggctcaccgcaacctccacctcccaggttcaagcgattcccctgcctcagccccctgagtagctgggactacaggcatgtgccaccacgcccagctaattttgtgtttttggtagagatggggtttctccatgttggtcaggctggtctcaaactcccgacctcaggtgatccacctgccttggcctcccaaagtgttgggattaagggcatgagccaccgcgcccagccttgatttttttattgttgagttttaggaattatttctatattctggatactagacccttatcagatatataatttgaaaatattttctctcattctatgggttgtatttttccacttctgatataactgatcagtcttattaatagtaatacatttaaaaaatatttcctatttccacttataaagataatatatactcattgatgaaaatttggaaaataacaaaaagcatttttggtatatgaaaaagcataagagaaaaaaaaatcacccatgattttattactaaccatttttaacattttggtctatttttctggtcttttttgtatatgtgggtgtgtgttcatgatgagggacatagtagtctacatatagtgttgcatgttgaatcttattagcaaacatgttggaaacattttcccttgtcattacatgtttaagaatttaatgttttagtacaatattctatctgtgtgtataccataatatatataactagtccctattttttcagatttagattattttcaaagttttcacaattacaaatgctgttatgaggaagatattcattcataaatttttctgcaccgctagatctctagggaagatattttccatttccttatggtcttcactggatagaaatggagagagtgatgtataactcactattttctataagttactgtcataataagtgacaagttgaggaatagaacagaattatctttatatgatcttgggagagaagaaactgggcccaacatatttgctggcagcacttgaagctgccaacagccaccagctggccagctctttgtgccctgctctgggcatcttctcttccagccctgcctcactccctcagttttttattgttactgacctgtggccctgggaggccagtaggtgacaaaggagtatgttctcatggctcctaagatacaagatggagaataaagtaagcatactaaagatggaagaggaagagagctcaagagagttggtttaaataaaggtagaagatggactttttccagcacagatatttccttcccttagccccctcaccaccacgatcggaactccttccatctcttagattctgttcagccaggggctcagatgaccacagatttggattccatagggtcactgtatattcagaggccagcatgatgcggatgaattgcccatcagtgaacaaactgggagagagtagtgaagaatagccttgataccaactccaggaatctaaaaactatcctctgcttcagggcacattttctctccagcctacctgcctcttaagccacctcctcaacttctttcccttcatgccagactttgaagaaattatactgtgttcaccatctttcttttgtcgaattacatgtgcctaatatttgagcatcaagtgtatatcattcacaaatgaagcatatttgtgtcatttaaagagcaataaaacaaataccatgtaccagctttaagaactaaaacattacaactcagaagtgtcctgacagccgcttcattgtcatcctactactcctatccccagtattctcttgctttctttaaaaataatttaacctgaaaaccacttattctgtgagctaacataatcatattactaaatcagaattggctaatcagagatctttcccagttatctggctgtactaataatttcaagaatatagcctatcgaggtgcagatggatcagagagaggtctgggacatcccttgtgactccccaggtccttttttcatgattcagatgtgtgctttctgacccggaacaacagacaaagtctgtaagtgaggttcacaaggtcatctcacccagcaaggagcatttagttaggaaacatctctacttcatgccccagagagtcatggctcacaaatccataattctgagtttatttactataagtagtccatagccagggacatcctgctaagggtattccagaaataagaactctcagcaaatatctttaatttatttgttagatagtctagttaattcgcatatttatggtaggtgaggcaggtcctcacatgcttgtgtcctttccccagaaacatctttcttgtaagatgagtgaaaggatcatcagccagatgctttagctccttcttctcagtctgcccctaaacaatgtattattgaattttgtctgttttcaagctttttataaatggaatcgtatcttttgactctttgtagaatatgcccttttgctcagcagttttgagacctgttccatgttgatatatggataacagcttgttcattttcactgctgacgaatgtatcacaatttatttatctgctctgctctgaacagatgttaggtggtttaaatttttgttgccttgacaaacaatgctactacgagagttcttgtacttccctgtgtgtgtgtgtgtgtgtgtgtgtgtgtgtgtgtgcgcgtgtgtgtgcaatagttaagatgtttaggtatcagttttattcatgctgcatcaaaatatttagaagtttttcttccttctctaagccctggaaatgtttaagtgtcatttcatattctggtctttgatggcttattagaattctgttgggaaattacgtgggcctgtgatgttaaatatatatgtgtgtggggtgaggacagtgagggaagatttttggtaactatatttttttctatggaaactggtctgtttaaacttcctattgttacaggatcaattttgctaaattacatttcctaggaaattagccatttcatctgtattttaaaattccttagcaaaggaatttttattagtctgttatgaatattttaaatttcttctcttttagtaatcttccttttgttatttcttactttgtgtttgtgacttctccttttccctccagattaactaatggtttgtctattttgttgattttttttcaagcaataattctgacttttatatgaattgcactgcttttctgttttgtaactcaatgttttgctattatctttataaatcccttttactttctttcagtttaccttgttatttttctggatttttgagttgagtaattgatttcttttcatcttttaaccatcattgcattcttgtaatacaatccatttggtaatgatgttttttggtggttttttttttttttttttttttgagatggagtttcactcttgcccaggctggagtgcaaggtgcgatcttggctcaccacaacctccgcctcccgggttcaagtgattctcctgcctcagcctcccgactagctgggattacaggtgtgcgccaccatgcctggctaattttgtatttttagtagagacagggtttctccatgttggttgggctggtctggaactcccaacctcaggtgatccaccctcctcggcctcccaaagtactaggattacaggcgtgagccaccgcacctggccaatgatgtgttctttttaaaaaggtgctgttggaattctggttggtactaatttattgaaaatgtttgcattagtattcataagtaagattggtgtgtagcagctagctcctccccaccccatccctgccacctccccttcctcttcctttgttgtaagctgtgtttgtcagttggagcatcactgttatagtagcatcataaaagaattcctgaccactcctgcacattgcgccttgttgctttgtgtccagatgtctctggggtatctctctgattgttcccccttagtgtcctccctggatcctctgtttctgacccctccctttcagtggtgtccttatcagacctcctctctgtctgtgttgtctgtctatattcaccctagtgaagtcagcagccttgggggctcatcgctatcttgactccatgctttcttctgggacccaaggctgcttgcctctctaccttccttttcctctgcctgcttgccatcttgtatttcattcatgtacttggagaccactatatgtgacatattctgctagggctgtaaatacagagataaaatatctgtacctgcccccaaagaacctccattctttagtctaaggcaagcaggtagctgattcccctagcagaggatggtgcagaggacttaggacatgccaaggaagctctgactgtatctgacatgaccacctgaaagccacacatgaaatgcaaccagcccccaaatgaaccctttatttttcttccacaacaaaaacaaaaattctgaacggactcttcatgtctccacctctgcaaacagtggagtctcccaagttacaaggctagagctatactggactcttttctctttcctgtgtccccttatttaggaatttgattgctgaaaacagcacttcttctccattcctgtgatcatttccttagctctggccctcatcgtttcttgcctgaagtattgcactatcttcctattcatttgcttgtctattactttgttcattccacaaaacttcattgagcacctgctatgtgccaggcactattctagccctggtgacccagcacatcaggcaagaccactgccctgagggggcacatactctaatgaggtgcagacagcaatcaagaacgtgcgtaagcagaggatctgagatcgcaaacatgtctatgaagaaaagagacggtatgaggtgggggccagaaagaggggcagcagcaaggaaggaaggcctgatgaaagacagtgaatgagggagagcattggaggaggtcaggcatggcaggtgtcaggggttgaaaggaggctgggtggctacaggggtagggcctggagagcagcatgttcagagcctgggggacattgagatcccatgagggccttctccccattccaaactcccactggctgaaagcaaggtgatcctcctgaaagtcaaatctcattatgctgttctcctgtttaagaaaacgaatgaatgagcttttcatgaccagtaagatgaaaccaaaattccttccattggtacaagggccctccatactccgaggccttcatgcctctgtggcctcatctccaccattcccaagatgtgtctgaagtttcaaccacactcaacttctcctgtttttgaacatgaaaggcaggttctttggggaactttcctttatccattctattttctttgcctggagtgttttttcttcctattctcaagttatcaaactcctactcctgctgctgcagtcacttcagatgtcatctctttccctaaggctccttggcaagatggaaggggctccttctgtttgtccccctactgccattcatagctgatgagagggtgctgccttgtgtccacacctctgatttaacactcctcagaatgtgcgacctgtttccctttgagctactctaagccatatgtctcatgcctctgtctagccccaagggccagcagcacagctgcccacagtagaagttcagtaggtgcttgaatgaaggtctccttcaaataccacacatttcatgatagtgtctaccaggtgctgagttgaatgaaggaaggatgctattcagttggaaagcagtcaccttaaggggcagatgccctgtgtaataactcaagctgtgacaactgaatcctttagatagctggcagagttgggatttttctttctttctgaaagttaatgcatctcaaaaatatattcattgccaaaagacaaccaacttcaatatatgcaagggcagcaacaaagcctacaagcagaaccaattttttttttcacaaaagactgaatgttctcaagcaattgcagagagcttggttagccttctagaattcttcctaatagagaaggacatctggtggccattatgtcttggacttgctggaaacaggcccaatttcctgtaatttaactccatttcagaagggtgatttgatccatgtttaattaaattcatttgaatttttatggcttcatattatttttttcacatacataaattgacagaaaagaaaatattttgtcagattacgtgttctaactttagattctgaaaatgtgtccttgtaaggggtcaggcatcttaaggctgaagactgtagaggatgagaaataactattactgttaagagtaattaataggtccaatctctgaagattcttccttgtcataggtgataggaagtatgtatcagttatctttttctgcataacaaaacaccccagaacttagtggtgtaaaacaacaatccctgttcatgatgttttgggttaggaatttgagccttattcagctgggaagttttcactcagctgcagttatctagtggtttgagtgagctgagtggtctaagacggccttagtttatctacttggcctggcatttggtactggctgttggctgggccatgtgtcttcaacagcctagcccacatgtcttcccatgatagcagtgtttcaaaaaggcaagtcccagtgtgtaaacacttttcaggcttctgtgtgcatcatgtttgttgatgttccattggccaaagcaagccacattgttgagctttcatgggtgatgagcacatcacagtctatattcttctctctattttgtgtgtgtttgagaatttccacagtacaaagttaaagaaaaaaactgttcaagcattaaaaatgaaaccaccatatgatccagcagtcccacttctggatattcatcaaaaagaattgaaatcaggattttggagaaatattggtactcccatgtttgtcgcagcactagtcacaatagccaaggtgtggaaccaaccaaaatgtccaatgatggacgaatcaataaagaacatatggtatatacaggcaatggaatattttcagtcttaagacggaaatcttgacatttcctacaacttggatgaacttgtaggacattttgctaagtgaaatggcccagtcacagaaggacaaatactgcatattttcacttatatgagatatctaaaatagactcacagaagcagagagtaggatggccattaccaggggctaaggagagggggtgaaggagagttgcctatcagcaagcataaagttttagtaatgcaagatgaataagttatagatatgtgctataccacatcgtccctctagttaacaataatgtatcgtacacttagaatctgataaaagaatagatctcatgttgaatatttttactacaataaataaaaagaaaaaaattcttaagaatgttcagatcattcagtggcctcaaagactggtagaagtggttacagatgtcaccttaagttgcccctaactgctttcttggttacatggggatgtgtaagccgtcagggctggattctggaccctacttgctccttgcccaagtttttagtttacaaatagcgttctacatttaattaaaagagttagaaggtatttgatgagaggtctagcaaatgagtcactccattacttgggacagtgttagaggtcttgcaggactggctctatctcacttagtgctcccacggaggatactcattgcgctgtatttgattaggtctgactcttaccacatgtcctaaataagccttgggtgaaaagccgtactctccaggtgttttctagctcccagtgttcctgagtctaagctgtagtgctcactagagccgaaagcatttggaaatgccaccgtagcctagcatgtgcaaacaaagcctctcttcctgtcatcactggacactgatgactctagaattcttattataaaaacaaaaccatgagtgaacagcagcctccaatttcttgttatgttgtccctgactgccaagcatgaggctacccttgggtctaccaagattctgtggcccatttgctccctccatgcactcttcttgttttaagtagcttgatgttttgttaattatctgaacttcagaaagccctaactgcatgccatgttatggtgttgccttgataatttttccagatttttcttggccttcaaactttctggttatctctaccttccttgacaaagggcagttaaagtggatttcacttcatgcacactgtgtgcctctctgaaaggacttgtgagtagaacgtcacttgatccttggatctctgaggttagacaaggaattagaaatatcttaactctactttagcccctaatcttatcattccaaatgtgtgcttaataagaagcagaatcaacacatcaggtcagaataagttcaaatggtctagaatttttatttatagaaatgaaaaaaacattggctagaaacacttaaaaatgctgtcctttgttaggtatgtggttgttctcaaacttttccccacagaatgtcatttaaagttttaaagttgagatgacatatgtgcttaactaaatgcttaatttctttttagttcttgcagttacaatgcagaaggatactcctaggaaatagaattcccaatgagattttgtaaagatagagcttttatcaattcttgcctcaaacctcccaaaattatgtttggtgaattctaggggagtaaaacagtcaaaagtctgttaaattatcgtcacctatgggagtttgttataagatgtatctggcatgtagatggaagagattttgtgaaagcttgagctggtggaaacagggtagggcagataagggtggatacactcctggtaaacggtttgtgtatctcaggtgctgatatgtccctgtgaactgagatgacagtggctaacctggccttgcctcagccgagctcacatgagggcagctgattttgcaatagccaggttttctgcacataggtgatgttaaagccatatactgtggttagctatctgagtctttatattctccattctctcacatggaaggactgggttgtgaaatgtgactaagaacacccacaaggctggagaacttgcatgtttggggacttggaactgtgttattccatggttgcgaagtcagaagttctgtgtgattaaggaatttatgggcatcttaggtcacttcctgtgagagaatggataggggaaggcagtcatattcattgagtaccacagagaaggccctaccctagatgctttacacaagttacctttacataagtgattctcatcacaaacctgcaagggcaattctattaccttcatttggtgagccagagagggtacaagtaatttatgacagggcacacctggttcattagtggcacagccagcatgcacaccaaggtctagttgacaccaaaacttgtattctttctactgtccagttttagagaatgtaggcgtaggcataacaattagaggccagagatagagtccctggctacgaagagtcatcatggataaggagcagagctgggtgctagaagagaggtggaggagagttactcagaaggacagttagttttaatgggaggtgagaaagccatgaagtaagatccaggacagagtgagattaagagatggaaaagctggtcttctgcagagggcgccacctagacacagggctaaaaatatcccttggagaaaggcaaaggtaagaaagagtatgggaccagttggctcacatttccccatgtaagccggagtggcaaagtgcaagccagttatttttctgcacaaatatgcgtcactcttaggaaactttaaaacaaatcttaattctaggagttgtctttttgtgttgtgtatctttgtgacttgtgtttgcaagcttctggtaaaactacaggctccactccaaatcctgaaccaggctgctgtgatagcctgatagtgcagcagctgtcagccaagattttgaaattaaacagtacctgctgtggcactagtcctcttagaaagatttatgggtgaggccagttcccattcacctggatcttgtggctctggccacttctgagcaccctctttgggaaagcgagctcaagactgatagggaaccggccaccactaggcttcaggagagattcaggctcatggagcagaaaagagacacgggtgggcaaggagatggtgaaggcccgggaaatggaaatgctggggtacagagttagttaggtcctatccgattacaaaaatatttctcagactcactggtcatattggctgcccgcttcgtgtctgtttgatgggaagaacctacagtggcaggcatcttccagtgcccaggctgtgtttggcttggacacatgtggttgtgaagacctggcagggaagctgaggcgtgcagtttgcgaagacagagttaaaaatccctgttagggcaatcctgaaatgcagtcacacctgaggtctgtgaaaggatgccaagcctgaccttgcactgggcgtgctctgcttttccaggtggcgctcaggcacgaggatggcgatgagaccacggagccaccccccagtgggtgccgggaccggaggagggccagcgtgtgttccagtggcggaggcgagcaccggggcctggaccgcagaaggagccgcaggcactcggtgcagagcatcaagagcaccctgtcggcccccaccagtccctgctcccagtcagctcccagcttcaagcccaaccaagtgcgagatctgcgtgaaaagtaagcattaacttggcagtggagaggggtgcaaggatgccatccaaaagagagcccacaggtgcctgccactctcccctccctgctggccactttgtcccccacccagcattgctccctacctcttcttgaccattaaaccaccagccaaacatctcggtggatttcccacacagggtggcccctggcgacttttacagacttcatcttactaatcccaggaactgtttttcagctacctgtttttaaaaaatattatttactatctcagttaatatctgttcagaaaagctgtgttttatcaaatggaaaagacttcaaaacacaaaactttggcctagaaataaccactgtaggaatgtggggttggaagagtctcgcgatactcctgacaatacagggatatctctgggttggtttaagttaaacagaaaaaacccatatgagtttccaaatagctgtctctatatatttcagtacacactaattccatcatttagtctgaaacatttttattgagtgtctgttagaggccaggactacttgaagccatgaagatacataaatagaaaggtatgatctctgtccctttgagcctcacgtttgggctgggaggaagaccgagaatggtagatagaaaaaaatggaatgattggcaatcctatgagatattatatgtatttaaagtataaagtttgacaaaatctgccaaacccagagtggttctgtagtatagaggtacaacaaaaggctggccatgcctgctccagagtctgggtccagttgtatcttcccaaatggatgctctgaggtcactgggatgagggactttagggtccagtctctgccacccaaatccacaggggctgactaacacattcccatcctgctgctgatagtctggaagcaggaagtgctcatatcacttggctggatcatcctccctcatcatagagatcctcctgggagtcaaatttaggtcaccaggctacattatgaggaagaaaatcactcagaataagttggatgaccttaagaaagagtgatcaagatatatccctcctctccatctctaagggaataccccaccagcaccaagaggtgccccaaacaatctgatacccatggaatcatttgagcaggacccaggccatgccttcagatacctgttatcccaggaggaggagggactggtttgagatagatgtgcaaccatggtctatgttgacacccctcttctacctcataaccccagatgccctctctctacaggcttttatgtttctgagagtctgtgtacagctctattttagtgaaaagaagacctaaacttctaaacatattaaggaaagagaacctttaccatgagcattgcattttgtgatctagaatcttaaagaaactcagccaattctcaaagaaaaagccctcgaagctctcttccagctggcttgagaagttaacatgaagagaattgaggaaattgtacacaatcctctgaaaaaggcctgtatataaagccaccgaagatgctgagggtaggagttaggtggaccttgtcagtagtacttggtgttctcctgctccatcatgtttgttccttgtctgtttcttgctgttacacttttcgaggattcctgtgttgtgagttcaggtgacaatgctttgcaataggctggtaaggatgatgatacggaagtggaccatcctgggcacggttcacagtcttgaagtgctgggctcggtaggatctgaaacaggaggccagagatgccactctgaatgctgtttgcttcattctttttggaatttcactttactggaattattacttcaacattaatttagtagcatttgagcaaaatatactttgcagcttgtaaagataggtgatgttttatctatctagattgatgattatgaagtgacttcatttacgaagcctgttggagggattttgcctgtggccccaaagtgacggcatgattttgatgaggtgggagtgcgatagtgggaatgcagtggtgaaatgctgattgggaaatgatttcttcctgcatagcttagtcacctgctcaacatctgtgcctcaaacagtacctcagagtcaagtggctcattgtgttctgtcccctgcagaccttgaaagacacagaagctgcctcatgtacatatatgcacattgctcttcatccctgcaaacgccctggccgcacctaacgctagcttatagcaacatgccttcagatgccacatatgaaggatttggggctagattttataactcagtcacccaagtgatgccaacttttgtaaagaagggagaaatatgttttagaaaggggttcatattgttctaaaaaaatatagggcagtctccactcagatggtccttttgcatcatttgaatttaactctcacgatcatcctctgtaagattcagacaggacaggttttattaacctcattgtacaagtgagaaaacagatggggctaagtgcctattccaaatcacaggactaagggctatgaccaagggctgggcccttggctcttaatatccaaagtatacagactccttcccagtcaaccacatcccagccaaccactcctaaacatattcttcaagcgagatgattagagagacaatttgatttacattccttgtaggtatttttttgtttgaggtaaatacaaaaattcaaagacttggagagaaatgcttagtctccctgtagacttaagccagctatgtgctttaattctaataaagactaataagagcttgaactcagatttgtttgctttggtttcttaggaaatacaactctacactgagcatttgcccagtaaggtacaagtttattggtcattggtcaactaaaagcatctttatgggaccatgtgtgtcataatgagtttcatctttgcacttaaagtttacaaatttcattggaaggggaaaaaatcttagtgctagaaagttcttaaaatttagcccaaagcaggagccctttctgtcaagttcccaagagatggggtacacttccaggcatgggtgctctttctcctgaggtaccccatctgcccttgaactattctgtttatcctggttcttcctctgttgacaaaaacagggctgcttcctgctctgtgtgtcagtccttctgataccaaacactgcatgggacttaacacgtgaactttcagtttcatcctgctgatttccacacaacattccaaactatagaagtaattttgaacttcatttagtcactaatgttaacagttgtgccatgcagctttcagtcatgtgtatattttaatatacatggaagagtgacctggcagatagtggatgttgacaactggttagggagtggagggtccagactagtgccacgtgcctcagcagcagggtctgcaaactttctctgtcaagggccaagtaacatgttaaacttggagtaccagacggtctctattgcaactactcaactgaattctgcctttgtagcacgtcaacagccatcagccactggtactggcatgagcatggctgcattccagtgacattttatttatagacactgagatttgaattttacatgtcatgaaatattattcttttgattttttttcaaccattaaaaatgtgaaaaccactcttagctcacaggccgtataaaaacaggtggtaggccagatgtagcccacaggctgtagtttgccaacccctgtcccaagggtctgggtttcttgagggaggttgggggaaattggcaaaggagagtatgtggcatatgagagaagaatccactgtgttatgtgtgagggctatggggaacagtattcttagatttggtgttagagcaaggaagtcaaaggaatattccatgaagagatagagactataggggactttgctgatggctgatcatgagttcccagggcacagaggaagattgaggggtcggagaagggcaagagataagccagattgagggacacatggagagggaggggactatgtgatgagtccagggaagattggactgtgcaggccgggattggtcccagtggtctcttcgggcagtggttcttgaccggggtgattttgccacctaggagacatctggacacatttttggttgttataactgggacggggtggtgctgctggcatctagtgggtggagtccaggaatgctgttctacttagtgcaggatagccccctgccaaacaaataattatctgttttaaaatgtcagtagtgttgaatctgagaaattctgccttaggggaaggcagatcgttggttatgtaatccacatgatgctgagatagagagtgttttggctattggaaagggtagttttcttagaagcatttggaactctgtgcacctaccttaaatattcatgtgcatgggtcaaaattgactctttttcagagaatataatcagctaaaacacagatctatagaatatatttctagtttaaaaaaatccattggcattttacaaacaaatgtcatggaaacagattccttaaatgagatatgaattgtctttcacagctgactggttactctgggctactacatggtttacagtagagtcttttttttgattttaagtccgtttagcaaagtttcacgcttcaaattctcaggaaatatgcttgaacacttttaggggaccaagccttgacttaatctcatgctactctcagtaactgaaatgccaacaaatccaattctaatcggcttcatacacatccatcactccaaaaaattgacataatggaatgtgacaccagcataaaacaagttggcaagagagaacaatgattatataagagaggtgtgacagtctacatccaggcttcacgaacctgttcagaggaagaggaacctggcacagtctcaccagaaatgttcaagtggagctgaggaatctgcattgagaagcagcagtgggcaactctcctcttggctgccgatactttcaactgatggtcaagaaggaaaaaagttacatataagaattgctaatttttttccatgtaagttacactagggttacagaaaaattgactaatgtatgtttcacagaagtcctcattctaataaatgcaaagtgataaggatatataaatgggtcttgtgggagtcaggagttgtagccaagccttgagcttgtagtcaggagaacagtagtctgacctacagacatacttgacccttgagcagcagagagaagatgtggcctagcctcagctggttccaggagcaagagagaccatgcttaggtgggctccaggccaggagtactgatgcggcagtggagagcccacttgagctgcagggagaagtctggcaggggtttgttgtggggcagggtgcagagaccagcactggaagctcagcctgcacctggcagagaacagactaccgctcctaaggagtgggaagcactcagtctccacaaatcctcaccagaggggtgtttagaatcactgtggtcttgggcataggatgtggaggtattgaagcatgggagggcaagttcagaacccagctctcccaaaatagctatgtgccaatttatatatggccattggctcatagtaggcactgaataaatagcaactctttatgtttttaaataaaaatgataggatttaaagatgtggtgccaactgtgtgatgtaaaatgaagagagttgtaccatatagtgcaaagatgaatataacagtaacagccacaacaacagctagcctttacggaacacttaatcatctgccaggcagtatgctaagcactgcaagtgtacaaactccatttttgctattatgtcacgatataggtactgtaattaatgctgtgtgacaggaggggaagctgaggcacagggagttgaagcaccttgcccaaggtcccacagctaatatatggtggagctggttctacagtttaggtggtctagctccagagtccatgtcctcaccattctcctaaataacccttatttctgttattctgtggaaataaatacatgctgagtacttggcaattagtaagccattagtaaatggacactgctgtatttattattggatctatatttttcatatcaatacattaaaaattattgcttaatggtacattaaaaaattattgctaatgttccaatatatagatataccataataccatgatgctgtcatacattttgctatggcttggttccagtttttttctcataccaaacttgctgtaatgaacatacacactggtgcacatacacgtttgtgagcattagcactcttagattcttagaagtagaatttgagacaatggacatttacattttaaatattgatattgccatattgctctccacaaaggctgtatggttttactctccgtcagcatatgactcaccattttcccacatcatcactgaatgttaggagattttcataatttttgtagtattgaaaagtgaaaaatgcctcagcattgtaatttgcatttttttattactactgaggctgtacaactttaattgcttcattagctattaacatttccttttcttagtgttgcctgtaaatattctttgctcatttgtctcctgaatggtttgcctattttaattgacctacaactagtctttatttttaatatgaaaaccttcagattcaaagtagaatataagtattctttacacattttagatattaatattttgaccattttttctgtctttcaaatgtcttttaactgaatttctgacacctctcatcacatgcactaaatatatttgttatggtgtccaattcgtgagtcccgtcccgtgtggcttttaggcatcatgcttgctcagcaatgtgtgtcctctttttaactgcagcctctgcgttgtcctgggaaaatgctatgctcttcttccttccatgtctaggaggtaagcaatggaagaggtagggatggagccagtgttagcagtggcgaatctatacgggtctgcatcaactcaattcttgcctccttgaaggaaagaatttgtctgaggggcaaaagacagaccaagacaagtttttgagcaggagtgagagtttattaaaaaattttagagcaggaaagaaggaaagtaaaatacacttggaagagggccaagcagatgccttaagagatccagatgcactctttggcctttgacttggggttttatacattgatgtggttccagggtttgtgtcttttctaccctgattcttcccttaggtgggctgtccgcatgcgcagtgccctgctggcacttgggaggggctgcgtgtgcactgtgtttactgaagttgtgtgcatgctcacttgaggcagtttccccttatcttccagtgttcctagaggaaggtcatataccagttaaactctgccattttgcctcttagtgcgtgtgcttgagcccaatcacccaacttctcagatcttattgggaagctgctgatcactagctttatgtgttttttctctcttaggagaccgcctttcactggcaccagctatgaccaattattattttaaaaagacagtttaacaactgccaggccatcacttgatggtcacctgacattcctggagttgggggatactctccttccctagtcatatctgcctaactacctattctaacaccagcatttatggaggattaactttgtactggctattggactaaacaattttacatgtattgtaaattccatgaagaaggtaggagtatcgtccccattttacaggtgaggaaaccgaaacacagagaggttaaggagcttgtccccagattacagaggctctgctgggttgggacccaggcagtcagagtccatagcctgcactcagaacctaacatacctgaaagtactctctgaatctatagaatgtgttcagtaatgagaatgttatatcttttgaggatgaattagatttgttgagaaagcaaaaaatcactcagagcaaatgttttactggaacttggtaatcttagtgagctgtattgttttttagtcactgtttgattttgatcctgaaatcatacttactgatttgcttgtttttctcataaatgggcactgaagacattttatagaggggacttctgaaaatgttcagagcaatagctgcaacactggaacaaggctttccagttagtcataagtaaccactaccttggcgatggagtaagggaaggtatagagaacagaaactcatagttaaaaggaagccacagttaactatcaattatcgtgaggctgtggaggagcagagacctaagccatcctcagtttttgatggctcataactgatgcataccaattagtggcccagcaggtggtaggatgcgggtagccaagccttggggctgtgcctttggagtgggagctggagggaggcaattggaggggtgttgttttctattttcctgcaggagtgaagaagagttttggcatctttccaccagccacaggaagcagtgggcaaatcggggagcctacttatggaactgtgctggggggtgagctcatcttcccatgttttgacaggaaggaggtgtgtttacatgcctaagttttaggacagcacagcttcccatgccttgtccacaaaacttcattgccaggattagagaattcatcctgagtctgcagtagaatagcagaatagtagagcagccctatctctttcttggaagcagttggcaatgagcaatctatttgcaagcaaaagacatactgtgagatggggtgttatatgacgttaatctacaaaatctgcaactcaggtgacctgctcagccctggctcctggaggaaggctggccgtgtgcagtgaaggagcagcaggtgaggtgggggagggcataggcgtggttgtgtgtaaactcaggatgatggtacctgtactccttaatacggtggtgggagagttaacacaaatatgtgctttgcccagtgctgttattatcatcaatccatgccctgaagcattcacggatattactctgttaaggtaattgttaaatgaatatggacgtgaattggagaaaatattttgtgcacccgcataaacatgctagaggatttcacaacaaccagattaacaaccattggtactatgagtggcaagtagctacttgggaagatttatctgatggtaagtgacttgttataaatgggattcactgacaagggtggtgacctcctgacaaaagtatgattggaatacagccagtgattcagcagtgtccaagagattcatgctgagtgttgaatagcaaagggtggcctggagagaagaggtctgggaaggctgggagagtgggcttggaaatgggaggaactgtattgaataaaggcagaggcactgggacatgaggaagaagttactttgcaatgctcctggtatctggggcgggattggcttctcaaatattcgttgtgaccagattgcaaatttgttgtgggtttgaacttccctgaattgaatctgaggatctttctaggttctgaagaaattggcaaaattttatccttaaggccaagtggagctactgatgaatttcaaatgattaagtgaaaatcagtgtagtgtttctgcaggagcattctgggcacagcatggggaactcactgggggagagcaggctgcacaaagagattggtgcagggctttcgctggtccaggaaggagtggagggggcctgactgaagcaggggaagagagaagggaaagtacagggaggtgctgagaatgcaggaggctgtggtttgtaggacaatgactggattgcatggtgacaaagacaaaggggcctgaggtgattctctggcaatcagtaacctggggccagtcagtaagctcctggatgtatctatgggtcaggcagatggaaattcccatagtcagttggataggcacttctggaactccaatacctgtaggtgatggttgaagctctagtttagaggccctaacccaggaaaaataaactgcatgggcagagaactggctggggaaaaccagcaagagaatgtacagaactttcatctcatgaaatgaagaaactgagaacatcacccacatttcaagtcaatgaaccttgacatcagttatcatcaagtgtgactgtttctcaggctagagtggacttaggtggtatgagggctctggaagaaacaagctgtttactatgggaatggaagcgaacatacctcagatggaaaggttcaagttcctagttgaatcttttacttgctttgggaattttctttcagggccaagtttccctttgacctgtccaaaccccacatctcctgtaagatgcaccttctcctctgtgttctgaatgttcacagcactttctaaggctcgatttttgctggcagtccacgcaggcatgggtgtgggtcatccagctagagaataagcatttctctctatagccctctgcaactcccaggatccctttggagatggagcaggggctatctaaggagtactaagctgggttgatcaaatgcagccatggaaagagaaatgagattattttttcttgataagagcctgtggaggcagcctggtggtaactcttcattgatgaaggttgaacaaatagggaaatgaaactctgaagatgtacattgaagaggccaaagaaagcctgggcacatttgggatgattctgtgtagcctaaatgcctttgatcgtcccgagagagcatacttcccaaagacatgatagctcagtgaggaatccagagactattatatcacacttcaggagtactcaattaccatatccacatggccccagataaataatttcattcctgaggtttttttttttttttccagccatgtggttctggttttataaacatgagattaaaaactgactagagatgagccctcataaggaggtggctggtcagggcctgtggggtgcaggtatttgtctcccaggggtccttggatggagcagggatggtgggggtgggcatgtcacgactgcatgcatgtgggcaggccttctggtatgaaacacatactgaattaccagacttcagaagctattttttcttttctatatattttttcattcataacaagctttgcaaaactgccttccaaatggagggtcaaataattttgatcatgagatcaggaaaaaacaactatgaagtaccttggactctacctttgtttttgtttgcatttatggacttgggtccacatccatgatagctcatgtctataagtaaatgagcaagccaccagatctctagaagagaagcccccaatactaggtgtgttatttcagagtagccttacattaaaagacttcttagtcaatagtgacatcttatgacctttgatattacagttactgattttgttgagacaggaatactgtcttctgggactaaaggaacaaaatcatattcatttgttcatctaactcctatttcatttttgtttttgtttgttttggggtttttctgagacagagtcttgctctgtcacccaggctggagtgcagtgacacaatctcagctcactgcaacctccgcctcctgagttcatgtgagcacatccagctaatttttgtatttttagtagagatgggattttaccaagttggccaggctggtcttgaactcttgacctcacgtgacccgcctgcctcagcctcccaaagtgctgggattacaggtgtgaggcaccgtactaggccccaactcctatttccttgtgcctcccatgttcttggatctgagaatacagtggtgaacatgaaccttacaaaacatacagtttcataagacagagtgcaaatattatagcaagtaaatatgagtagctttagaagagggcttttgaagcgagccagcagggccatgtggtagatagagggttacagggatacgagaatatatccttgaggagaccctccagaagtgcacaaggacgtggacagggagaggcattactgcatccctgtggtacagcatggcaaacaattggggactagctagatcagtaaaacgtctacttttggatgatttatgttgtggatgccaccagcaggtagaagaaatgcacaataccaataccagaagtgctaacgtagttgtcaaatcatttgctatgtaaaaagattgtagaataatatgtttttttttaaatctagatgtttattcaccaaatgtataacagtggttatttctggtcaaaggagacttaactgttatcagtagtagtataagcatacttcctttctcaaagggagtatgaattcctgtaagtaaatattcattaaaaatagcaaaaactctttagaaaagagaaaagtgtgatggggctggtccagaaaacctcctcaggcatttaggttgagtcccaaaggatgagaagagtaagagaagagctccccaggccaagggcatgccatgtgcaatggcaaagggagaaaggggcttggtatatctgggtatctaataggcatcttgggaggtgaggctgtagcgtgtggccagaaacaggtggcatagggtggagatgaggttgcacagtgagcagaccaggtcctgcagggcctgggaaaccacagcacagagtccggttattagtcagcatgtgaggctcagttgtgcacatttgaaaagctgcctatctgcctgcctgcttggtggggatcggattggaggcaagggagagtggcagcagggacataggtcgtggctattgatgccgagctactgggaaacattgataacttagaccagggtagtctcaaccctgccaagcatctaaaataacccatgttcaggttctaccccagaacaattgaatgcagtttctgaaaggagggcctgagcattcaccttttaaaataatatgccttaaggatgcgaatctctaggctggaggttgccagtggtgtggagaggcaggaagcgttgaggcatgcattagagacagtgtcagtcacccccattgctggacctcccaagaccaccctcaacagccttgagcttgtcctggtttaggagggtggtctcttcccataagtgaaaaacacacatgagattagtcattgtacaacttctggaagtgacaaaacatgtctcatgtccacacaactggattttttagttataacagccagaactggagtcttccattccagtgtattttccttcattttaagggtgaaataagacctggatccaccaaggtcttgggacagattgaagaaagaccctgagcagggctgttttttgcctctgaaggctgccttcctgaaatctcatgaggggactatgcttagttcctgctgtttccacagttcttaggaaaatgcagcctatcttcatcctaatttctctgtcaacttctgctctgtcaacttctgagggacatttaaagcaacgaatattggccggcgtggtggctcacgcctgtaatcccagcactttgggaggccgaggtgggtggatcatgaggtcaggagatcgagaccatcctggctaacaggtgaaaccccgtctctgctaaaaatacaaaaaaggcagggtgtggtggctcacctctgtaatcccagcaatttgggaggccaaggcgggcggatcacgaggtcaggagatcaagaccatggtgaaaccccgtctctactaaaaaatacaaaaaaaattagccgggcgtggtggcgggtgcctgtagtcccacctactcgggaggctgaggcaggagaatggcgtgaacccgggaggcagagcttgcagtgagcggagatcgtgccactgcactccagcctgggcgacagagcgagactccatctcaaaaaaaaaaaaaagctgggcgtggtggtgggcgcctgtagtcccagctactcgggaggctgaggcaggagaatggtgtgaacctgggaggcggagcttgcagtgagccgagatcgtgccagcaacgaatatctgtggcttagaataaagtgttttttttttttttaaacacaaagtcaaggtatacacaaaaactggtgagaagcctcatagtctgtagttatcactagatccatttgttttacacctgaataaatctgtaaccccagttactaattgtgctttttttctgttgatgtttgtactctgcagacttgaattccattatgttaaattactccatgtttcagcagaaataatatgcttgaccctttaatatttatttgattctaaaacaaaatagcaaaataatggcttatgtattaaggtactagcccatagtccagcttcttgggtatattagggatccatgagctatactttatactcctcctaaactttgcatgctacagggacaataaatactttcctgtctaactttgggttctcaccatggaaacatcagagcaacagctgggctctgttagatgtcttttcattctcttggctggtaaaatcttttgcagaaactttaaaaaacttgatggctaacaaaactctacttttaagtgaaatcactgattcaagttggccagatatttgtcttaactgattacgattgctaattggaagttttcaaatgttaccttgggcccttggtgacctagaaacagccttaaagttaacagaaagtgtgagtcactgtgaggccaagatcaaactgcaatttaaggattcagtaacacagaaggctgcagaccaagactggagggccatgttctttaccataaatgtaacaaaatatttctatgaatatcttatatgtcctatgcattttatggaactaaatgggacagtttaaatgtctgcattttatctaaaccttaagacggctttttgactagttgccacaaatgggtcataaggcactgctcctccaggctttcaggacagcaggcaagtctggggtgactgggctctgggctggtcttctgggagctgtacgcagccttgtccaatacgaggcattatttttctctgtgctgtgtgaaagaaggattgccaagcacggttcaggaaccgtgcttcgaaggaaccgtgcagtgatgaaaacagtttagattctgctttaagtttcatggggtagcctggcatgttataaaggagtctggcctggatgttaggagatcagagttcttactggcaacctgtttggtcttgccctctccagaccccatccttcttctctgcaacatggggagatctctgaggtcatctccaagtaattgtcaatcttgcccttggatcatgcatagcaagagcctctgtgccgaacgctgtgctaggtcctcagggccatggaactgcagcaggcagcaaatacttattggatgtcccttggagccagggctctgggcagggtctcctggagaaacagagcaggaaaagtaactctagtcaggaaaaatggctcttgcaaggactccaagaatgaaatgcccttgatgttgggtggaagcttgatatatcagtagactgtgtaaggctagggtgaggaggttcacgaagggaaagtggaagacgaagttggagaggtgataagagattagaggtcagctaggcaaactagacttgatcctaggtcagtagacatgttgcacaagggaatgtcatgtacaaaattccatcttgtcccttactcaggtcctctttggctttaaacagccaagttttgcttcaacagcatggcagagtctttttgggtagcttgggccccatgggttgaatacttcctgctacagtgagttgtttagtgtctcttccctcactggtctgtaatccaaggatggggactttgtttagccactgcaccccagcatctttgcacataagtgctcaataaaatttgttaagcagggcacggtggctcatgtctataatgccagcactttgggaggccgagatgggtggatcacttgaagtcaggagttcgagaccagcctggccaacatggtgaaaccctatctctactaaaattataaaaattagctgggtgtggtggtgcatgcctgttatcccagctactgaggctgaggcaggagaatcgcttgaacccgggggttggaggttgcagtgagccaagattgcgccactgcactccagactgagcaacagagcgaaactcggtctcaaaaaaaaaaaaaaattgttaaatagagggagataaagcccttgccccataattacactgcttttttagtaaacgaatgcaggaacagaaaaccaaatactgcctcttctcacttatacgtgggagctaaatgatgagaacacatggacacatagaggggaacaacagatactaggacctacctgagggcaaaggatgggaggaacgagaggaagagaaaaaaataactattagatattaggcttagtacctgggtgaagaaatatgtacaacaaacccttgtgatgttgtttacctatataacagacatgtatatgtgtccctgaacctaaaataaaagtttaaaaaaattgtttcgttacatattttaaaaatcctaattgtaggccaggcgcagtggttcatgcctgtaatcccagcactttgggaggctgaggcaggtggatcacgaggtcaggagatcgagaccatcctggctaacacggtgaaaccccgtctctactaaaaatacaaaaaattagccgggcgtggtggcgggtgcctgtagttccagctaggaggcggagcttacggtgagccgagagagcgccgctgcactccagcctgggcaaaagagcgagactccgtctcaaaaaaaaaaaaaaaaaaaaaaaaaaattaaaaaaatcctaattgtacagagttgggttaattataatcctttgttcatgacacattgtcatcactggtctttgcatgattatcttctagtttattttataaaatatttacgaatataatagaacatcaaggagactatgacctaacctaaaaagcaaggtgttacttctaacttccatctctgtgcttcccaatctcccatccctaggcctgggtaaccaatacttaaatatgtgtttatcactgtcttacggggttttattgtgggggtttttttcagtattttttttttacttttttttctgtacttcaatggacgtattttttaaagtattacacacatatgacacattagtttatataattctgattttctgcactttgttgtaaaatgtatgttcttcttggacttgttttggtcactcagcgttatgtttctggtggtcgtccatattgtcacgtgaagctggcaatatggattttcactgcctggaatttaccacaatctttatctattttttcccttcagagggcatttgggtcatttccagcttttgacaattacagatagtgctgctgagaacattattggactctcatcctagtacactggtgcttcagtatccctagggaaggtttctcaacctcagcactgttgacgttttgaactgaataattctttgtcgtgggggctattctgtgcattgtgggatgttttacagcatgcttgtgtcagcccactagatgccaatagcattccctgccctccacccctgttgtgacaactaaaaatgtctccagatgctgacaaatgtcccctggggttgggggcagaataaccctggtgcagaatcgctgccctagggtatagcaatacaacttttaggtcatgatattaatgtttaattttacaagatagtgttaattattttgccagttaaacctatatatcctcgtatcaacaatatatgaattagttgacttgcattcttttcatcacttggtatcattagacttctaattttaccaagtagatagaaaatggtatctcactgtggccttaattcatagtgccctgattgataatcagaataaaatatctcttcataccagtttgttggctgtgttcatgtattttgttcattttatagttgtgtttttgaagtttaaaatatattttcatatattcttgatttgagtttgtctgttagatatattgcaaatgtctgctcccagtgtattgctcaactttttctcattctgattgctttggtcttagaacatactttaacattattttgaatgtttgtatcgtgtttctgaaagagctcagcaacattcattttccttttggtgtttggaagcccgagaaacatgacccattagcctgagacccaaatccgaggcattacattggctttgttggaaactacgccccaaagaactggtcaggctgcaggcctctgggttgcttttccaacttgaaaacggtgacctcaaatctgggactgtttgcggtgaaaaggaagatacctaatggatttggaacaggcctgggccctggagtaactccttatcaatcacaagcaaaagacctgtggaggtattggaaagccaaaggccaaacacccagaattccttagcacaatataaacacaattaagttacgctttataagaaaatctagtttgagaaaaagcaaagttgtcagaattaattattcagtcttaaatattattagcataaaaatcatttcatttgactgattttatcatagactggaactaaataaaatcaagcctcgaaagtcctgtgccctaggagaggatatttccttctccacccctttgcattataggcaaggccagtgatctggtcatagggcatcctggacgtaggccctccaagtgggtcattgtgctgtctgcccttggttctgccctgccacttatgatagcaaagctacaacacatacatcatatgaagatttattgtgggatctgaggatgttgagcccaaagagaagacagcttgggatgtaggttcagatagctgtctttaaatatctgtgagacagccatttggaaaagagttggatcaaaaagacaaagtgcttttacatattaatgcattcctcctaggggataggtactgttagtgccccatgtagggatgagtaaagtggggtccaaggtcacagggctcaaaagtggtgactctgaagaccagacccaggcagtctggctccagaacctctccagctctacctgggagagtaaatggaatcaaggaattttggagggaggggctcagtgttttgttttaaagaggagaggcccatcggttggcaaggtggagggcattttgtgtggaccagaagtaataacacctgcaaactcctgatcaagctgagggaaggtggcctcatgatggagcttgtaggtatagtttggcagctgtgggagcacatggaggaaaagaagactgaggctggtagggggtggtgtgtatgagggtatactatgccaagctcagaaggatggctgagtccgggcatggtggctcatgcctgtaatcccaggctttgggaggctgaggtgggtggatcacttgaggttaggagttcaagaccagcctggcaaacatggtaaaaactcatctctactaaaaatacaaaaatattcatccatggtggcatatgcctgtagtcccagctattcggaaggctgaggcacgagaatcacttgaactcaggaatcagaggctgcagtgaaccaagatggtgagattgtgccactgcacctcagcctgggtgacagagtgagactctgtctcaaaaaaaaaggaaggatggcttagatgtgcttgtttgtggcttctgccatgacaggagggatgctatctcactgctctccttgtttctgctagaggcaccccgagtccagatccatctctcccttcttagttacataattctcaatccctctacctacctctttataaggccagtataaccttgatttcaaaatctgacaagcacattatagaaaggggaattacagatcaatctctttccaaaataggtaaaaaattcttaataaattaagaaatagaatctagctgtatataaaaagataatacattacaacaaaatgtattatctttattaagtttattcatggtatgcaaggttggcttaacattttttttaaaaaagcagtcttcatagctctttaacagaaaaaaggaaaaatcatatgattatcttaaatgcaggaaaggcatttgacagaactttaatacttgtttataataaagatttttagcaaactaggattagaaggaaattttttaatgaaggctatctaccaaaaaaatctatgacaaaccttatacttttccctgagatttggaacaagaaaaggaagcatcactgtctccatttcttcataatgttggaggtcctagcaagtggactagggcaaggaaaaggaaaggcagatgaattggaaagaagtaggtaaagccatcattatttagtgatgaaacgattgtctacagaggaagtctaaaagaagctctagaaacagtataataaatttagaaaaattgctggatacaagcaaaatttacaaaaagtttatttctatatactatcaacaaatagaaaataaaattgagttcaataatatgtacagtagcatccaaatttatacctaaaaataaagatatctaagacctctgtaaaaatttaaacactattaagagaaattaagatagcagtaagattaggtctaaataaaggctatatatatcacaaccatagattaaaaaacatagcaaagatgtcagttcttcaaatttgcatataaattcaacataatccctatcaatagtacagcaaaaaacaagttgacttgtgagaaaaagtccagaaatctacaaatatatatcttaatgtatattaacctgatttgtgaacaagatactgaagtggagagaaggccctttactaaatggttctgggccaattgcgtatcgatgtagggaaaaaaatgtatctgacccctatcttacatgataacaaaaatcaattagagatggactctacaaatgtaaatctgaaagttagtgaaatgaagcttttagaaggacacagagactatctttaagacctggtgtaaacaacaacaacaaaaattaacacacaaaggcattagccatcaaaggtaaacaggacattattaagaacttctgcttattaaaagatgacatgaagtgaatgaaagacaatagagaagggaaagatgtttacagaacatataaatgacaaagggcaaatgatattaaaaacacttcttcggccgggtgcggtggctcatgcctgtaattccagcactttgggaggccaaggcgggtggatcacctgaggtcgggagtttgagaccagcctggccaacatgatgaaaccccgtctctactaaataataatacaaaaaattagctgggcatggtggtgggtgcctgtaatcccagctacttgggaggctgaggcaggagaatcgcttgacccgggaggcagaggttgcagtgagccaagatcgtgccactgcactccagcctgggcaacaagagcaaaactttgtcttcaaaaacacacttcttcaaatacaaaaaaaaattcatttttttaatgggcaaaaaactacttggacacttcaaagaagagcatatccaaatggacattaaaagtgtgacagtgtgcccaacttcattagtcatcagagaaagcaaactaaaagcacagtgagacatcactacacacagatcaatggctaaaatgaaatagacaaaattatcagatcttggcaagaatgtaaaacaatcagaatgctcatctactacttatggggatggtaattcatcccatcatttttttaaatggcagttattaataaagatgaacccaagcatatcttatgacccaaaaatttcatcccaagatatagtacacagtaatatatacatatgttcaccagaagacatgtactacactgtttatgacagcactattcaaaatagccccaaattgaagggtacccaagggtcatcagaagtagaatgggtaaactactggaatacagcaataagaaggaatgatcttcaagtatacgtaactatgtcaatgaatcccacagctgtaatgttgaacaaaagctaggcagattatgattccttttagatggagaataaaaccaggcaaagctaacttacactatttgatgtggggtgggagagggaagcaattggaaaggagcattaagggggtgctggttagataggtgtgtttattttgtgaaaattcagtggtttgtgtacttttctgtatgtattttatatgttggttaaaaaggaaaaaacagctgaaggacagtgggatgacagagttaaagatcctggtagatgatgcctggagtgagacatggtggatccgtaaggactgaaagcaagaagatgctgggggcattgagaaagtagaggatgcacatgcattaggaggtgaagaatttgggtgagaggaaaggaatgagagatttgggtgaatgggggcttgtggtcaggggtgggaaggttggatgtaagatttccaaggtgggctagttatgtacgatggtgaggtctagagtgggaggggctaaaggtggaggtcactggagttcagcaaggcaagggattgagaagcccagcagggcattgaacaggtgttccatgtggaccatgaccacataagtcggttgttgacaggacttagagaccagagaaagagaatgtcccagtttttaaagtttttagtctgtacttagctgcaaggacaaaacccaattgaaaccaccctaagcaacaacgagaatttattattttccattagtgaaaggctagggtagagctccagaattgctggatacaggcattaaaatggtcggggggactgctttcctctccttttctcccagtttcaactatgtttttcttggactcagggtgtccttatagtgagtcatccctgatggtaccaggagaaaccccaggtgtgatatgaattggccccacttggactatgtgctacccttgaagtgggagtggaactgcacccctgaaacacactcattgaaaatcaggggtggccattcattgagaataaggggtggcataccaaaaccataggtccaccgtggaagttagtccatgccaaattggcctgacccttggtgatttctaatcaagagggatgcagtaaagatgtgaggactctggttgctgcagcagctggtcatcaccaaaaacctttactggatgattctgtgtggaggagaaaaaccacagaggaggtctgcccatggccagaagcttctgtgaattgcatgtagggggtgcagggtagtggcatctagccagcttgacaaagaaatttggccttttctgctttcttacatctccacccgacgtttaaagtcccacatttcagaactgtctcttgtctcctaacagactgagtgtgcttttcttcatttcagccagctgggtggttttttttttttaattattattatttcgttgttgttgttgttgttgtttttgcttcatcttcctgtttgtctgtaatgctcatctcacttttccatgttgtctgtgtgcatttctcttttcctggctttgtctcagggaggaggaggaggaagaggagcagccaatcacggagcccagttccgaagaagagagagaggatgatgcttcctgtcagggcaaggacaggtacctaggactggagcctcccaagctcacactaaaagtgggagactccttcctaatgatagttcactgccttctagtggccacctcccttcctcattgactcccacttgcaaactcttacttaccctgttcacagagccacagaaccactggttttgtagaaatacctgagcatgttttcattagagaactgcactttttattgaaatcctaccttcctaaccacactttatggaaaaaatcactggttttctcctcacctttccctccctcattgaatgctttagctcaaccagattgatggtgactaaaaaggctcatctcccctaagaagattcttgccctttcagcattgcagtaagaagaattccatatgttcctttcttcctgattttaccagcacaatattagctaaaatgtgtggataactactatattaatgattcaggtttgttttatatccaaacaggaaaattttcaccccatgcatcatagcaaaatttcccagtatttattttcacaccaagacaactaacatataactctatagccctttggggagtttgctgtcatctactcacctcctctgcatggtgctttctttctatcctcaggcaacgctgacagacatgggcaccttgcagatattttaaaattctgtagatattttccccaaatcatgtctgtataaaacagtaaaaattgctcatgggtagtttcattttccagtattcagaaataattctaaaattgaatggttttcttcacttaattgattgccactgcaaatggacatttttacttttttttttttcctacaaataagcaaaatcaaatggatcttggatgaatccaagtaaaatctttgccaactttagatttaatggagtctttgctactgatgcctcatctgccaggctagcagtgcacacagaagttctcagatgggctcatttgacacgcagactcctgccatgcccgggggtcatagaatcttctctgaactgacaaactaatgattgcttgcccctatttggaaatgactgagaagaagccagcaggatgtggagagaaaaggaatgagctgatgatagagaattagccacacatttcaggaaagatcagcatgaaacagagaccctgccgtgcttagagctagtgattgattacttagaggtgctctgggaagggaggatgtttggtcgccatcccaccttcagttgaaaatgagctgtaggaaattctgtaggctatcactgaaacagggatatgcctccctatctgctgaaaggtgcatgttctgcccacctgcacaaacccttaaaccctcaggtatgcacatgcttctgcaccttcagaccagatggaagaatctggctggaaaaggcggccttcaaaggcatccctgttaatggtgtgctgtctctacctaggatttttattatacaggtagatgattgtttatcttatgcctggaagagtctctgactccacaaagtgatgccagagggcatcctttaccagagaccattaggcttttcagttttaggaaataaacatgtgcatgttaaataacagagcttgatcttggtagtacctaggtattcattaaccttcatctggatgttatttgttctctggcgtaaacttctgagaccgtaaaggatttccccttccttctgttgggttggtgtctctgctgccctgcttcctgctgacttctgcttagtgtgtgctccccgcctgaggcactgccctcagctcgctacagcatgtccatcttcccatcaatccagggaaactgttgggtgcctgcccttatgtacaagcagagctctgaatttgaggcgggaaagaagacagctcacattccatgttcacacgaacatggctgggagtcaatttctctgagagaggactggaaaaatgcaaagtttaacatagattcccaggttataaatgtatgtgttaaaatatccaagggtctaaacccagccccctgaagatggaaagctctttttatagttttataatatttaatggacaaattaaaaattatatataatgccaggcatggtggctcacgcctgtaatcccagcactttgggaatccaaggcaggtggatcacttaaggtcaggagttcgagtccagcttgaccaacatggtgaaacctcatctctactaaaaatacaaaattagccaggtgtggtatcgcatgcctgtaatcccagctacttgggaggctgaggcagaagggttgcttgaacctgggaggcaaaggttgccgtgagccaagatcactgggggcaacaagagcaaaactctgttcaaaaaactctgctcaaaaaaaaaaaatgtatatatttaaggtttacaaagtgatgatttgatatatgtatacattgcataatgatgaccacaatcaatgaacatgtctatcacctcccatagttactgtgtgtggagggactgaggtcaggattttatacctggaggcagaatcaggcctgtctgaaggcgtctgaatgtcacaggtgtagtgggaggccctggagaaagtatgaaacgggcaaaatttgtcttttttgtcctggcccctctttttagctctttgccttcctcgctggcattttttctccttttctcttagccatacctgctgtcacaaaaggttctggaagcagtcactaaagtgtatggctttgtgggatacctcttcctcaaggttgggctttttagcaggaggacagatctgctatttgaccaagacagagatgaagttccagtcgtggaaattcagatgccaacaccagcagcagggagaaacatgggaggtgccgggtgcagaagagtctttggggctccagtaaattcccaaagtctcttacacctagaggccaggtttggcctgagagccacctccttgccctctataagtcttacctcctggtttgacaaactcagcatgtcaggattgcttgggcaaaccaaagctgctggtgacaggcttttatgcttcagttcaagaaacacagcttgactttgaagtgagtgataatagtacagaagtggctttttgcctgtctctctttttcctaacctttgctccttctctcccaaatctttttttcttcttcctcctcctccctgctggcccaacagcaaggtcggcgctgcctcagggcagagccccactggaagggatgctgctcccaagagctctgccctccctgctgtctcgaatgccagctcgcagggaaagccgcttctggttggcactgcaggcgggaccacctggcacagtgggtcctctgggtctgaggccaccccatctgccctcctgtcaccccctgcctcagctgctcggccctcctccgccacaccaggctccctgaaggtgtcaccgaccatagacaagctgccctacgtgccccacagccccttccacctcttctcctatgactttgaggactcctccctgtccaccaaggagaaggaagcagagtcccagaaggaaaacaggtagatttgctcacctggaggcttgtttgagattaactcggggaggagaacacagtgtgttaactgcaccccttggcttggcttctgccatgtttttttgtggatttcagcccaagcagggagcagttgtggcataaacttaagttgctgacccctgactaaataatgaccagtgtttacataagatgcagagaaaattgtcatctgtttgaattaaggggatcatttgttaaaatatgattactagtaatgggtttttaaatgtaaggtttacatgtgtataatgtgtccaaatttatacatcttgtaccaagccaggtggcatgaagtctttttgacgctgaagaatgtatcaaagtcctttgctatctttccgtgccacattgtgagcgggcttttcttcctttgacagttcctctgattctttctctttgagcacatattctgcctctgagccttaccacttccgatctttctcttctaataggtgggtgtctttattttctttcccttttctgtagctttctgttttatattctaatgtatgcatttttcttttcaaagaatgctaatatcttcctacaacgtgacacacaattacagtttgaaccacttcataggtattaattacgtattttactatgaacacttaaatcttataaaaaatggagatgagggcagagggaggtgtgcaaatcagaactcccccaagaatgttcaacaggtgtccacctgtattaatgcctttccctgttgcctgcgttatgagctctctgctggagtggggaactgggaatagagttggcatattttgaacaatcagtcgtccaaaaatcaatagttgatcattctaatgaccatttcatcttagattaattataatagctgacatttattgagcattgtttttgagccacatcctgtattttccatgaaattagtactttattactttacccttgagaggtaggttctattacaagcatttactacactgaggaaactgaggcacagaaaggctaagtaccttgaccagagtcactcagctagtatgttgcgaggcggtttcaaccccaggcagcctgttccagagtcgcttcctaacccgtacgtggtgctgctgtctgtcatttaggcagtcagtcactttctctccttactgcactcaccacaccctgccaaggcaagtccttgtcagcaagatgttttgccagagcctgtgtttcggggaccccagtctgggtgccctactcaacaggaagctgcaccatgttttaaatgaaggcttataggacctgaaccttgaaggaagctccttcataccatgaaaatgaccagtctttatgggtatcagacctttcacctaataaataggagggctaatctagatctatgatcgttaacaatttttgcttactatatctgaaggaattttgaagtttccctccaagttttgagaagcctgtctacagttttttttactataagtttaaattgttgatataatttgtctattgtatatatgctttatatttttttcaaaaccttggggctttagatttaactgatttaattctggaaaacacctatgtatacctacttggcaaagccagtccttagtcaaatgagacttaacttctgtcagaagaagcctgatttcatgtttcagttcaaataagcgagctcatacgcatccctgacaacagtctcatttttggggctgattctcaggtgggcacgtagacagagatgaggcatgagaccttgcttctagtttttccctggataaataaagctccgtcttctccctccagcatacttcttaaggaattccctcaggagtgatattttcctttgcttggtaccatggagatcttatagcacaaagcagtgccccacactgattccacctgctcaagagttttttttctttctaaaaatggaaggtgattttggaaggagaagctggaaaggactgggagaccctaggagcagcatgggaagatccatttttaaaaagagcagatatggaacttcaggatctgaaaattaatttcctctgatttccagaatggctttgtatacctccaggagttgtgaactgagcttctttttttttccttcttttttttttttttttttgtaccccaatcatactatcccagtgaaccaaatttgaattccttgaaactacaagttctctgcaggtctcttccaggtctacagttccaggattgttgttatctttcacacagtttttgcggaatgaatccaacatgactcttacaccttccaagaacaatatctatgtgcaagttaggagctgaacatttgactggaacaaaaatatgttggtgatctcatctttcccagagagtgtgttagcccacggtggtgatgctggtctttctggtgatggtctcggccctagttggggctttcctgggccccagacccttcccgtttggtctgcaagcttcaccgctatttatagtcgtgggggtgggagcaatagaaacacataagctgtccagttgaagatacacgtaagttgtgggggaaaaaaaaagctgcttgcttgtgaatgaaggttgactttgatttaactgagcaaagtttgtaaacttttaaaatcacttctccagcaggaacttggatactgtacaagtattgttcctattgatttttctgatgttcactttttgtggttttcatgggtctgtgtgaccacagatggactactcagtggttgactgcgattgaatgggttataataaagaccgaccagttagtcattaaaaagaaccctcaccctccacacacacacacacacacacacacacaaaaatgctgaatagtgagttgtatgatctagttagtttggctgaaattgagaagcaaaattagactatgaggcatttgaattaattgcttagacattaggaaaaccaaaggagggaaaaacacattctgcttgttttatttccatagcgtcatttaaacacaattttagcaaagtgatcctgttaaaacattctgcaggatgtccacttgtggtgggaagggaattgttttagctgctggagtaggatgacaagctgagcatccaggcagctgctgacacaggcatggagcctgtgtggatcaggctgcatcagggtctcgtcacggagagtgctaggtgtcgtgcggggcagcctccttcccctccctcattgcagtgcttgctgcctggtttctttccctctttgctcattggctttctctcccttctctatttctgcctttgtaggttcctttcatcctttgcttttgtgcttcctatgtggcctgtggtttgggaaccctgttgaaaaattaaaccaacactcacttggagaagcaattaacctgtttgacatgtagagtgttgggtttttaaagagaaaatgagtactcagaaaccaagtcccacaaagatgatgtgttcacagaggataatggaatagagtggtatgctctgagcctctctctgtctggcactgagaatatgccagccatgtgacactaaataaataaggacagcaacagccaaactgaccagaattagcagcacaggatagatgcgggtcgtatcaatattttattttccattataataatgaaatttcttattgaaaactgaaatttcatctctctattcttttttaaaaaatagcccatttttatagtttttcctacacttagtttttgacttttgagtatatttttgcacagttgtgatcaaactgtgtatattatatcctgatgttttcatttagcctatattatcatttttcgtgttgtcacttataaaattggtaatcatttttaagggttgcataatagtccattgacaaataatatatcatactttcgtagccatttccacatttctacctggttaagtagtttttagttttctaccatgatctaaataatgttccactatttgcaggagctttctggaaagaaaaagaaaaaagataaataatgctccaataagtatcttcctgtatgacattttcagtatataaataactataaggttatttccttatgttatcttcccaaaagttgacttactctgtcgaaggatacactcattttgaaatcagtttgctttccagaagggattccaatttctgttgatgggcgtttggactggattctccatgtgcaagaagctctttgtgtccttatagtgactgttggggtcccacacattctaatacagtgtccctaaccagttcggtggacggggtgggtcctgctctgtggctgggtagatttgcgaggcaaagctctctgagcctcattatttgtaagtaatcctgagtgtctgagcccatgcaagggcatcaaataatgatttgttttctgggagtgctctgagtgatgatacctaaatatggtctgctaaaggacgtctagtctgaaaaacagaaatctagaattttacagatcttgaaatttaacttgtcagacatgtctggaaaatcatcaaatctcatgtaaacctcatggctgtaattttggttcaggggaaatgttggatgaaaacatgaatacatgcacctctaaggagcaggccagtccagaaagcctggggacagtttctcctcaatcactgaacatgtgatgggattacatttaatcagtgaaattgatatggaaatactaaagtggaattttaaataagatgtttctttagccaaccatatggtatttcttacagacctgtgatggaattaacactaattgtgccaccatgtgaggcaagaaaaatcttcatggttcaagtgaaattgatttggatttttaatttatgttagcaaataattttaacgtacattttaaaaaacaggaaatgttagggttttatttaaaccctttgtcataaatcttgctgcctaatggttttagactttgggaaactcctcttatgagaaattatcagaaaaaaacagggaacaaacctctttaggtagaattaccactaacagtggtagcatttccagacctgtttctcttgcaaaaattaaaatggtttgctaagtcttatttactgacttgtacttatttctctatccttttccccccaacttaaacctctgcacttcttagatacagcaattttggcaataactcttatcactcctcaagaccctcatctggatccagtgtgcccaccacccccacatcatccgtctcacccccacaggaggccaggttggaaaggtgagttcgacaagcacgctgatagcttcacagtcctcaagtgaggggaatcaatttggttaagtgtggttaaaggaaaaatataaataaaagacataacatgaagtattttcctttacagaacattgtccgaagccaggaatattttctctttctttcacactatttactaagcaaatattttattagaggtgatattttaatattagcgtctcatccccctacacactttccatagaaagtataaaaatgtcttctaaaatatttgtgtgaatgttttgattcattccttaaaaactgttctagattttacgtaagctctgcaatttgttatatacacatcagttttcaccattgaatgattaaatctgtgtaaatcagaaagtagtgggcccattaaggtgctgtataattaatccaggacctaccagaagagaaaagaattgtatgggtacatggaaggaatttaacttggcaagagtattagaccaccagaaattaactgattatgactcccagaagcaaatgattgcccaaggatgtgtttacaagggaaaggtaagacctgtaattttagaacagttagaaagttaccctcacatggcaagagtgctgagttagagaagactggttaggattccagctcactcacttggaagttatttaaccctgagggtaaatgccaattacaccaacccataccttagagggtgattttgatgagcaaacaaaagtccactcgggagtgctgtgtgaagcccaccatgtgtatctggtggaagctgttagtgtaggagatgatagcatgtaacttccagcagctcctcattcatcaggaatctagacatgagcgacatcagagatcacttacctcaaatcccaaatttaaagcaacctgcgttccacatttagatcctcttctatgtgtattctgaagtatgttttgccgagtgctgctggtgattggaggtttggttgggttgagagcaggcaagaccttaagccctgggaggaagggaggtccagtggggtttgcctagtcacatgtcactgttaacttctaagatggcatgtagatcctacggtgtcaagctctcagattccacagtccagtgtggtcctgggctgagcacacttgggctaagttaggtcttgataataaggtaaccatttgattaccccgaagacaccattacctgtctgtagttctgtcctttaccctagggcacctcctgttgggattagctgaagttacctgtagtcctgaaaaggtcaccatacagatgacccttgtcaaatgggatgtaagatttggggccaaagtgagtaatattggagtcagactgatacgacgttgcacatcttgcacctgccaagctgccagctcctcagggactagaaccaggctctgttcattggtgtgttccctacagtgcctggggcctggcaatagtagagccacagtaaacactgatggaaggatggggtgacttagctgctcactgcttgggaacactttggaggtctgtgaagttataaagttatacagacaggggtccatgtggcccacaagattaccaaagccctgggcttggatgttcttcccaggttctgaaagggaagccccaacctctgcccgcttttctgccactggaatcccaggtccaggtttgggctagaagatccaggatcctgaaggactcctgtctgtgtctccttctctgcctggactggctgaagtgcccctggggataaggagggtgggcagttaaaccaggaatggtagaattggatcccagagcctgggcgcggtggctcacacctgtaatcccaacactttgggaggccgaggtgggcagatcacgaggtcaggagtttgagaccagcccaaccaacatggtgaacccccgtctctactaaaaatacaaaacttagccgagtgtggtggtgcacgcctgttatcccagctactcaggaggctgaggcaggagaatcacttgaacctgggaggtggaagttgcagtgagccgagattgtgccattgcactccagcctgggtgaccgtgagactctgtctcaaaaacaaaacaaaaacaaaaaagacttggatcccagagtgccttgaacatcctggggaagaggctggactttatcctgagaccactggagctgttcaagtttggaaacaggagacaggaggcaggaggcaaccaattctaatttgttagtagcatagaacaagccactggggtgaggctgcaggaacaagggctgccgcgaggcagtgtcagagtccaagagagatgaccgtgcccaacatggcactggctgtgggacttgccaggagcagcaggtttggcagagttggctgccgcctggagggtaagaggagacgcaaaatgagtagaggttcaggcttgcacgagtgtatggatgttagaaacaaggaactgggacgatactggaagaaaagcaaattgggtggagacttccagcatggggcatgggtggtccaaggagcctgtctgacatccagggagatgttccagaggccctggggaggtgtggactcagcagtccttggcttgaagaaggctctggagttaaatccctcagagagcctggcattgggatggggtcactggggaacagcagtggtgggatgactctcctaagttcctttccttcttacagtacgctgttgctgtaggaacttggttttctttaccatcactctatccacgagcgagtacggtagcttctaagagtctatcacctcctttacatttgcttgtctttttcactgtcaccttgtgtggctctgaaaaaacatatgatgaatcatttgacatatcagatgtgcagttttattaagaccaggaagccactggacctggctgtattaccactttacttatgttttgtaagtgggggaaaaaaaaaaagaaataagaggatcttctaactccaaatcatacttgtgcaccatcgcccaagaatattacatcagttgcacttatgataatagacatttttatatagtttgaattttttctttgtcatatttgacaactgaattctttggatatcacccataatctaatttcacctatgcaagtattttttgcccattaagatgtgtgattatttttactgaggtatatatactttagtagaatttgtaagatttatggttggtatgttttatatatacatatattattaaaaccaaaaaggaactatattatcaataatggttacatttctgcaatgaggatgcgcgtcttctgtgatcatacccctgactaataaacattgtgcctgagccctgtacaatactaggaagttctagaacttcattcccttgatttggaaacaagactacttcactgaagtcctgggataatcaggccaactaaaacacccttcaggcacctcggcccactttggaaatgcaagtggacattgtcatgagcttggagttttccatttcttccccaacaagtatattcatgtgttagatgttgataaaacttggaatgataaattgacgtaggaaggaagtgctgaagaaacaatatggaaaattaagtcaaggatattaaaatgaatccatctccatatctcctattatagctttgttaatagggctctcttttagaaatagagtaatattttcatgaagtttggaacttaagagaaaacaaaacaaaacgagaaaaccagaactatctgcaaaggccctcaggaatacaagatgcaactgtttaatgaaagcagacttttaaaacacttcactttttgaaaatgtactttttgagcagataatttctaaatgttttctttgtgaaagaaaataaaactacaggaatatttgaactatttgtgttcaagtattcaaatgaaacaaacaagcaaacaaccacacctcaagcgcatatgtggttgtgaggctttgggaaaggccgggcccatcctcttcccttccctgtagtgacatctccatcttgtggactttctcatcaatggcggctggaggcttgccttgtcaatgtgaggaaacagtacgcccaagccctgggactgaaggtaccctaagacagtccttgttctgggactagagaggccacctagagtaagcctatcctgcactgtgagtgctcagtgggaagaggttgtaggaacctcaggcccatacttaggacgccagagaggatttctctgtggacatgctgtgctgaaacccaaaggatcatatgcactttaaccatgcattctgttctcttttccacttgtaataatgccattgtttactataaatgacactgacatggctgtttttcagattaatgtcaagagcccttagaagatcttgggaattgtctttctcatagttgtcccagcagagttcttcctacttcctgtaagattataaacccagatataagtaacaacatcttgttagggagtaataatggataataagggatggataaaggacataaccttttgtgtgtgtgtagtaagaatacttaacatgagatctaccctcttaacaatgtttaagtggtcaatatgttattattaactataggcactatgttatgtaggagagctctggaacttctataattgtagctttatactcatcagataataactccttatatccctctttcctcaatcccctggtaaccatcattctattgtctacttctatatctttgaccattttagatgcctcatatgagggtcattgagttgttttttctcattgtattattgaagttctttataaactgtgataagagtagcaatcacttttctcattgttcttttttacttcatttattgtgtgtttaccatgtagaaacattcaatttcatgagtaaatcttttctattttcatgattttgtgttcctactgaagaaagccttttttctcctggtttcttctagtacttctgtagctacattttgtcacatttaaatgttttatctatctggaaattattttggcaaatagtatgaggcagaggtccaacttcagctttttcatacattcaacaacatgtattgaataaccctttgtttccctaccgtgtgtcagatactaacaggaagggaggtttgtttatgcatcggtgtgttcaaactgttcttaggagcatctcccctcttcctgctgtcagccttccctgatcagccacgctgacctctcaggagctctccttcctcccagtttttggctttaccactttcttcatggtcactggaatacaactgtgtcatgtgctgccatggaacagtcctattattgcatcatctgcttttaggaggttgtgtacagtgactgacagtgctatagtaaagaacagtcatattttaggaagctgggaaagtggaagccttctgtgcttctgtggtggcttctcccagcttaagctctctcttatgggaatctcacttgctgtgatccccttgaacacctatctccaccatgtttatggagacttctccctcagaattcaggtttctgtttccatgcatttcctgcctgttggcagttactgtagttcttccagtgatggcctgccaggcttgccttttgactaccaccctgtgtgtaacttgtgggtacctgtgccttcttcatctttgttgccaattccaagtggactgtctattccctatgaatccacatgcttgtgtcttcccattcttgtctgctttggcttttatcatttcctgccctgacctcactagtcatctacatgtgccttgaagttctacttgggtttttgaatgactgtgttttgttgatatgtgatctgggtgttttgctggatcccagatgcttgctggctgtgttctatcacttggtcaacccaatacttaaaaaaaaattgtcagtggaattgagagccacattgtgcaatggggttctagtttttaaaaaaattaaattggttgattaaagtacatttttaaaaaacaaacttctctgagaaaatcccaaatataatgtaaaataatgggataaaggacattgtttttctatgtgacacagttaatggcacccagtccacaaatgccagtaggaaacaagcagtacaaatgtggtctgattccccaccattcaaagatgctgtgttctccttggactgcgcagaagcagtcttcccacttgcctgccactagttcctgacagcagtcttgttacaaacaataagagtccctgtaaggctaaatgtggtccttattaattgattgcgttacatccaaagcacgcaagagaagcactggttctgttgatgcagtaagttcagagtggggtctggctcgctaatggtaggttcacaaagtgactgtgggccctagggaacctgggctgtgctgtgctgtgggactgtgggtcctcagcaggtactggagattctttctcccacacatgttttagatctgacttgactttttcccaccattcctactcccatctttgccatggtttccagttgtcacttgctacattagttttgtaccattattgtacaaagatcacagagcaaaaaggggtgtgtgtgtatgtgagagagagagagagagagagagagagagagagagagagagagattgagattgagatttctccttcagaaaaatgtattactgggctgggcgcagtagctcatgcctgtaatcccagcactttgggaggctgaggtggaaggattgcttgagaccagcccaggcaacaaagagaccccaggtgtggtggcttatgcccatggttgcagctactcaggaggcagaggcaggaggatcacttgagcccaggagttggcagctgctgtgagctaaggtcatgccactgcattccagcctgggtgacagagtgagaccctgtctcaaaaaagaaaatgtatattgctagatcactgaatgtttgttttcctatctctttccccattccttccctcaaagcccagtaatgaggactaaataagttttattgttataatggaaggatactgagtttccagttaattttggaaattatgtatgtaggatacacaagtcttacatactcatatatttcattcaacaagtacttattgagtgtatcgattgaatcagacacagtccctgacttcacagggcttacacttcagtggcagaagcagaagatgagcaaatcatctgcaaataaagagtttccactgcagtgaatgctgcgaagaaaatgaaccttcataggagagctgaaaagagagaggcaatcaaactgggggcctagcacaggtgctctgttgttgtgggggatacccctggcaaaaggtctgggaaactgagtcactaatgtaaggcaaattgctatttgctctgagattggcctggtgggggggcagggaggttaagagggggataagaaaatggagcgagtccatatctttcttcaaaacagggttttgcaaatctgggaaagatgggagaccatttggaatcaatttagcatttagagaagaggcaagtgtgcaaaagaagagtgagttggcctggagtgaagaagcagagaggagatgggaaggaagaatgtgccttggtcctggccagcaaggcctgggagccacgtaacacaggagatgctggtggcagtcagcgctttgggaagcttccaggagattggcaaattgtgaagccaaacaggtggacttggggctgtgacaggagaggactgacctcctttgggccggaggactcacttggtcttagatggagggtggaaattaagagggaatgagagaactggcaagaactgctgtatgccaaagtcagggcctacaaaggggccagtggacaggctgaagcatgacaacagccagggcctggaggaatggcttcatgctctagatatgagccagcacagtaatgtgagactccatgtgggaccagtctccacagcacactgcgtgagccctgctattccttcccatggccaaggagctcagatctgcactgaagcagtgtgtgcaacaggctggagaatagaaagcaagagggagactgaaatccacatccagtctctgatgatggctgtcttcaggattgtagcagtggtgatgagaaaagctgcctgtttcttggagatgcctctggggcttgctggtttcatcatgagagctaggatatgaccctgaagctatgaaggaagattcttaatttttcttttttcagggcaagcaaatgccttttacaactgggcataacttagagttacctcttgtcctgtatcattagacagggtgatcctcaatttcatagccaggttgtgaggacgatctcattgctcagcatcatttcaatgccattttattattatttttgacctctaagtcttcatatcaaattatctacttgtgaattaagtgctaatttcaagtatcagatattttatgaacttagtttttgcttttgttaatattttaccagagatgataatttactttttaaataggaaacatcgaaggtttgcatctttcgcaaataagattttacttaacttgaacttaccaagggatatttttttaaaacagcttttgcagtaaaattgacacgcaagaaacagcacataagttttggcgtatgtgtacaacagtgaaaccctgaccacaatggagataatgtgcatatccatcaccccaaaaatcttctgctgcctctttgtgattattgctgcccttccccatccctaagcaaccactgatctgcttcttcattgtagattcatttgcatgtgtgtttttagcattttatataagtgtaatcaggcagtatatactctttgaggggagttgacttctttcagttagtataattgttttgatattccttcatgttgttgtgtgtttcaatttcttttgattgagtagtattccattgtgtacataaaccataatttatctgtttacctgttgatagacacttgggttgtctttgtatgtacatgtgctttcatttctcttgggtaaatatagtcattcgtcacttaatgatggggctatgttctgagaaaagcagtgttgggcaattttgctatacaaaaataataagggactattctgaacaattatattccaataactttgacaacttagatgaaatggaagaatttcttgaaagacaaaaactaccaaaactcacagaagatgaaataatctgtatgaattaatataagataaacaaagatagagacattgaatttgtagttgtaaactttcccatgaagaaagctccagtcccagatgtcctcctaggctatatggtatagcctgttactcctagactgcaaaccttgcagcgtgtaactgcaccaaatactgtaggcagttgtaacacagtgagaagtatttccgtatctaaacatagaaaaggtatggtaaaaatacagtattaaagagaaaaaaatggtacatctatgtggggtactcaccatgaatggagcttacagaattgaaagcatgaacattactgttcatgcctaggacattactgtacatcactgtagactttataaacactgtgtactgaggctacactaacgttattaaaaaagaaaagtagttgtgctacaatgttatgatggctataacatcactaggtgatagtacattttcagcttcattgtaatctatggaaccactatcttgtagaacattgttgactgaaatgttaagtagtgcatggttgttactaaaagtagaattgccaagttttatggcaggtggatgtttagcttttaagaaattgcctgtcttccacaatggctgtacatgagtaatgctcataaaatgaggggaaacatactccttcctctttagctttctagaagaggctgcgtagaattagtactagctcttccttaaatatttcatagaattcaccatgaggacatctaagactggagctttcttcaagggaaagtttaaaaccacaaattcaatgcctctaatagatatttatcttatattcttatcagatcatccatttcctcttgagtgagttttagtagatttgtctttcaagaaattcttccatttcatctaagttgtcaaagttattggaatgtaattgttcagaatagtcccttattattttttttagtatctgtaaaatctgcagtgatcgtatttctcattcttaatattggtaatttgtgtcttctctctcttctttccaatcagtctggctagagatttatcaatttttttttgaccacaaagaaccagtttttggtttcatttaatttttatactgtttttctgtttgttttattttcttgcttctgctcactttgtgtaaaatttgctctttttttcagttaggagatgaggtcattgatttgagactttttatcttttctaatataggcattcagtgttacaaattttcctctaagtattgcttttgctgcattccacaaagtttaatatgttgtgtttttatcttctcttaatatgcttcttaagttctctgtcaatttttaaaaagtctttaccccatgggttattttaaagtatttatttagcttataagtatttgtggatattccaactatctttctgttactgatttctaatttaataaaattgcggtcagagaacatatgttgtatgacttggatacttttaaatttattgatatttgttttacagcccagaataggatcaactgtggcaaatatactgtgtaaacttgaaaagaatatgtatcctgatgttttggggtaaaatgttctgtagatgtctatttggttgatggtattgttctagtattccgtatccttagtgcttgtctgtcttgttctgttactgagagagtaataaactgcattctataattttgatttttaaaaatatgttgctgttctattagttttccctcgtatcttgaagctcttttattaggtgcataaatatttacaattgttatatcctactgatggcttgactcctttcatttgaaatgacctttatacctggtaacatacttgattcttaggtctactttatctggtattaatatagcctcagctttaaaaaaaatagtattaatatggtatatcttttttattatttgaacataaattaggttttatgtttcttgtaggcaatatagtgttgaatcttttttttaatccagtctgataatctctaccttttaattggagtgtttaaaccatttaatgtgattattgatttgtttgagtttatattttttatttgttccacctttttattctttcttccttttggggggttgcatattcttgattagttcattttctctcttttgttgccttattagcaataagtgtattattttagtgattgcattggggtttatagtatacattttaatttatcatagtctacctttaagtgatagtatgtatttcatgcatagcataacaaccctgcaacaacacactttcattttttttcttccagcctttatgctacggtgatcatggattttacctttaaaatgttgtaaactccacaatacattgttattatgtctgctgtaaacaattgattatcttttaaatatatttaaataataaaataaggcttatatttacctgtgtcattatcttttctaattcttttttatttttgtgtaaatcaagatggccatgtggtattatttatcttctgccaacatttcttttagtgcaggtctagataatgaattattcctgtttttatatgtctggaaaaaatatttcaccttaatttttgaaagacagttattgctaggtaaagaattataagttgatagcgtttttttttctttcagtactctaaagatgttgcaccactttgttctactttacattgtttttgatgataaatcttctgtttttatttttatacctctgcatgtaacatatcatttttttcctttggctgcttttaaggttaactctgtcattggtttttagcagtttgattttgatatgccttggtgtagttttttcatgtttcttacgcttgggacttgagattcttgaatctgtgtgtttacagttttcatcaaattgcgaaaaatcttagtgcttatttctttaaaaatgtttggtactttttacctcccctttcttttgataactctaatagcatgtatattgggtcatttgaagtttccacaaagttcactggtggtctgttgatttttttcattttgcttcattttgaatgtgtttcattttgaataattatgttgctgtgtcttcaagttcgctaattatttttcttctgtggtgacaatctactgtttcaagtggtctctttcttaatacctttcatattttaacatgttaaatattttctctagcttcttgaatatgtggactatagtcataactgttttatcattctccccaactaattctatcatctgtgtcatttctggattggtttcaaataatttactttttttcttctgattatggcttgtatttttgtacttctttgcatgcttggtcatttcttattggatgtcatattttgtaaattttatcttgctgggtgctggatgtgtttgtgttcttataaatatttttgagctttgttctgggatgggcttaactcagaaacagtttgatccttgcaggtcttgcataattagctttgttaggcaggaccagagctatgtttagtccaatatatttccactactgaggcaagacacttgttaaaactttaaccagttccctctgaattatgaagtttttctctgtaactgttgggaacaggcagtactctctgccttatataatttccagacactgtttgctctaattcatttggatagttctttcactggccacagattactttttacatgcatatgctgaacaatcctcacctagttacttgagggaaaccttctgcagatgtacagaggtctctctctctctgtatagaccctttctggtatgttaccctgccagtgttatccccattggcctctctagactcccagctttgtctcctctactcagggagacttccaggctctgcctgggttttccctttatgcaccacagcctgcaaatgttctccaatcagtaagctagggcaatcatgaggaacacctcctttgcttttcatctctcaggaatcactggccttcaccatctgatggccagtttcttcagtgctgctgtttcatagattttttctggtttttagttgtttcaggtacaggtaaatctggttcctgttactccaaatggactgaaaatggaagtccaagagctttccttttttcaccactgaaatagactccagttagatgtagaaagttggatgagttcagtgtgccaacttttactttatgggaaacttttattagaaaagctaatttctgtaaagagagacaaaagaaaaaagcaacacgaaagtgataggtttcattgtccataaatttgtccacttgctacaacatgtgtttttgtggcattgctcatatcactgaagtagacaacaaaattcagtcagtgtgtattgatggcactcagacacagttgctgtgggggaaggaggagaagcaggcgacagggactgcttctgatgtgttcccaaaggcaacaagggagtaagccgtgccagaaacaatgttcattcacaaaacagtgaaggaacgaaccaatcatttgtgacgatgtgccgaaaggacacatccaggagtctggagaaataaagagcagtgtccactgtggtcatcaagggaggtgtcttgaagaacttgggtagagaggaagtgagataccactaggcaaaggaactagacttctttgggaagcaagatggtgagtggcttgattggcatggaggccatcttaggggacattttaggggacagtggtatatgagttttgctaataggtcatattgtaagataactttaattgcttcaacatttcagattttattggagtccgccaatgaagtgccaacttcctcagacagaaatagagaaaatattttcaaaacccatcctgtttcagtcagcttttaactacataagaaaccaccaaaacatggtggtttaaaacaacaaccatgcatttacctcatgatcttatgggttggtaattttggccaggctcaccttgaaaaattactctggtctgagccgggttaacttgtgtttgcagtcagccggtcgttgatcatctcatttgatatctagcaattgtctggctatcagctgacttgatggggcagcttggcaccatgcctcacggcccagccacctcgcccagacttgttcaaatggcagtggtgtagggttcccaagggcaacatgggagcaagccccggcgtgcagatacttttcaagcctctgcttgaatcgaatcatatttctgattgctacattggccaaagccaatcacacgttcagcctagattgaaggggatggagagagactgctttttctttaaaggagttgctgcaatattctgtgtctatttttataagaaactgtgcgtctgctaaagatttattgtgcaataaacaaatagaagagtgacccgctgactgttgagtttaaagttactcactttgttcaaaaagtaattgcaggctatctggcagacttaaattatattttgaatggttcttaagtgttttaaaagtgaaactagtgtacttcctctttttttaatccttttcttctgggcttagtgcaactgaaaaatctagtatattttaatctctcctatttgtcttagccttatctttataaagatttcctgttttatgtttagtctatttgcaggtaattagataaacaaagtgccaactcatcatcgaaaaagaaagactgtcattgacagaaaatctccccctcagcttttgatcatctgtctgtgttgtctttgctcagcctgggcagtgggtttgttctgttaagagccaagagacattccaaactacctaagatggagattgggctagttgtcttgtatcgttcttctggcaaatcacttttctgttaaaaaggcaagaagtcagaaaaaggagaggttactgtttatgcattaaaaaaccccattgtgttatggaacaaatgaactgtttatttccgaatctaagaagttattctcatgatcaagtatgtaattttggttctttctgaaaccagcccttttattattcaagtttgtataatggaaataatgttgaattcctatgagaaaaaacaatgtaagccatttactttacctctccctctcaaaaaaagtgggaacctgagtaaagtattcctaatcaccacttagtaggttttctgggtccctgacagtagtgaacactcccagagagcaggcagagggagaggcacaaagaaatggctggagactatgggtgaacttagcctgggatctggacaggggttcctcgatctgccctccacactcagcgggaaggagggaactgcagggcattcctgaagctaacccaaggtcaggtggggagtgagtagccacagctgccttaggacccctttcttctgttgcatcctgctctctttccattccattgcttcacggacagaaatccctctctgagatacatatgtcagagggatatatattaaatattagtttaacacatatatgagggatatgtatatccctctgatatatatattttggttctttctgaaacaaattcttttattattcaagtttggataatggaaatgctgaattcctatgagaaaaacaatgtaagtcatttactttacctctccacctcacatatgtgttaaactaatatttggatctaaaatttcagtctgccattgatttccactgtgatttcagagtatattttcaaaaggaaggaaagtcaaaaattctgatactgggtttagggaactttctattgcttctgtgctgaaatctgaacaatgagccctgagttttggtgacactgaagccttggctttcaagttcacctgacttacgatgcacctgtgttttctgtcacagcctcagtgcagtgacagcctcatgactagaaaacagtgctgagggttgaatccacatttatataccaggggatgcagatcctcttccaccctcaattttgtgacaggcttgaggcccttcttttaaaaatttatttttatttttttgagagacagggtcttgctctgtcacccaggctggaatgcagtggcgtgatcatagctcactgtggccttgaactcctggccttgagcagtcttcttgtttcagcctcccatggctcttcctgttcactggtgaagctgcttgtcaattttgatgcatttattcagcaactaggtgtctggttggactttaaattccctttgtggttcttcttgcattcttaaaatggaggtcagtaaaactttttctagtttcagtgacttgctaagtgagagctgaagttcctggaacccctgtcacttggctaggagaatatgaatacaaataacgctaactgagacagtgaggggagcatcttggggcagctccgagacttcacatgaagacaaacatgtaaagctgtcacatgcaagcacgtgcccctgggagtaagttctgggataagatgtcacaaactcttatgcaaagaagaggaagacttgagaatactctatgatgcacactgctctggatttgactcttccagtaacatttttttcctcaaaaaattgaacttgaaatgtactgttacttctggggatttttgaatgccaatactactttttgttgtcctgtatttcctttccctggaatcttagggccctttgagctcagtgtcttcccagcgatgggaggctagggaagaactgccgtgattgtcagcacactgggttgtcagccataggacaggcctcctgcacacctagggaaggctggctagtcatgtccccaccctccatggccacctccgtgcaccagaaatcagggtaagctgggtgtctctggccatgcaagttcttagctgtgtcctctgatgctctgccactcacatgtctcagtccctttccacgtggtctcctctgttcctttgcttcctgctgccaccccctttctctcttcatacagtcggcatctttttttttttctccctacaactttggctccttctctattttatcctctcacactttggtctcatacagggccaccaagggcctccccacctccaggcccttttgcttttgcttctctcaaatgcacaatctctctcccagtgcacagccctgagacatgactatgattaactcagccttctgtgccaggagcctcctatgccactggatagcctgccttttgatggggtgcctttggggcaggcacccaccctgcattcactcagctgttgccagtgggaagggtctagtgcaaaaaactcctctgtaggtccttatcataccttagagaataggctgggggtctgggagcacggagactagcatatacatattattctgacttcatgcatcctgtttattcaatcattagttgattcatcagacagtgaggctcttctatgtgccagggtagagacgaatgagaaaataggatctgaccccaaaacgtaagctgctaagaagacattatttggctcctaaaatcattctcctgtataaactaccctatttttggttgtgtttctgaattctagaactggatctaactattgatgttcagttagcttggggtttcaaagatatttgatatacaagttaattatccacctaagaaggacttttatttatttaagagaaatagaatggctttaaaatatatattcaggacttacagaaaattttaggtaaatctagaaagttatagagcaataaagagtatcagatataacattgaaacccttatccctttgatttcccttcttccccagagatgatcactacactgaatttggtgtttgttattctcagatatggttttgtttttatgaaatgtacatgtatcactagcttgtagatttgccatgcatgtatttaaacttcatagaaatgatagaatatggtttcttttcttcagtctacttttcactatctatatattttgctttggggaattacctatgttcatatcattctagttattaattttcacagatgtagagtattcctttctaaaaacaaactatattttgtttatttgtaggtatttgtataattctaattaaccactagcaagcaataaaaacactgcaacatatagaattatttaccatacatgtctatcttctttatgcatgcaaaagttactttctagataaacgtagaagtggaattgctaggttttaggatatatacatcttcaaatgtattaagtgtttttttttccaaaatgattatattaatttagacttctagaagcagtgtatgagttattctgtgccaatgggttagtgtcatcagacattaatttttgtcaatccgtaatctgataggtgtgaaacagtatatcactgtgggttttgcttgcattccttttccctgatttctagtgaagatgagcatcactcatatctgtattggccatttaaaatgctcattaccctttgcccattttcctctgggtagtttgtcttttgcttactgatttgaaggggttctttttgtacaatgtatactaatcctttgtagtttatatatgttacaagtagtttctcccaggttgttgctcttctttattcttatgtagtctttcaatgtgcacaaattttaaattttaatatatgcaaatttatcaaatctttcctttttggttgctctttggtctaaaaaaacttccatatcttgagatctcaatgttgtaaagttttgtcttttacgtttttcacttaaactatctagaatttatttttatatttggtataaggtgggactagttgtattttttttttttttagatggagttttgcttctgttgcccaggctggagtgcagtggtgcaatctatgctcactgcaacctccacctcccaggttcaagtgatccttctgcctcagccagtagctgggattacaggcatgcgccaccatgcccagctaattttgtatttttagtagagacaggcttctccacgttggtcaggctggtctcaaactcctgaccgcaggtgatcccgcctcagcctcccaaagtgctgggattacagacatgagccaccatgcccagcctgtattttgttttatatggctaaaagttgtctcagcaccatttgttaaacagtccatcacttccccacagatgtgtaataacacatttgacatgaatcaggattctatctgtgtatgagtctgtgtcatggctcactgtctcactccattcgtccatgttttcatttgtgcaccaagaccactttgacgggcaatcattgtggtttcagaatgggcttcatattgaatgtggccagtgctctgctttgttcttactcaaaattgtcttggttatccttaaaacctcaggtcctgtgtaaaaattttggactcagctcataaaatttcatgaaaaatccttttgggatattgatttgaaattgtattaattggaaaaaaagaattggcatcctgactgcattgatttttttcaatacataaatgtgatatagctttcatttgggtcttttaataaggttttataaaggtctttcatattattagttaagtaatttcatagttagcttatgattaacttggtaaattgttgctaatgtaaaaatgtaattgctatttctatgttttatatatagaaactttgctagactcttaataaaataacataggttttcttggattatctttatagatggtcagattatctgtaaatagtgatgttgtatttctttccttcccttatgctttttacttttcttagtattctggcttggaccaccagaataatgtcaaatataagcaatgatggaaacatccttacattatttttaacagtaaactgttcttaatatttcagcattaagaatgatactggccaggtatagtggctcatgcctgtaatcccagcactttgggaggccaaggcaggattgcttcagcccaagagttcgagaccagcttgagcaacatggcaaaaccccaactctacaaaaaacacaaaaattaaatgggcatgatggtgcatgcctgtggtcccagctattcaggaggctgaggtgggagaatcacttgagctcgggaggtcaaggattcagtgagccatgatcattctggcctgagtgacaatgagaccctgtctcaaaaaaaaaaaaaaaaaaaaaagaagaaagaaagaaagaaagaaaaaaagatacttactctagtttttaaaattttccttgccaaatacccactgtcagattaagaaagttttcttctattactaagcatagtaaagggtttttttttttaaacaaatggttgttgaatttaaagctttttctgcatttgcagaggtagccatggtttttctccaataaactattaacgtggtaaattgtattcatttatactgtcatcttacattacccttacatttgttgggcaaacccaatgtgattttgtttcagatttttgcgttggtgttcataattgcaaatagtatataagttgccgtcttcacactgttcttatctggctttagtgtcagagtaatatgaatcatgtaaaatgggttgtggagattttttcttctttatgttgtctgaaactttccatatgtctaacttgaactcttccttgagtagtagaaatcacattaaaaatctgactttcgtggattttttttcatgggtgtgaatatatttgtaattaattaactcaatttcttttgttaacagggctattcaaaatttctatttctttctcaatcagatttggtcaattatatgtttttagaaaatcatccatttctttaatttttcaagtgtattataaaaatttccccttatttttgtaatgttttttggtcactatatctataattgtatttacctgtcattcctgaatatgctcatttatggccctttttcttgaataattttgatggaacttgtctattaggtttttcacaattataaaccagcttttagttttgttgatttttgtctatacaccttcgttttcctattttattagtctttgctctttatttttttccttttgccttctttgaatttattccactgttgcctttccaattgttgagctgatcactcattaatttttactctttcttttcttctaatataaatacttaagacaataaatttccttctaaatactactttagaggtattctacaaaacttcatattcagctttttcattatggtaccctttaaatgtattctaattgtccatgtttttttttctgacctaagttattagacatgttttagtttttccaattatatggatttttttcaaatttatctccttgttattgattttcaatgcagttgcattatgatcagtaaggtagctcgtgtgaaaccagtttgtggcattcattcttgagctttgtgacacaattgatggtcaatttttgagtagtccttatatatttgaaagaatatgttttctcccatttgggcaccaggttatatacatgttaatctattagataaaacttattaattgggttaaacaaatctattatatgcataacagttttatcaattactgtgcaagaggtattacaaacctctttactctgattgttgattaggtttggctggatacagcagggaagaattcccacaaaataataatagcttacaaaagttagaagtttgtctgaacttattttatgaggaagataaataaactctatctatgccttagtgtccagagctgatggaaatagttccatagtgagcctggaatattgaatttggttactccctccctgtagctgccagggatggtggtttcttccctccattttccctgccacctatgagtgatagccataggtgactcaccttttctagggagaacatctgtgggactcatggcagtctgtaatatgaaagtcacatctttctcctgcactgagatctgtgttccccaccttgcaggtatatttttcactgaatccaggtaggattttacccaagctatatccttggataaataaattggcaaaatatatttcataaatatttttctctttgttttggagatttttttccataagtgaaggcctcaattgtccataacagattttattctccagagatccatcagactcctttacatagctaacccctttccttatatgtcatacggttacttgattttctcttctcccactcattctctgatttaacatctcctgtgatactcaccctgtggtttctctccaaggctttcacacacattttcagtgaacagtccagactcttgtgtgatgttactaataccactgcctgtcctttgaccatgctgagtccttggatgcttcttgacatagaatgtcatagaatgaaatttccttaattctattcacatttcagcccattgcaagtttttttgtcctcatctgtcatctcattgccttgttcaattattctaaagaagtgtattgtgagactgatatatagtaaaatatttttagtgcatgtataatagaaaatagttttataaaatcactttttttaaaattttagatttggtggtacatgtgctggtttgttaatcggtatctttcatgatgctgaggtttaagcttctaatgatcctgttacccaaataatgaatgtattacctgatagataggtagaaaatagttttagattgaaagctgattctagcttatctacgtcttaacatagaccaactgtaaaatatatatagaatgtatatacattcctggaatacttctataactcccattcttgagggctgcttacatgtcaagcatgttgcttgctattttctgtctgttaccaccttttttcctgcgagcacactcacagtatgatacttttccccaatttacagacaaaaatctgaaacaagaagacccgaggcattcagtgattttccccaagcattgcctaggtaccggcagaccctcaattctaaccaaggtctgactggtgcttacttcagtacttttaatcacaggccaagcaactgaaacattaactcattgtatctccaggtcatcaccgagtggtcttctcacatcatccttcaggcagcaccaagagtcactggcagcagagagagagaggcggcggcaggagagagaagaaaggttgcagagaatagagcgggaagaaagaaacaaattcaggtaagaaggatcttaagattttttttaaatagtgagttaaaaattaaagcatgtgactttacaactgtatacatttaatattggcattaaaggaagtaatgaaaattctgtctgtatttttaaggaagagaaagacatacctgaaataggctggatctggtttgttatggcttttgtttctctaaccatatggcaggaagcacagtcagccaaatacaattagggactcatgtattcttgggccctccattacctacctcgtcctatccaggccctccggatgacagagagtgtaattatcttaacttaatttgccatctcttcctaatggtcctcatgttttattcatattctatcagatgcccaaaaagaaatgcttttcccactttctggtttgctttttgatccctgtaacaatcttcaatattttttgtaaacaataatctcttgctatgtggggggaaaagtcattgtgttgattactctcagcccatttcccccgatctcctggtctctgtacagcttcaaggatgtgttcctggctatagctcattccaggttccatatcttggcctgtctgtccccactgatcccagtgtgcctcggcttctccttcagccagtccacctgttctccacattctccaggtcatcctccttcacacccatcccctgggcttcatgctgtgctgtgctttatggaatgaaaaacagttgctgtatctctccttacacattacttccttctcctcttccttatatcctttttcccttttccccctttcttccccacctcctcctatactttctcttccttcttaatcctttgaagtcatttaccctatagcttctacattctttcttttcatttttctccccatctctacctcctgtttccttagttcagtttctttggcaaacaatattcccatcaattattccccattatatctacaaggaatgtaaggcattgttaatgaggatttacagatttaataacgtgtttttgttttgttttgttttgttttttgagacagagtctcactttgttgcccaggctggagtacagtggcgcaatcttggctcccagcaacctctgcctcctgggttcaagtgattcttcagcttcagcctcccaagtagctggaattacaggccacaccaccacgcctggctaatttttgtaattttagtagacatggggttttactgtgttggccaggctgttgaactcctgacctcaagtgatccacctgcctcagcctaccaaagtgctgggattacaggcataagccaccatgcccagccaataacttgtgcttttctgaagccaagaagtatatgtgtaattgtaaaaatgatcaaaatatgagcacagttgtgaagttgcttaactataagtcactacttcttgaaaacaaatgccaagtctttgaaatgctaatcctcatttttctaagactgggtgaatgggctgcatgaagtaaaccaacatcatttcccatcaagatagtgtagcataccctgagctgtcacatttctaccaaacgatatttggaaatgccagctctgtatgcaccatttttcatgagggtagttctggaagttgtcacttttagaaaggccaattttttaaatctctggaacaggttaaatgcttcctgatttatggttttctgggagattggcatattttaccaccaaatagcagcagagaatctgagtgaaatacatggaaaattcagagattagcttacatccaaagtgttttattgaaaacctcttgaaacagggtgctggttctggggaaaatggaattcattcactccatcctgtctctccttcattgctgaatgcaaccataagtcatggagagaatgtgtggagctctgaaaactctgaaatataaaagagagcaggtgaaattaggaagggagactaaaattcagttttacaaaaccagtgagagtttaccattttttaccttcactattacttggcatgtactcaaaggcacccaaacctagaagtgtatgtcaaatctggaccaaaagaaccccagaagaagtcctctttttccagaccaaggcacagtaaagggaatttctaaagataaaagtgtagagaattcctgttatttctttatctcctaccctagcctcccaaacaatattgctacagaagcacagcaatggcagcagtgtccaggcagttgcctgaaatgggagagaggggaactcttcctctgaccataagagctatgaccccatgatcactaggcatatcactttgctctcctcctgctatattgtcctagatgcagatgcagttaccaaaagtatgcagcaggacagggaaagtaaagcccaagccttctggctggaggaccataaaaggaaacccaaggagccagaaagtgttaggaaagccacaaagagccaggatatcaagagagcactcctgaatgcatgtctgatttgtacacatgtggcttcaaacctacatggcatgccataggctttgagaactaagtacagagtgggagtggatcaccacccagatcccagaaaactgaattaatattggaaccaatgtctgaaggcaggttacaacttgcaggttgaacttaacccggttgattacctgctaatacaaaataaaacaaaaatcaagattctttgtagaatttaaataagacctcaaatctcattacaaaatatgtaaaatgtacagaatacaatccaaaataacttatcataaaaataattaggaaaattttaactcaaagggaaaagagaattaaaagatggctaaccacaaaggacatagatattatacatttaaagactttaaagtagctattataaacatgctttaggaagtaagggcaaatactcttgaaacaaatgaaaagatgtctctgtaaaaaaaaaataaaagatataaagatccaaatggaaatatatatagaacaggaaaattaaaatagaaaatttgtcagatgggccaaatagaattgctatgagagaagaaagtgaactcattgctatgagtgaacctgaagatagaacaacagaaattttcctacctgaaaactaaacacaacaaacaaaaattgaaagaaaaatgaacaaagctgtagggacctgcgtaataacatcaaaatgtctagcattcgtgtcatcggagtcccagaagtataggagaataggacaagagtgcattggttttttttgtttgtttgtttcttgagacagggtgtcactcttttgccgaggctggagtgcagtgtcaccatcttggctcactgcagcctcgacctcccaggctcaggtgatcctcctacctcagcctcccaaatagctgggactacaggcatgtacatgggactactggctaatttttgtatttttttgtagagatgaggtttcactgtgttgcccaggctggttttgaactcctgggctcaagtgatccttctgcctcaacctcttaaagtgctagacttataggcatgagccattgcacctgcccatgtgttataatatacaggaattatgttattcatatgtatatgttggcagagtaagaattaggcctggaaaggttgtcatcagaggccatgctaataactgttaaccatttgctcttgatttcaagtgattctaacttgtcatttaagaacacagagagaccttggcaaaatggccctcctccactcatccaaaatgaatgctaatcaaccataggcaactactaattatggtgactgcagttccatatttctgaggatgtgaatgaaaagaaattcaaaaaataaataggaaaagctttctaaagtagttcctgaggttacccaaatgactgaccttttatcagccatttcattgatttaaattgtttatgctcctcgtgctttttgcaaagcatctaaaagttgttctttatctattgtcatttttgttgaatatggtcttaagctttctgagttataggaaatttagttctagtgtggaaagtgatgaggttggatgtttataaacgatgacaaatctgagtccttgttgcatttttctcccggtcctacactgctgtagtctaacttactgcccctttatatccagttatcagtacaccaagaaatagaatatttaaactatattatgaggtccagtgttgaaaaccatgatgttaggattctccaagaaagtaaacagtccagtgagagatgactaaccacatagtcttaaacttagattcaatttggaacctaaccagcaggaacagaaaaacaaaacattaaaattaagaaaacagcaggaacagaaaaacaaaacataaaatttgggcatctgtgggtacagacaaaagagaaggaacaaagcaggagcttcagtgatcctagaatagaaactgagaatgtaatggatgtggataaggaatcctgggttgtcactgtggatgacagtgtggcgattcctcagagacctagaaccagaaataccatttgacccagcaatccgattactgggtatatacccaaaggaatataaatcattctatcttaaagacatatgcatacgtatgttcattacagcactattcacaatagtaaagacatggaatcaacccaaatgcccatcaattgatagactggataaagaaaatatggtacatatacaccatggaatactatgtagccataaaaaggaatgagatcacatccttcgcaaggacatggatggcactggaagccatcattctcagcaaactaatgcaggaacagaaaaccaaacaccacatgttcttactcataagtgggagctgaacagtgagaacacatggacatagggaggggacctgtgtccatgtgttctcactgttctgtgtgagaacaacacacactggggcctgtcagtggggggattggggagggagagcatcaggataaatagctaaggcatgttgggcttaatacttaggtgacgggttgataggtgcagcaaaccaccctggcacacatttacctatgtaacagacctgcacacccctcatgtatcctggaaataaaaaaaaaaaaatcctgggttgtggaaggaatattcagcttgtggagtgcaacatagaatggccaaggaacttagatttaattcttaagatggctgttatgaagctaccagagctcaactggatgctaatcacctccaaaagctattgcttgcttgttattgctgtattttatttatggattttttaaaaacttctctttcctcagatacttacattctttccaacaagtaattagtagtgtttctgggtgaatccaataatcctatgttttctgcaatccctgtgattgtattgaagatcgattgtatttaataattttgaagtacaggctttaaacttttaaaaattcagctacaaccattttacatttctgaggcagtgccagtctttcatgatatactgtttataatttattggtaattttctgagtatctaattctgttactttcttttcctgtttgtttgttctacatatttccattagccgagattatttagacaaaagagaggagcaaaggcaagcaagagaagaaaggtttgtatatttcttctttcccattgtaacaaatggcatgtgactttgcactgttaacctagcatgcagagagactgtcgattaaaatataactgcttcacctaaaaccttacatagctggcattttgcagaacagagtgtactagttacctaaattttccaataaaagtatggagttgtcatttggtgccatcatggttaagtgtgtctattccttcaaatgagcacgtttatgttagcataatgacatagggcatatatttgaaataccctgcaccaccactgctgagcctggactacatgttcctaatgcatgcttttatgtcacatggtcagcactccttcaagaaatattttagtatccacactgtgccaggcagcagctgggggcactagatatatctgagactctttctggatgtgcctggtcacttacctgtctccctactgaactgtactcagctcctcgatggcaggaacaatgcctagatttcctttatttccccagtacccaccacagtgcttggcatgtagttgggacttaggaataatatatggaatcagtaaatgagtaaatgaaccaacagctttatttaaaatattcaagctgtaaactactttatttctttttttcattttaaaaactacttcatttatggtacgaatctttgtggtttgtgatgctaactagaaaatgcatgaatacatttttaaatttctatccacagaatatttgtatacaattttgtaagaaaaacatatatgagatacattactttataagattaagaagtatgttattaaaatgttgctgtaatattcgaaccagcctaggtcatataacagagcagctcagaactctggtgttgatcagtagtatatttcaatggcaacatgctttgaatctcaataaaagatacaaagatgttcagtgtctaataaatgcagagaaacagtggaaactggttttacaagtagactggcaaaagacaagttttcacccccagctctttatagcctgcagttgtcccctctaccaccaggtggggtgactgcatggagagatggaaagactgcttttaacaccttttatgctggagccagctgggaacctaacaatttctggactgggccaataagaagtagaattgtgctaattttctaaacaccagctaaatacatcaggacagtctctgaggcagggaagagtggagactgcctgtctgcaatttaagaattagatgcttagatcaacctcttaaataaaatgatggcattactttgattccaacattctatttgattattgtcatcctaataaccagttgtggctggcaaatctagagtgaaacatgctgctaaagaaataggaagcttatatttctcactagtacctgttttttacatcagagggcatcacatatactttcactgaaaatgcggttgacttcctgcccaggcataaggaactaaattttattattttagttctccccccagattctgtacttatttgagctttcaacaacttgactgttaggttaagtccacacagacaaggcttggcagctcctggggaggtggtttaagtgctgtgtcaagatctgaactggctcagctgacttcaaaatttccccaaaccacggaagtccagctctttctggatattatttactgctcttttttgtccaaacaagacttcacttatgtctggcaaactcgtaagaggaggttgctgcttctcctctctcctctggttctgcccatagtctttgctcccaggctgcccatcagcctggacacaggagtgtgctccccaggcccactgtgggattcttcccttgaagcaacctctctgtttacacggaggtctagggaagcaggcatgcattttcctttggtttggctcagccatttttcttgttagttttcttcttgaataacctggtgaagatgggagttaggggaaatatagactttcatccctgtttcaaaagcttttaagagttcctactaagccaggaaaaagtaagatttccaagtataatggaatttggaaatggaaactagtagagatcagaggtgggaagtagtacagaaataaggaaaagtaactcttccagatagagcaatgtgtgtttgtcaagtcccacatctcttacccttaatgcaagactcagaaaaagacagccagagtcacagcaaatggtttttgaggtttgtatcatgtaactgtaacaagatgaatgtcatcttattttgaggtgtagtgaccatctggatacatgttatattatttcatatcatctcactccataatttcagacaaactatgttattggcaatggtgcagaccaggagtaagtttctgttgagatgctacttctcatccttttaagtattagaagaaaggctttataggataatgattgattaaaatgacattcacaaataatttaaaggagaaaaaagaagtgtgtgtagtaaggaatgagccaggctgggggtgtgttgtggggtagcacaggaggatacttctgtttgggtttgttagtctgagggagacagcagggcatggagaagaaatgctttatagcaaacaggggctatgggaacaaagtgcaaagaaaaggttggaactgggctagggttttggaaattgtgcatgaaaatgatcaatgaagcagtaagaaagggttctgagccttgcttagaaggactgagaacagggcagaagttaaagggagccagagtttactttaatgtaagtgagaatttccaaatagaagtgtggcaggaaaagtcatcagtaagtaggtctaggttaatctaaagtcaagcagagtttctgtagggccctgtgaaaagagactgagccgcagtaccagccctgccactgagctctggcggatgttggagttcatcccagtggtttatttgtctctctctcccactgaactgtgagctctgtgagggtgggatttttccttgtttattattaaatcgtgagtgcccactacagttcttggcacatgacaggcacttgacaaacgttcaataaataaatgaaaagatgaatgaacaaacaaatgatataggcagaggataaacgggaatgtttggatgaaggcagcaaaagtaggaagtcttttcttggggctgtggtttgtggatggaaagcccggtgcttcccacagaggaggctctgtcggtctgtggattgagtgtggcttcgcatggcagcagggatacgtgacagtcattgcatgggccggtgggtcctcagatcaagtactattgggccccatagcacttaagtcattgtctaggaaaaggtcatgacataggtccagcttcctccccaagaactgctggaggttcttgtggggcaggaggggtcgctaagctgtaacaccgtaaatgcctgtggcatggccgtctccgcgtaccagcccaccgccttcaccactctggccactgcagatgaacgctgctgctgctttttcagaaaggtttagtgctcttgacctccatgcctctctgccccgccatataaaaaaaaaaacttttaattatgatcaaatgcacatcacatgaaattgaccatcttaaccattttaaatgtgtatttcagtagcattaagtgcattcacattgttgtgtaaccagtctccagactcttctcatcttatacaactgaacctctttatccatgaagcaacaactcaccatccctctacctctgcttctaccatttttgtctaacacataaacatcatgttttgggacaattcagattaaacctctaactcttcccatgtcttacagatcttcagtgatggcatctgtgaggccaaagggtacacaggaatagcatttgagtcaaatatatacaggctctgggatgagtggcccctggagtctcccagaaagtgggttaaaccctttggctccccacaaattcctgcccacctggctgcccacagagaggcatgcagaaggccaggaccaggaatgagccagcaaaaatgaatgcagcaagtgggatgtcctcctggctggaagcctttcattgagggcttcatcaccaccacccactccagactcatttgatttcttgcagtgggattctgacctcctgaattcctggacctgtccagattctcttatttgcactcatttcttgcctgcccctttatcctgtggcagcagtgtgggaatgcctgtgctcacaactcctggacttagggcatttctggccttgaacttgccaccatcccatttaacacatacctgctggaggccctgcctcttacccttaaaattgttttctttcaaggttcttgttacttccacagccaagtggctttttcttgctggcccgaattaaggccacaaacacattccttttgttgcctctcttacccctcaagaggtggtgctcttggccaagcctgaagtgtttgtgtctacatatacatgcactacacaccttttatcagagattcaccatgaatgcaagctcattccccacaaaaatgaaatgggatgcatttgctccctcagcatcctgggctgcaggtggacctctgcaggtggggtgccactctgcaggcttctccctgcatgctctgcctgcttcccatcagcctgcaaatgcaaggcaccgagggaaagaacagaggatggtaatcttcctgttcatgaaaatcctattatttgctttttgaaaacagacatacacatgtgaacagatgactaaatatgccaggcagtaaatgtaaaatgccatctgagttgaagggactacatatccgacatgagttcagaggcaaggccaagatcacttccagctgtggtggtcaaggcagccttcctggagggagatgtgcatgcaagtgtggtccgaagggtggactgcctttgggctggcagggaaaaggggtgaggattacagatcgagaaaccacacccaccttgaggatgggatgcaaaaaatgcatgctttttaaatgcattgttttaaaatattttaattatgtgctctgcctttcttatctgggtaaatgaggaacaccatgtctaatgcccattgtgaggaactgaagcagtgaattggatagatgcaaagtgagggtcttgagtaagctgttccaaagtttagtggtaggtaagatagtaagaaacctgttacagctgaatgcataaatttatttctgaaaaaataatggtgagtaaaattagcagacatctggaagaggcacacatttcaaagttattttggtctgatctataaagcgcactgtgaggaatatgattggtagctggtcttaataaacagttagtgggttctgcctgcctgaaatgcaaaacagatgtatctttgttcttttaaactgactttgatgaataaactctatgtgacgtcaggttcaagctattggatgtctgattcctactcagaaatattttagaatataaaaaaagtttccatggtcagcactgagagaacaaagtgaattccagttacattgctgttagtattgaagcaggttcagaaattcagagaggcaggccttcatccaagcaaccccctttggtatatggggggcattttttttctctctgccacaccaaggcacccacccatttcacagctgtgagctccgagggggtttggttttcagccatcactcttgaggctttttggtggtggttattgctgttttgcttatttacaaatgttccctaaaagagcaagataggattctgcagcagtgatccagtatctagggactgtgtgatgctgccatttcccccaatttgcttggttatgagtgacgtgggatttttaatcattagcatcttggctttgctgggtgtttttggcaggctgactctccagccagccctgcactgtgctgtgtgcatcaggaaaccggctcattctgcaggtgtttcatccataaacaagcatcagccacaggctcctctttcgtttgacggaaaccctttggaatttaactttcagatacaaatacttggaacagttggcagctgaggagcacgagaaggagctgagaagccggagtgtgagccggggcagagccgacctctccttggacctgacctcgccagcagccccagcctgcctggctcctctgagccatagcccctcatcttcagactctcaagaggctctcacggtgtctgcctcctccccaggaacccctcaccatccccaaggtgagtacagggagagtagagggaaaatgaacaggttaacatcagacaggctttctcagggcagtagtgatgatttcaacctgcaggctaatactgagacagcaactatgggtacactttgttgggggaggggggttgtgactgcaactgcctggtcactaacaaactagacgtcttcagagccacttatattaaagcaaaatgattcatcaaagttgtcaatgtatggccatggaaaaaggagaatatggaaaataagctttactttaacatttaatcctaaatactggaatattcatttaatactttatcattttgagatgtgggtctgcccaatcaagtgaccaacattcgaatgttcttacccgaggaactgttagtctggtttaaattaaactgaaggagaataaaattaattacagcaagcaaagaaaaatgtggacctagtgaaaatagaaggtaaatatggaagaaggaaaataattcaaattgtaaaaattactggcacatggttggatgtgggtgtgtgtgtgtacgtccttatgtacagacaggcaagctctcctgggagatattctgtcttcttcactttatttggagaggcgcgatgatattgtacactgcagccttgagcatcagctgttttcctgcctgctctgcatactgtgggtccgttttctttcacattaacacagggatggttctcagcagcgtttacacagtgtgtgttgactaaccctcctgctagcactgtttgctttagtcaagtgttatggcttacagcctgatgtagacttagccaattgaagacagcagaggcattaagcttttaattctaggagggttgactaaatatggcataaagtttaatttaaacaaggccggactccatgaccttagcagaactggatataatggaacgatattgtctgtccaattctttgctggctctccaaaccttggctcattctgctggagcgggccggctcctccacagcttcccgtgacatcccgttactcccgatccctgagccatggaagattgtcccaggcagatggctcagtcatggatgagtaatgtcggtcttaaaatattgagactctgaaagtcaagaaaagagactgttctataacagccgtgtgctttccaaaccctgccttatatcattgctattatctacgttgtggtatttccagaggcaatatgagagatatcctcctgcagagttgtggttcagcactttatcctgggacgtttaactaaaagttgtatctcccgtcctttacagaatgattgtctaaactgtgaagtacagaacagctccgagctgagagggaattgacagtgtctgtaaatgtcatttgtcctcaaatttttaatctccttgatgtttgtggcaaaagacaatttctctccttgatgtttgtggcaaaagataatttcttacgtatttgattgaattacagtttaactcgagaccattctagccactgcaaaagaatatttcagcttcagtaagaatacagaaaatagtcatttcatgtatacgtgggtgtgtgtgtgtgtgtgtgtgcgtgtgtgtgtgtagtatgcatttggggaagatatgtcagtatgctttcaaaagaatatttgcagctgggcacagtggctcttgcgtgtaatcccagcactttgggaggccgaggtgggtggatcacctgaggtcgggagttcaagaccggcctgaccaacgtggagaaaaccggtctctgctaaaaaaaaaaaatacaaaaaaattagccgggcgtggtggcgcatgcctgtaatctcagctacttaggaggctgagagaggagaatcgaacccaggaggcggaggttgcagtgagccaagattgtgccattgcactccagcctgggtgacagagtgagacaccgtctcaaaaataaaaaaaaaaaaaaagaatatttgcaagtgttattttctcttcagagaagggattaatagagactgagagaatgtttgaccaaaattacacaataaatgatacctgcttctgaaagaggaatactgggcttgaatctgcatataaccaagaattctagcatcatttgatgttgtttgcttttttcctggaaaaaagtcaaaagtactggctcctgtgagatctagaagagctgtccattgtatgttaagtaatcaggatccaaatcagcaagagcaaacagtcttccttgtcctgatatgtaattgatttataaaattggacatcgcaagtgtatgaaaagatggtggtctcagaaagaaccgcagaggtttccttctgctttgtagacattggcctttatgacagaaatgcaaagttggtgtcaccaagtttttctcagcctactttattctttgaagcattctgttagcatccaattaatagtatattctttttaccaagtcccattttcaaatgttcaaaagtaaccttttgcttatccctagcatttccagtatcctgacatctggaggaagaattaaaaatataatcacacatccagatgttggtcctgcaccaaacacctggcatgtccaaacgtgccagggattgccttgctttttcactctttatccttgtgggaacatgcaatcataatacgcttcacatttttgtagtgctgtgcccctttttcccaaacgtatctgggtaggtaggggagatgttattatccatgttttactgaggcccagatagatggaaagctgtgcttcagaccatcttggcacagtgctgggagtgtaattagtgttctgatgcccatctcagccatttgtcatggagtcatggctctaccatgtttgcattgctattcatattaatgccacaccatccctttgctaaccctctcaccaacatctgcaaaaattgcagcctacatttcagaattatatttacaagaaaaggaaaaactaatatttgttattgaattttctgtgcctcaggagtacaggtccctttatgggttctttcttttataactcgtgtttcagattctgaagaacttttgaaagaagaagataggaaaacattaaaaactccttttccttttgtcttacaaaacgtactttttaaaagggaaaggctaatgataaatactgatagcatgatatgccatctagtgagatctctcagccaaaagcttccccaggttaatctgctataacttttgtatgaatgatgcccctaatccccaccaccaagtcaatacatgcttgaattaattttccatctgaccctcttgtgggcttagcagatgtatgtccccatactgcctagacttggtgatgatggtctaagtactttccttctttctaaaagtaccagcccaagggagggaaagaaagacatacacacgctcctgtttgcactgtgttggaattaatggagtcagccagcccaaagtttgggcaaacatggaaaggcatctcttcattcattgctttgatatcttttccttattttcactgatccctgggggtagacatcagaatatctacttagtaagtttatttcctattatttttagaaactcatagatgattctgaaagcacctaagtgattctctttgtcagaaaaggtacagtgttcttattaggatagagttcttcaacataattcttgagaaagtttctctgaggatgaaaactaataataataatctgtgtacccataagtaaagtcaagatagccagataacctcttatcacaatttatgtcagatccaggtaacctatttcatggaaacagaatagagagaaactactcacctgaaaaccatatgttgatggtggtccctggagggcatcccggggttaagctgccttctctagagagctagaactatgttccctccttgctccctcttgtaaacgagtccctcctgaggccaggtggagataaatggcatttcccagtggaaggaagcagctgtcaagaatttagaagtggctttcacccactaacctagccatgaaagcaaaattatgtctacagtattttattatgagcttgatactctccatattgcacacagaaataatacatcacagatacatttgaaaatgatgccacactatattatttttatttatgtcaaggaaaaatacgtttgacagtgatttttttctctacctgtaattggattccagggtatttccaaatgtctgattgtttggccctggggatatatacggcctatatggccatggcctactcaccagcagacattattgacaaaggttaatgatacttcctgtcacagatgcaggcatttaaagtatgggtaaatatggcgattcctgtagcctcctgatcctcaaacctggaaataaaatttagacatagagtatcatgaaatgtttagtttgtctaaatgatttttcctgtgggcatccatttgtccttttggctgtcatcattgttagcgttgactgtctttgtcatcttcgttgtggaagatgttctgagtctccttcaggtgtagggactctctgaggttatctaatccacacagcagaaatcagaaacatctggtatcctatttccaactggcacggtagcaatggaatattgtccatcatcagcctaacactgcatgctagttctcttgcataaaccttttggatgcctccagttcagtgtttcatgaattggcaggaaactagattccttgtggttctatgactcagggctgcctccctccctgcctcacctgactgctgctacttgataccattttgtcaattggacaaaatctttcagcaactctacccaaggctgaggtcctacctgctacacctgctgtgggcagcctttgcaaatcatcgagtttttctgccttgccatttctcagtctctaaaaatttccctttttctcctcatagaaatgacagttgtctgaagtgtgtcttcttgcatcatatttggaaacattaattgggattgagtccttctgaagtagacaaagtatataccttaagtaaagataggcatagaatggcactggaaaagttggtaaagaagagcattatttctaaggcaagagaatagcttgaacccaggagttcaaggctgcagtgagctatggtctcgccacagcactacagcctgggtaacagagcaagaccccaactccaaaaaaaagagaaggggaggtggacattacctgatcaaaattattatttcctaggcagctattaggtgtcaagagctatgaaggaactgaaacattaccctatttgtaagctaatgtgctgccttgccacaattccgtggatgctggcagaagacacaaaattcctgggtcagagacaaaggacttcattacttctagtgatagcaatagccagaatatcaacatttgtgccatttccccaagccccagttcccacagggtgatgtgaatagggcccagtaaaacatgcaggcacattgtggggaacctggggaaaggaaccctgagccttggggacctgaactcttttataatgggcggtaaacatgccttccgtttgtcccagagggagacattgtctttattacagtgggcaataaaccaaccagatctttgctctagggagaccctatcttctaagagaagaccctgtcttctaaggctccttgctatgcacacatccttagaaagatagtgcagaaaagactatcaatgcctttgcttgcaagactgaagaaacgtgggagagctgtagatagttgtttcctaatattagattataatggttttaaatcaacctttactatgaaatttgtatcctaaagtctgtttagtgtaaacaaaaaattcaagttttgaacagcaattagcttgttcttatttaacaaaaaagaaagtgcctcaggagctacaagacctcgcctggagcaggcacttgggatgaacaagtttgctgcatctggagacactcacagagaatctggcttgttggctgggtgagacatctgcacctttcatcccaggtgggagccttgggtcagtgctttcaggtgcagtcaggaggctccacatgtcaggacaatgagggttcttgagccacagtggtactttgaatttccagacaatgactgagactggggaaattagcaaaggagaataactctggggctccttctagcatccttgtccatgctcaagatcttaatcactactctgctatctccaccactccccctttcccttcagcagccctgctttcccccatccatctttggaacacatttgttcaaaatgatacaacacctgcagtatggcaagacacactcacgttgactttctggtacctgaaatacactttttcaggagaacctctgggttcagtgaccatgcagtgtgtttcatctgcctctgggcatgatatgcatctttggagccttttgaatttgtaacttctgtgagaaggctgcctctgccagatacatcgggaagttcaagtcgctttttgttgactttctggatccatccccctctggatgcctctttgtcctctagatcatctccaggctaaacaggatagttgccttttgagtcgcgtgcatttctcattgttttctcaacatttgtcttagtcttttctcattgtttggttgcaatcctctcactgactcctcttctgccttttcactacgtggtgggtttttctgaagttcctctccagctcctctctatcttcatacacatcctctcactgggccctcgcattccacctgtgatttttacctacctcccatatgccttgaatccctgaggtctgtactgccagccttggcctccctgagctcagggcgtgtgtattgcacttccccagccatctccactaaatgcccctccaactcttcagacccaccaagtgccaggctgagggctgttcagatggaaggtgatgtctatctctcatccagaaacccccacccgaaacctgcttatattttctagtccccacctggttaaggctatctctcgtggcccaatcatttaagctggaacattcatataatttttgattcctccttcaacacttaccttacatccaatcaatccccaagtgtcttttgtgttgttttctctcaaatcagccctctttcttttctcttcattgccattgcgttagtcctggcctcaaccatctctgatctgggccatttcaatcacttctgataggtttcacttcttccaggctcttctcagcaacccaatttaaaaaaaagatctctgtaccttttcttaaaattatcgggtggctctccattatctaccacataaattcagatcttatgtggcattcaagaccctttgtacccagtaccaaccaccacagccaccccccaacaaatgttatgctccatccacaccaaaccacagtcagtacctgaaaatgccatgctctgtgcttggagtgcactcttccattgggtgccccctggactcttcatcgagctgaggcatcttctcttctctaaagccgcccttgatccctctcttgtgtttcccttgcatcttgtgcacagttgggatgcagggcttacctcactgtccatgtgataagttgctcctcccaagcatctacgtgtgcctcgggcagggcacgtgcctgtgcccacctttgttattcccagtgcttggagcagaacaagcattcagtacatgggttatgagttggcgaatggtcaagcatgacaaaagaaagcagactcatgaatctgcagagacagctgtttcctctctacccaggaagaaatttattacatgagccatgggtggaggacacatctttgactatgcaggccactccataaggactgaataaatgatgttggtataattaatagagaggaaacttttacagagagttgacatatctgggccatttctttctgaggatctgactctaatagaatagtcaccctatatgttatcaatatgagaataattgaacctgaaattgcttcttttttatcctgtatgatactacagtagcattatatacatatttaagcaagtgaacttaatcagaagcgtaatctgaggggcaagagtgggaagtggaaattctaatttaaatagcgcttttaatcctgtctaacattcatattaagtgcatgtccctgagggagcatgaccacaaggagcatagatcttttcttcttttccttgaaccattcctgattccaacgtgccccttgtcgtatgaacaatttgctgcttcaaatgtgagtttagagtttacagatttgtatttgggggtaacacagcccatgaatgcaatcccagcacttaaggagttccactgacgctaaattaaaaccgtgattgtcaaaaccatggagaagttatgggatctataaggtagcactgtccaaagggacttttgaaggtaattttgactatacatggtcaaaattgttcgggtcaagcaggttcaggcctaagccatctctgaagtcatcttcagtggggcttaggtctgaacctctggaaaatcaaactctgaaacttgaggacaaagcatggcttaacttttaaggcataaaaattaggctattgaatcagtattttgcaagtgataagctgtctcttttgtgaggcttgagtagaatttcttttgtgaagctgagtttgtgcccatcctcatgcaactattcctgtagagcagtgattctcaaccaggggtgagtttgctctcctgggggacatttggcagtgtctggagacattttcagttgccacaatagcagaggagaagtggaaggttggtgctgaagcctctagtgagtagaaaccagggattctgctaaacatcctgcagctcatgagacagtctcccagaagaaggaattattcaacctagaatacccaggtacccaggctgagaaaccttgctctagagtgaatccaagtgaacaacctaggaagaactggtctaacaccaaaggcaaagtctaaaagattttgaaagttgtaagcttttttctcttgggacctttttcagatttctgtgattaaaacacacgtctgtagtcaatcgtgttagttattagctctgagctggggaggtccctggaatctacacagtttggagcaactattatagaactggctggcccagcccttggtttcataagacctgccagaaagccaagtcctggcagagtcatctagacactaccacagattgaaatcaactgaagccacccagagatgtatcaagttcagaactttctaccaccaatttatcacttcaaagaaaaattgcataaccagaaattctaattggacactctgaactcggctgtcagggacgtggatgaaagcaacattgaaacattcctgcccactgtgtgtgtgtgcgcgtgtgtgtgtgcacgtgtgcgtacacgcttaattccaggaatgattatgtacttcttgattgcttaagtcacccaccacacagtatagccctgtgattaacagcccgagctttgcagtccagccaatccaggttcaaatgcaagctctgctagcatgagctctgcttagcagtgaggtcctgttggtcagagggttgctgaatatattcagtgaagggactgtttacagaggtatagggaggtcatgggaccatcaaaatgtggtgatgcttcacccagagactagcggtcgtgggacactgttcccaccttcaggcctgaagaaacttggtgaatgactaggacttggtaagagttgtggccagaggagagagaccaagggacagaaacagtggcctgacaacctctgccaaactaaggccctacgtgaaggaagcaggggtgttaatatcccagtttccttcttcctacctttgctagaacttccaggggctgagccagggagagggagagcaaatacagctggtgttctgtgcgggagtcagcatcctcaggcacagagcagaacagagcatggatcaaacagtcagagagtagccagcctactgtgtagctctgggcaagttgcttaacctctctgaacatgtttccttatttctcacatggggacatcaatcttcactttatattgtaggtgtgggaaccaaagaggatgatgtaatatgattcctggtacagcatctgggtgtagaaggtgctcaatatgtagtaagtttgatttttactgcacttaggcaagcaggacctgatgtccagtgaggttttggggaccagatgaggagttggtgttgggatttgggagggacaaagaaaacaagattgtgtgagtgatggtctgccctggcggacttcatacagggaccagctggccgaagtcctcaggccggctcgttcctcatttctctcctcattttgcgacctgcatgaggaaagcatggtcacattctccatctgacggggcagcctttatattcttacacctaagaaaagcacttagtttctccccccttccatgggttctcatgttgatgggttcccatcctggtttcccaaaccccactcactccagtaatgtctgtttctttggggtgaagaattccttttagtggctgtgttctggttatgggtccttccccacagggtggttggtgacagcccagtaccctgttatgtctctttgaggataccctggaccccttcttttctattacttcttccaccttgcagaaagtatccattaccacatccttttatgcagtttagtgttgattttcttctttggcccttctattccccctaccccaaccttcaaatctagctgcaagccctcggagccaggtcagtgcaggctctggccaaacacatttttctggtctttgctaagtgcatcctagcgatgctgagaccccatcgatctgcgctcttgggctgtgacccaggaagacagatcccagttttggatgcctgtaatgttaccaggcattccttgccatgtcttccttttatttccaaatgcacgcccactgctaggagaagggttgcctgggcacctggcccaagtccttcctgcagttcccctcctcccttgcacagcccaggagatgcaatcagatctttgtgtccttcctccatccagggtggttatggacaagcatggtgagccgtggcatctcttgacctgctgggtttggggtatcacagtcactcctgagcctcccttgaagatgcttagaggcattacatgctggggaagggacactctgctccttcctgcctggccaccctggcacgggccttcactgttctctcctggcctcagctttctgagggtaataccagagccctccccatagagagatcgtgagggcttcggaaggcagttcctgtgaagtgctcagtaaccattcctcaaagggagccagcagccctgcggaactccctgccccgctccggtgtgaacacggttcctcccccagctgatgtctgggatggaaaaacctcctgctgttcagagtctcagtcccttacccatgtgttcttccagtggtgctgtgtttttattttctttttctcttgagctccactgattggtgttcacctcttcctcctctgtctctctctctaagggtttgcttcgtggactcttgattccacactgactaggggcctcactccacagctcgcaggcacacccaagctgttcccagcagaaagccttgcttgcctgtgatgcaggtggagacagggctcacctcagacaaaatgaaacacagagcagacatcactgtccttagagtaaagtcccagatccctccatcaacacacagcgctggttgccctggcccctgacaaccacccaaacctcctctcactcctcctgccaggccacgcagctttcattccctccggcacgcagtgggctctgggtgcctgcatgtgcacttccctctgcccagggcattctcagcatttccccccttttaactcatttttaccccttgagactcaaacatcattttgccacagagacttacgttccaggccttgccaaagacccttgccatgccttcccagggcaccgtgcattttatcttacacatccatcactcttacaaaagtattttcgttattgtgtctgctggcagttgagaggtgggggtttccctgtgcccactggtggcagagctcactcacttttgccacacggatatcacggcaggttgttcaggatcctctctaatctgcttctctctagcctctgtgacagagctaggtcagtctcatgggtcgctgtgtctgtctttcaccaccaacaccacattttcaggccagagaaaggctcattaaattctgggactggtaacagtgagaagttgtaaacattcctaggagggaaacaagcaccttttctccctagttgttgccaaaggtcatagctccctttaggacttttcctacaggattatatggtttctcccgtttcctcgggacttggtgggtataaatgagacgttttcctgcattttcccagagggcagcagacctggcttagagacactcagaaggaactgtgtgtgtgtgtgtgtgtgtgtgtgtgtgtgtgtgtgtgcacggagagaagtatgagtgagggaaatcctgctgaaagataatgggaaaggggaggagaaatgttctggagttcggtgtggagtctcagggctgtcctgggtgcttcctgagtatcagtaagaatgctgtgagcagacgctggccccaggaccacgctggggccctccagcaggagaggaaggcaaggtcttggccctcagacaactttcctgtgtttgattaagacagctagagaagggctctgccgtggaccctggcagttttgcttgacttgaatgtgtgtgacagttatttaatttgttcatcattaggatggcctcagatttgcaatcagaccttgtagacactgagtcatgtattctgggcaggagatgactttgccgattactacctccccagcagtcatgaaaaaaagataccaccccagtggttgaaatcacaaattgaaatacctgattccaagaagttaggccctagtgtattgggatgaaattgtactcctcccccacaagagtgtggcttttccagagctcgcgtgtctgttagcacacctgcccaggcagcctaatcagggccagagccgctgcttgggtagagtcctgcatgttcagtggaatggaacatggcagtgcacacccgcaggctgaagtcaaatagccatcaatcacagagcctccctactttgcccagatccctggggtggtgagtagacacaggcttatggcagccaactgaccccatgtccctgtctgtaatgaagccgccaggaggggcccttgctggttttcaccatatgcttaccaattaaaacttcagtccatgccacatgctgggctgttggaaacacatttttgttttgatgtggctattttgaagtccatgtgtgcaaaaacatgtgctttctgtcaaccaaatgatgacgctgccgctgctgaggctgtgctcttgccatgcttgtaaaattaatggggttttgtatctctcctaaatactctattatcagatgaaaaagaaattaccataaaaattccttcagtaccaaagggaatgtttctaaaaggcctgttcactccatcccatgacccagcacagtttttacttttaaggaagagtgtatgatgctctcattctcagacacgtggcctcacagctgtgtgcccattggcttccttctgtaactgccacccatgaatctctgtctggaaactatgccctcagatctccagttcctaaagccttcccctcttgggatgcccaggagggacagcccctcagctgcaggggggtctttgctgcccctccccatgtcctccagccttccctggaagcaggttcctgccccaggctggagttcccagtagaagatgcacaacctgtaatcaaaggagaggaatttactcctccacccccaaattcctacctggcacttggggacatttccacggaggagtgggatttggaagttgcccaggaatatcaggaaaggtgacatttcatctgctccactgcatcttccctgcccagctaactccctgactcatcctcagaggatggcagcctgagagcagatgaaggattggggggtgatggccccgtgggtcctgaagaatgagttgctgggaagctggggttagctgggccccctgcctagtgaggcctgaatgtccctttcccttagtaatgcccatgcccagcctgctggggggctggttctgtgcaccccatggccagccgtgcccattacctggtgccgcaggatgcctccacagagagctgccctgatctgcgtgttctcatggaatctgggcaggtcccttccagcccctgccatgcgtagaccctgccagaatttctgtgttgctttgagcagtgtgtacctagggttcaagcacacacccttagagtgcattgccagggttccagaagagtgggctttgctcagcctgagggcagttcccttaagagtgagccaccctcctccagccttcatgtgtggcagttggctcagaattttgtgtattctcgatcattttgctacacatccacagctcatagctgagggttttgctcagaaaaaataaataaataaaaataaaaaaattttaaaaaagcataagccagattgtgccatttccctgttccctagagtgtcacacgagtgagaacatgatcatcttacctcagtgacagcatcaaatctccagcgttgataggtttgcaaatagactgtgaccatgagtgattcttccaaactgctttcaaaatctcaaactaacttcacattatgagcaaatataacccaagaaaagggtgatgaacctcactggttcagccaactgatttcaggacacattagctgtttttcatcagcttgatccaccatggattttgtttctctttccctaaacaggcaaaaaggttatatattagtttcgtattgctgtgtaacaagtttccacagacatagcgattggaaacaacactcgtttattatctcacagtttccatctgtcagaagtttagcacagctcagctgagctcttgaccttgcctgtccactgccacaaggctggaattaaggctgcggctggctgggctcttattgggagactctgggaagagtccacttccagcctcattgagggtgatagcaacatccagttccttgtgcccacagaactgaagtccctgttcctggtaggctgttgaccagtggtggttctcagcttctagaggccacctgcattccctgtcaagcagcagtgatgtggcagatccttctcctgcttcgaatctctgacttccttttctgctgccaattggaaaactctctgcctttaaaagcctttcctgattggatccaactcatctagtaaacctccatatcgtaaggtcactgactagggactttcctgtcatctgcacaatcccttcacagcattgcctcgatgagtgtttgaataaccagggcataggtctcttgggggccatctttggacatctgtccaccacagagaaatcaacctcacattcattctcacctcacttcacccttccaagaaatctgtcgtcaatataatctccattgttgtctccaccagcaagtgccggggatcctgaacccgaatcagaggcagaaccggaagcagaggcaggggcggggcaggttgctgatgaagctggccaggacatagcctctgcccacgagggtgcagagactgaagtggagcaggcactagagcaagagccggaagaaagagcctccctcagtgaaaaagagaggcagaacgagggggtgaacgagagggacaactgctctgcctccagcgtctcgtcctccagcagcacgttggagagggaggagaaggaggacaagctctccagggacaggacaactggtaaatgaagccccttgtttcagtcggcatgtgccagggaggcctggggtgcaggggctggttctctaagagcttgtccacaggctggcctctgaggtgacctgggtcaacccactcatgtggctgtgtcacccagtgtctggggacaaggagtgtggccacgctggcagccagccagcagccttctgccctgtagaaagacagcccccaaactgtctgccacaccatcacattcatcacctccacacctggggaaaagggccccgataaggagggcttttcctgaggaataagccccagaagagaaacctctcacttccccctgactgttccattgtgaataatagtaaggttgataatagtaaggctttttccgtttttgatataagtttagaaactgtcacattgtcatctattcctttaaaaatgtgtttactgaagtgtgttaatcattttgactggacatttcagactgggaaagatttgtttaaatggattgaatgagtatttccaaaaaattgtacacagtttactgaggtcaatttgatgtactggaatatagataatttgttttctatattacactcataactattcttttctttgtataaagtatatgcttttccttatggaagtatatctttttgatgttacacttaatactcattcagttctcctatgaatggtaactttagaattagggaccaaatggaatgttagattataggtttggtttagcctgaaagaacctcaccaaggacttgagaagggtgccacagagggttataggaatcgtgaataattcatatgatctgtgacaccacaggattacttttcctacccatgacttgtgtgctatcaaggtggtagaatgcctccttcctcaacaaacactcctaaccagtggagtcatgtcttatgggccagcctttcttaagctacatatgagtggcacccactcgagtcgatgtcttaggcccaaagggcaatatgacacctctacaaaggcctgccaaccagtgccatgacccatgaatggcttattcattcctagattaaaaatacattgtctcagaagcatggatgaacgaatgaatgaaaccagaatgtcttccaatagacctgtcagtcaatggcgtagtctaaaatagttactatttggattttttcccagttagaatatactactagattttatgctttatattgctggtcactatgatgcagtaaaaacaagaagataaaagactttattagtttacatcttaggaattattgcattgaaaatccagtgtcttcatttggttgaatatgtatgtgccaagaggtattatatatactgatatttacttaatttctttcaaagtcagattacagttagtcccccaaattcttcttatcattcatattaatgtaattattgtcataatactgggtgtagggtaagtcttattgatcagattggtcttaaatcatgttttatttattaggaatagctttaagaattattaatcataactgggtttagcaggcctaaaacatatcaagaaattggattagtaaaaatataccaggcgacagggctttcttggatcagattgtccaatattcttccaaagaaggacaattttccaaaagtggaaaccgttcccagtgaagaaccactgactttctaccaaagtgggcaatgtccaagtatttagaagcagaaattagggctttgcaatgatttttctgctttgcttcagtgctgttatgagagttggtcatgtttatttactgtagcttattggttcctaaaaaatctcactgctcacaggcatcatcagccactgtggagtccgggcagctatgtcattatagctcttgcttttcagagtgctgtcaaatcacagagcaaccttagagataaaaaattattctcaaacgtatttctaatgattatgtcaaaaatgaatttgtaggacttgaaaaagtctcattccagttatgtggtttaatttttctttgtttaatgtgttctactttagggcatgcatgtgagaagctttatcataacatacattttacttttttgtagttacttgcataattgtcctttgtctccacttgaatgtcagctttgtgagggtggggatgtctgtctattcatcgtgagtcctcacttcctagcagggtctcacaaaacaatcgatgaataaatgaagaggcgtctggctaagatggggaagcttcattgctcctgggtcctccctcttacaaccaacatagcagcaccctgagaataccagaataatcagaggaggactgtgaaaagtggaaagaagaatgcagactgcctaggaacctctggacttaaattatatgacagtgaagctccaagtaaaacttattcccctagccaaaggactgggaaaaggattgcctaacagaatagaacacaggctttttacttattaatacttgtaccctagacaggcactaatgaaaaacctgacccagagtcaatggagactgataagaagctgaacctcccgcgtcccttggaggtaataaggcaatgtgagtcagtgatttaatttccctgggaagatgccagtgaggccaagggagggggcactgacgttctaccctcctcatctgcaatgagccagtgtgagtcagcgctcttgctggggtggtgacagaaagatccagcaaggagctgaacatctccctccaccagcacctgtatgctatacctaaaaagggtgactaccagctaatagattagataggagccaaagtctaataaagcataaaatgtccaagacataatggaaaaatcactcatcatttcaagagctaaggcaatcacatcttgaatgggaaaatgcaataaacagatgccaacactgagatgagccagacattggaattatgtgacggggattttgaagcagccataatgatattgcttcagtgagcagttacaaacacttagggaatacgtaaaaagtaaaatatctcagcaaagaaataaaagatattaaaaagaaccaaagggaaattgtagaactgaaaaacacagtaacaacaaaaaaaaaaaatacttactggatgggcttaatagtagattggagacaacaaaagaaatgattagccaactcaaaaacaaatcagtggaaattacgaactctgaatgacagaaaaaaagagactgaaaaacatgaacagagcctcagggacctgtgagacaataagactcgatctaacgccaattcatcggaatctggggaggagagagagtgtaatgctgaaaaatgctttgaagaaataatggaccaaaacttctcaaatttgtcaaaaggtataaactcataaatttaggaagctgagcaaaccccaaacaagacaaatttaaagacattcacaccaagacatgataatcaaacttatgaaaactaaagaccaaaaaaaaaaaaaaattttgtaagaggctagaaagaaacatattacctataggggaacaccagtccaaatgacagcacattgctcatctgaaaccatggaggctagcaggaaggggcgcaacattttgcaagtgctaaaagaaaagaaccgtcaactataaattctatatccctcatatgtatcctttaagaatgaagggaaaataagacattctcagataaagaaaaactaaaagagtgggtccctaacagacctatcctcaaagaattactaccggaggttctccaaacagaaataaaataatgacagaaggtttggaacttcaggaaggaaaggacaacagaatgggtgaaagcaggggtaaatagactttctgcttatgagttactaaatcgtacttgatggttgaagcaaaaattataacatcatgtgatgtagtgctctgtgtatgcagaggaatacttaggacaactatactttcagagtagggaagctaacggtatcaaaatggaagtaagttttccacacttcagagtggttaaacagcaatactagtttactgtggttagtgtatatattgtaatgcctagagcaaccactacaaaaaccagaagaaacaatgtacttggaacactataaataaatcaaaatgaaattctgaaaaataatcaaaggggatgaagaaaggttgactaatgggtacaagtatacaatttgaaagaaaaaataagatgtagcgttctataggatcagtagggaaattatagtttacaataatgtgtatatttcaaagtagaataatttgaatgtttgtaacaaaaagaaaagacaatatttaaggtgatggatatcccaattacattgattttatctttacaaattatatgaatgtattaaattatcacatgtaccccaaaaacatctattatgtatcaatttgaaaatttgttaaagtaaaaaaaagtattcaagtaacccatagaagacaaaggagaaacaggaactaaaacaaatagaacaaataagacaagtggcagacttaagctctaacatatcagtaattcctttaaattaaaagatagatggcagagtggattaaaaatgacacaattatataccatatatagaaaactcttctcaaacataatgacacaggtagattgtaacttaaaagttgggggaaaaagtctgtaggactaggtacgaaaggaagaaaaaaaagttgagaaaagatatattatgcaaaaattaaatcagagaaaagcaggaatggctacatcagttaaagtagatttcagagcaaaggaaattactaaggacaaagagggtcactacagaatgataaaaggagtcataaattaatgaagagaataagcaagaaaactggcattttaaaaatattacctgattgcctgggcgtggtggctcacacatgtattcccagcactttgggaggccgaggcgggcagatcacttgaattcaggggttcgagaccagcctggtcaacatggtgaaactcccatttctactaaaaatacaaaaattagctgggcatggtggctcgcgcctgtagtcacagctactcaggaggctgagacatgaaactgtttgaacttgggaggtagaggctgcattgagccgagatcacatcactgcactccagtctgggcgacacagtgagactctgtctcgaagaaaaaaaatattacctgattatattattttccctgttcccaaaataagaaaatgctcacatttcccaataaatggagaaagagcaaggctgtctcttaagaagggctcagccactttatctgctgcagcctcctagtggtctccctagtatctgaccagttgttgaaactctacctagccagattttttgctattatcctcagatggcatctcatctccttttgatggtgattatttcctaagatattttgtttgtaaaacctaaaagagggttcagtagctccttgttctggtgttgagatggcctaaggtcccctggtcaggttaagccattgttgcaccaaggacagagaacaaagatacactggaaatcctgggggaccttgtgatccccctgtcaatgcctcctcaagccagggcccaccctccacgtgtttgagggggatgttccttcggctgaatgaagctcccaatgctgacctcccaggcctgggtctgctgccacatcccaacattaggatccactgaggccctggaaagctgatggaactgaagcactcactacctggctctgccagccctgatgaggtttggctgtgttctcacccaaatctcatcttgaattatagttcccataatccccacaggtcatgggagggaccaggtgaaaataattgaatcatgggcgtggtttcccccatcctgttctcatgatagtgaattagttctcacaagatctgatagttttttaaggcgcttccctctttgctgggcactcattcttctctctcctgccaccacgtaaaggaggacatgttttcttccccttctgccgtgattgtaagtttcctgtggcctccccagccatgctgaactgtgagtcaattaaacctctttcctttataaattacccagtctcgggcagccctttatagcagcatgagaacagactaatacaagccccaaagaggcaaacccagaggagtaacattcctgatcattccttcattcattcattcagttgtccagatgttgcagaaacaacagtgagcaaaacaaacccaaatcctgttctcacagagtttacatccatgaaaaaggcaatttattgagtaattataatcatttcagtgatagggcagaggcagacaataaaataagtaaaacgtgacagatttgatagtcataagagctgtgatgaaaaataaagcaggaaaggatgatcaacagtgttgggggaggattgcacagttttcactagtggtcagggaagacttcactgagaagatatggtttgagtaaagacaagaggtcaaggataaaattgtgtgattaactaggtgtagtttatcccaggaggggctgacaccctgaggccagatcatacttggtgagttctaggaatgggaagaagttgctgtagctaacgaggtttatgggcatgtgtgtctgggggtcagggagtgttggtggtggtgtgcgatgaatgaaaagtaaggaaggatcatggaaggccttgtgaacgtcatgtcattggccttttctcacagtgaacgttggtgctgttaaaagactttgagcagaaagatatgatcagacatttttataaacatcatgtggctgttggggtaagaactggctgtcaagggacatgactagaagcagagagtccagtggggacgcccctgcagtactgcaggcaggaacccacgctggcctggcccatggttgtggtagcagaggtgctgagaaaagcagctggattctggatatgacatgaaggtgtagccaacaagatgcacagcaacactggatgtggaggatgaaagaaaagaaggagtcaggaatgactctgaggtttttggaattagcagcaagacggattaagttgccgtagctgagacagcaaaggattgcaggagaagcagtttaggttggggagagcagggttggagaaggtggtattttatggatggcatttaatgccttgaaactagatgagactgaaagagtgcagatggagagaagaggtccaaggacatttaaaggttaatgataaggaggaagcagcaacggagactgagaaggagtagccagatgtcctgggagccctgtgagggaggagggagtggttggctgtgtctagtgcaacacaaaagtcactggtacctgaaagcagcagctgagaagggtggtgggagcaatagctccctttgactgggtccaagagaaaagaaaaagagaaattggaggcagtgggcaaagcaactcttatgaggaaatgagaaaagttaaagttaggtgatagctagagggatgagtggggccaagggtggttttgcttttttaagacgggggaaattatatatgtgtatgtgtgtgtgtgtgtgtgtgtgtgtgtgtgtgtgtgtgtatgtgttaatgtgccagaaggaagactctagtgggaaggccatgggaaatacaggacagagaatttctggagtgggttactaatgcacaagtgggcagtcgacccctgctaagaggtatgtttatgaggcagttgcaggagggaagctgtgttctgagggtcaatgcaggtgggagagtagaggtggaagggaggctctggaagatgccttctggcttcatctgttaagtcactgaacttggaggcaaggttatctctgaggatgagacgggctaggaggttagagaagagagggctatggaaagtcaccttggagaggagtgggtgagattgccaggcagcattcagccccctggagactagggaccgtgataaggagtgaacctaaagagtgatcagtggcacagtttgtgtgtttttgaggcactttgagctgcactagtgcagatttagagtaggggagagaaacagaggtaatctttcaggctctctaatacctgctggggccagggagtggcttcttgcctccctatctcaagttagggcagaggctccttagttacctgtggctgagtaggtcctgacccgctgccttgggtgggcaggaaaaaggaggaagatttctcccatgagcccaggtaggagccaggagcagcgtcatgcctggaagagtcttgggtcctggtgtgggtctttgggactataaagcagcatctcttcttgcccaagagcgccttgtcagccacggctttgactgctcatgcagtgtcttctctgaagtcactcccatgtgtcaggctcacttattctcatcgattctctcatggaagtgaggcccccttgcccctttctcatttttctctcccatgtactttcaggtttgtggcccgcaggtgtccaggatgcaggtgtaaatggacagtgtggcgacatcctcaccaacaaacggttcatgcttgacatgctgtatgcccataacaggaagtctccggatgatgaggagaagggggatggggaggctgggaggacccagcaggaggcagaggcggtagccagccttgctaccaggatatccaccctgcaggccaactctcagacccaggatgagagtgtcaggagggtggatgtcggctgtttggacaatcggggcagtgtgaaagcatttgctgagaaattcaacagtggggacctggggagaggttccatctcccctgatgctgagcccaatgacaaggtcccagaaacagcgccggtgcagccgaagacagagtctgattacatctgggaccagctcatggccaatccaagagagctcagaatccaagacatggatttcactgacctgggggaggaggatgacattgatgtcctagatgtggacctgggtcacagggaggcccctgggccacctcccccacccccacccacctttctgggtttgccgcccccaccccctccgcccctgttggacagcattcctccccctcctgtccctggtaatttattggttcctcctcctccagtgttcaacgctcctcagggcttagggtggtcccaggtacccaggggtcagcccacattcactaagaaaaagaagaccatccgtttgttctggaatgaagttcggccttttgactggccatgtaaaaacaaccgacgctgcagagaattcctgtggtcaaaactggaacccattaaggtggacacttccagactggagcacctgtttgagtctaaatccaaggaactgtctgtctcaaaggtactgctagtcttcagcatgcttcttgattggaagttgggtagggctgaagagattcgttctgtataaaatactattttgcattgcttttgctatttggtaaaaagtccattggtatgaaaatttgatctttaatatagtgttccttctgccacatgctaggtgtaggctacatgagtcagagacccttattagctaacatggtcaccagcttacttatattaggcaaaggagctttcaaagaaccagatagccctgaggaaaagacaaaaatggtcaactaaggaatgtcagcatagcccaatagcagatattgatgttaactagagaaagtggacttgctgactcaccaaacacgggatatgcttatttaatcttaccttcattgactatgagtgatagtagtagtttgaactttatctgtaaccacccaataagctcaaaggcaataatccaactgacatttctttggcttggccctgatcaagccagcattctgcagctatctagttttccagcagccgtatatttggcatcctgtcaatattacacatgcctctagatttagtattttggataaatgtttgagagtcctatagccactgctgctgtgatagtaacaaagatgttataccacttttatcaatggaaacactgtacataaagttattgggcaccaaaggttaagtcatggttaatttacactgataaactgcaagatatgggatcacagattttatatctaattccctacattagtagagacttcttcgcctatcttagctgacttttaaaaacccattctggatattttccagttttaaaacaggtttaaggttatctcctcttttaaggtataaggggtaggagaaagcactttgtaaagcataatttagaataaacatgcaagagcttataatcatgaattaattttaactccctgcgttgctgcatgcatttatcatctttttgggtgagtatgaaactgtctgagtcaggtttccagcaatgccatttgggcaccaattctgtatcaaaattacatgcaggatcctcagaacaagtgagcccttcagacgaggagcacagtgacagagttagtgcctgtcactgctgtgggatgttgacaggccagccaggggagctgtagttgatcagcttcctttcaaaatgtgctgggattcttaagctgcttgctgcccttcactgattggtgtttaccccagtgtgtgtttctcactcactcatggcatgagtctaaatcatttccagcctcaggaatctcctcaagtcaaaattaaagctttctcatttacaaatctacaccgttaggatccagtgtaaaaaatcatgcccaatcagtcctgtccttcagttgaaagtagacccagcttttgtcctctccagaaaataacacctaagaaagggttgccagacacccactcttggtgtgtctgtgtcctgactttctaggactggtaccaagtggtgccgagccatccacatgccccgttccaattctttttttttttttttttttgaggcagagtcttgctctgtcgcccaggatggagtgcagtggtgtgatcttggctcactgcaacctccacctcccgggttcaagagattctcctgcctccgcctcctgagtagctgggattacaggtgcccactgctacacccagctaatttttgtatttttagtagagatggggtttcaccatgttggccaggctggtctcaaactctcaacctcaggtgatccacctgcctcagcctccccaagtgctaggattacaggagtgagccactgcgcctggcctcccccttccaattcttataggcagcctgacatttaggagaagaccagccacgattaagacagcagtctgtggttgctagaagttacccatgacctgacttgctgacaccaccttccaacctactgacctaattggacagaatattcctcctccccctccttctcctcctcctcctccttctcttcctccttcttcttctcctcctccttcttctcctcctgctccttctcctcctcctcctcttcctcctcctcttcctcctcctcttcctcccctcattgcccacttggctggctgcacctctaggcttttcgtggttcccgatcaggttgctgggaagaagctgccccttgactcagtattgggaggaataaaatggagtaaaagtatggaggtgaaggcactcctagcttcatttttacaagattaaaagtttcctcgagaaggcccaaaattaatgcttcacctacctccctccttctcttggtcccactgcagccaatttggtccgtgataatattctagcctcttttgtctcagcccaaagttccatgattgcctgaagcaggtagtgacctctagaacaatgtattgcctagctaatagacaaatgtttgcatagtttttatcaagtaggagcataagaggaaagtggtatattggacgaaaagtttaccaaactgattccagaatgttctataatgagacccaaaaacccctacctttgtctttgggataggaaatgtgaacaggagctactttacaaaatgttacaaaaggtaagaatgcaagttaggattaaaacacgtcactgtgttttggccatgatgggtggctcattctggtaattccagcactttaggaggccaaggcaggtagatggcttgagctcaggagtttgagaccagcctggacaacatggtgaaaccccatctctataaaatgtacacacacgcacacagccagggatggtagtacattcctgtagtcccagctacttgggaggctgagatgggaagatatcctgagcctgagaaggtcaaggttgcattgagctgtgatcatgccactgcactccagtctgggtgacagagcaagactctgtctcaaaaaagcaaaaaaacaacaaaccccacattacactggagagctgaatccattttgcatatgttaccactgtagatataaccaatttcatttctgtttctaatccttgactgtggttttcataaatcaaaatgtaaacagccactttgggtttctggctcagaaatttttaaattaagtacaataaataaaatgcaacaaaagtagagtgaaatagacttcacaagacagcacaaaacaaagagaattggttttaggtttcatcaaaaaaagtaacattagaccagagttattgggcatggctgtgactaagccacccaaaaacaaagattcatgagccagatctaaggctggggtgaccacctaatgaaaaaatgataagactgaaaagatgcgatttttaattttctttcaaaatagtttctggaattggatcaatttttctctatcagctggaattatatggtattttaataagatgaatcatattgtgttttatggtaaaaggtagaaatcctgtgctaaatttcattatgttctgactgctggtctaagatgtggtgagccccataggagacaaagtgaccctaagaaagatgtcagggcagaaagccctgagacttccttgggcttgacatcaccctggggagccccaggaaagtgacttcccaacccttgtacctaaccaggggcagcaaaatccctcctgttctcaaagggcagcttctatgccccaagttacagccagaccaaaacagacatggagtggaactcagtttccactttggggacctgatgttgtcttactctcttgcattcattaggtttgtcatagggagggagcccagaatgtatctggagaagtttatttatcttgaagtttctaaatctatttgaactagtaacagcaacttttaaataaaaattaggtcagggtgagccttggcctgggttatttttcttatttttatttcttagagataaggtgtcactctgtcgcccaggctggagtgcagtggcacaatgatagctcactacggcctcaaactcctgggctcaaacgatcctcccacctcagcttcccaagtatatttttaaaagctcctcagggactctcaagtacaaccaaggttatgagccactgatttcaggtgaaaaatgaggcgctgaaggagcactgtgttccccaccaccactctccacattgacaccccctgacccttttgattttcctgagaggagatagaaatcctcctatgctgtattcaagttcaggacataataagttatttaacattcccctcagaaacctgaattctacctagaaactctgaacacagctctgggacttcagcagggctgaagtgtgcccagacacttctggtgtgtgcctgctggtcctataggatgtggtgaatcgtataggagaataaaatgaccccagagaaagatgtcagggccaaaagcccctggagggcatggagactcccttcctctctcctgggtctctggattaggataacaaataaactgaattcatgcaggaagtctgtttaacagttggcctctgctctagacaacccaaagggcaaatatgagaaattaatactctttcctttaacaataaggcaaaccttacctggcaagaaattttatttctgactaaggattcctcagcctttgcttgggcttagttttttgtttttgtttttcattttagggtgtgtgtgttggtgggtgtgtggatggggggcggtttgccttaatactttcctatacatctccccgtctcccttgtttcaagactttaggaaaattccatagttgtcacatctttgtgacatctgtgtcattgcatccttgtaactgtcactttctcaacggacagttttgaaaatatcctgtggcatcactcttttggcagggagcgaggagggatgatttaccatttctagaacttctgcctctctgagcccgacccaaggtctccaacagtgatgcagagaagcatttgcaaaggtctgtcgcctttcatggaagtgctctcagactcaccagcactccccaaacctcctgcagctctcttaataaatcaagtcctcagcccagtgtctattatcaattgcagcaccttctggggtgcatcctctgatactagtaaaatactctttaaaaatgcaaaggggcaatatgatgtggcaacatttcaggaagccttaagcttaatgactactattaactatttaaatttttctttccacttcttttcctaactgcaacctgaatcctcactcttctttttccaaaacggaatgtctctgagggggaagttaggtctttttctttcccaggatgcctactgaaactaggttgtggtcactcttgcatgatggtcactcttttccaataaccattccaaatcaagtttgagtctttacttgcagattcttaaatacttttacttggaggtttaatttgttctatccgaaagcctgactcgggcatctcctctgcatgggcattttgccatctgtgtgcatcaaggattggtgtctcaccaaggatccacctgggtagacttgtggctctgcagtgcttatatccagccgagcctaaatatctggcttagcggttctagaaaatattcctattaccatgtgtgactttctgccccacggagtggctgagtttgcaggctcctgcctcctggggctgctggttctagaaagcggactcccaacccaggtagctgcccaccagctgaatctggggctgccgagaacaggcacagctcttcccgaagctttggcagttgacagtcgctgcctccccttctcaggaatcctgtgactcttctagccttgagtgctgtctgtttgaagcctcaccctagaggggctcacctgcatcttcctagaagctggacccagtccctgagttgccttaatgaccgccctcctgctccctttgagtttcctgctcgcctagacagcctctctttccacaaagggtaacctctgcctctccctcatcttggctgtgcacacccctgctccctctccctgcagtgttcttagccaagtcaaaaacaaaaacaaataaaagccttacatggcattcatcctgaagcttttctccggagactgtctttcctccaggggagaagggctactacgggcatgttggaggctcccggtagttggagctccgaaggaggagctctgccgtgggcgttcagcttaactaggctttctggaaccaaaacagagcctggctgcttcccaggcttctccctacacccttaaagaagcaaggtcctctctttccttgagcacttctggacatatttgggaaagcagcatgttcagagatggccctgccatggtttcccacacactatctcatgtccgcctttttgctgaccacccaaagatagttgttcctgttttcacatccagccaacccctagtctagcatcctgtacctggagcctgggctcaggcacctccttccatcatcacttcctccctgagagttcttggaacttgctgaggaagagggcagagctttggctaattgttcttttatcgacaaattaagacaaaaaacccaatgtcctgttgctccagagctgaccatgggtgttgggggcatcctggccctccagaggtatgcattttttgttagtctgcatggaaatgttcccacttgagaaccaggcacctaacagcaggcactcaggaattacctgtttaaggaagtggattatatatcaaagagaggcgataaatatagggaagcttacacagtcaatcagaaagagaccatcagggactgggcttgtttctcagcctcttctgtacctgtgcagggttcagcatcatggaccgtcactgagaatgtcttgagactccaggcagcagggtggtatcatacccaagtcagcaaggggatctcctggctgtggtgtacttgtgccgtgctgacacttggccattcccacatcagcctgggttcctgctttcccctggccttttcccttcctgagaaggaacatgtcagtcaatccagcctgtcataatgttcactcgccatatcggtttgtttggcttaaagttagtttttctgattccatattaaaaatggatctttttatgttagattctgggtcactaatcttagtgtctttgttagaatgtcctggaccattgtatagagctttttctgtactattattctattctgttctattattccaactattctagggccagtgctatatagctgatagctgattgggtagatattatatctaactctacattttaagaacatgtttgacactttcatacatatattctttcatgttcactttagacatttttttttctaactccaaaaacaaatcttatggggattttgataggattatgtatatgcaaaataaaggtaacatatctattggacagccaatatatgtattacttttatatatattttatatatgtaaatatacatgttacatatataaatatatataattagataagagataactacagcacacttatgatgttgaaacttcttatccaggaacatgaggtttctcatttatccaagtcttcttttattactctcaagaaaatgttgtcattttcttcaggtagaagatacaagaggttttttgctttgtttccttgtttgggtatttttgggggttgtctggtttctcatcaattgcagaacaactttctgatttcctacttagaggcattgcttcctctcctgttactgatacctgtctgacctctgccccgtcacatctcactccctctttctggatgccatccccttcaagaaaggcatttacattttctaaccttcacaaggaccactctttcttctctgacctctgctttatatcctcttcccatcattgaccaatttccttattttcaaattttaaaccatggaaaaccactgtggctttctgaccaaaggaatgcactaaggaaaagtgcctcttttttttcttttctttttttttgagatggagtctcactctgtcacccaggctggagtgcagtggcgtaaactctgctcactgcaacctctgcctcctgggttcaagtgattctcctgcctcagcctcccgagtagctgggactacaggcacgtgccaccatacccagctaatttttgtatttttagtagagacggggtttcactatgttggccaggatggcctcgatctcttgacctcgtgatctgcccacctcggcctcccaaagtgctgggattacaggcttgagccactgtgcctgaccagaaaagttccttttagcaagagtaggatggatggatggatgggttagggagagaagagatcagaagcaggaggcgagtgctgggctgctctgagaagtggggttctgggtggtcaggcctagggtggagaggtgggaatggagaagtatggatggggatgagacgctttgggaaggaagagtggaccacagttgctctgtcttaggaccatgtggaggactagtgaagttcactattgctgacttgaggctttggctcagaaggacaattcaaatggatcagaatagatgactgccaatccttagacatggatataggcacagagagctctgccttgctcttgtaagtgctgctttagattattgtcagagggaaggagagagttggacagccctacccaacccactccctcatcttgggcagtactaaccagatgacacttgagtgtttagtagcatctggtggaggtttattttgattatgaagaacagcacttaaagcacctttttgctaaaatctagagcttgcataattccatttcaggtattcctttaatgcttattctttccttcatgatatgggtggaagtgctctgcaaatgtgcagaatcctctgtggggacagctctcccatgatcttggggtgctcagtggcgcacccctccctgacttagaggggtgtgtgcaggcatgtgtgttgctgtaagttgagctctactgagaatggggccaagggcatgtcaggctcggggccaccacgtaggtctgtgcaaattgcttgctacatgtggacactggctgccagagatgaggctggaatctgagtagtgcttctcccccaagctgtttgccatggggctgaatctcagggtgatggcaaggggcttcattttgtcatctgcataaagactccagttgagctggctgggctcctagagtgatggggttttgtggatgaggggttaagggctactggttcccagggaatccctgctgccatcctgtgctcacaagacacctgctactgcacctccagacccctatctccattctaggcaggaagaagggggatgagcacaaggcatggcccaccagttctattgctttttaatcaggaaaacaaaagccagaaccaagtcatggggccagcttcagttgcagagggtccagggagggaattgatttaatggacacattgccagcctgaaaaaaatcagagtcctgttgctgagtggggaagagggcatggatttggggtaggtgcccagcagtgcccggagaagcaggcctccagcaccacagtattggcattgctagttgtaacatccttctttgttgcctgtatttaacattctgtcaaacttttctcattcctttagcattccacacacaacataaaattagatttaaaagttaaattgagaatttccagggactcctgataagtttcttaggtcaactacgtagaacagaacactttccctgaagagtggggaggcatgtatgccacgtgtccctgggagcccagtgttcaaagctgacaaccctacccacaggaattgcccctcctgatcaccaggatccaaaacagctgggatgttttcagttgttgttgttgggtttttttttttttaaatgaagaagtttgagtttattcccaactgcatatttaaggatctaaaatagaaatttagcaactaagtctgggaggttccaggaggacttaagctgggcttgagcctgtttctcctcgatgcctcacggtccctggggctacagcagaacagtttctctagatggcttggctgctcccagccctagccagggcccctgctttagagaacaaggtgaggcctcagtgcaggagatcagatgatgagtggcagtcagttgctcagtgggaacctgcctgcacagtgtggttgaagctgcttggctgggtcagcaggtcctctgggatgtggccccatcaaacttccagtctcatccctgacagtttttaacaacctagacaaagccacttcttatctcctgaaggtcttctgtccccagactagatcctagacattctttagggcctagcccaagggtcagcccttccagaccctgagcccctccaccaccaggtgagttacagttgctctgctgttgagctccctcaacaacagagggtgcagcacaccccattactgtgctgaatgtgtcttcaggagatccacagtgcctcattcatctttgttactctagacttgttacatgagtcaaaatagccatcctcccaagtgtgtttgcctcaaaggaaacctgagcaagagcagggagcttgtggagccaagtcttctcccacctgcccccaggtgccacctgcacccaacttcctgagagctgaagaggaaagctgggggccttgtggtcacagctctggccagtgacagggttgactcatcaccccacagacactgtcttagtttgctaaggctgccataataaaataccacacacaggtgacctaaacagcagaaatttatttctcacagttctggaggctgggaactccagatcaaggtactggccagttaggtttctagtgagggcacttttcttggcttgtaagcagccaccttcttgctgtgtcttcaagcagcagagggagagaactagtagcactctggtcttttcttataatgacaccagtcccgtcatgaggatcccaccctcgtgacctcatctaaacctaagtatctctaaaggccctacctccaaatatcatcactttgggggttagggcttcaacttatgaattttgaggggacataaacattcagcttataacacgtgcttgccaagctcccatcttttgctaattctgggctggctgcagagataggtgaagcccaggacctgcctctgaggaccacacaggccacctgggaagccacacataaaagggctttgagaatgccaggacacttcttattccctgctctccttctaggcctctaagctggttcgtcccctattcatcctcaccagtgcatgccctttcctttcttttccttggaaggctcctcttcattcatctaccaggcagctgcacagaggcctaagtgcacaggaaaggtggaggtgctctggtataaggggcatggaatgtttgaatggcaaggtgagggctttgagacagtacagctgtagatctggaggggctgacaggccaatggtgctgtattctccttattgatcctctcttctcagcatgtaaaccagctctctctgggcacgcaccatatgtatgaaggccaaccaagacattcggacacctcaaagcccacaagaaaggaattctgaaaggttttgattttgttttcactgcttctatggaaaaaacagatttttttttcttgcaaaatatcacattttcccaattgaaggaaaatccattttatttttgtatgtgtctgactcttgaagttctgttgctgacccaagcttggcagcatctcagaactaatccctgatactttctgtgctgaacagtagccagtccttctctgagctgaactggggccatttgttttcatctctaaataagtagtgagtgcttttaataatgaaatgcagaaaggacccaagatgatgcattaatcttggattctccttttttatcactaagaaaactgctgcagatggaaaaaggcaagagatcattgttctggattccaagaggagtaacgccatcaatattggtctgacggtgctgccccctccaaggacgattaagatcgccattttgaattttgatgagtatgccttaaacaaagaaggaatcgaggtgagggaagctctattaagcattatttgtattttatcttatactgcatgtataatatgctgcatgtccacatttcaaaagatccatggtgcctttctgtctcaactagactctgaataaggttaataattcttacacgtgttaaactttttgaggggagggggagtctcactttgcctatgaagttcagcaatcttcactcaggttcatttaccagtctgcctctgaccacattctgcctacctcaaaatggaagaagactatgataacctccttgggaagccactagggtcttgtttcatgtcattttaaaccacgtatgtttaaaaaaccatacctttcaaaggtagggttttcagtacatgtgcacatccatgtaagaactttctctcttggcatttgttggggtacagagagacatatttcatttgataagccagagagctcaagccagctgaagctttagcatttgttgatctgaatgtcacaaagtagagagacactgggtggcatggctgtgaccgcacagctggtagctggagacagggttcacctgcagggcctgggttcatgttcttccacaggccacgttctccctccactgtgggttggtgccagtttagcaggttaaatctcttattataataatgaaaagagtgagcagagccgatgtgtcccacccaccaattcctacagaagggtattatagcttgggggcccactgggtcagagtggggatctggggacactgctttgtggcattgggtggcacctaacccatcctcctattggcagggggccccagactcctttaaagcctctctgtgattggggttcatcttcttgtttgagacacttgggcatggacagaaccaatgatgcctgactccagagagggagagcaagccttctatagaaaagttgagagtgaggaagggcctgggcctctggccagaatcacccatggccctgggaatgggagggagcagtgggcacacagtacgtagaggggtctgcacccaacccactaggcatgccttcatgctttggaaggaagggaccttcataggaaaagccattactagaggcctgaactgcattgaatagtggacccccaaattcatgcccacccaggatgtgaccttatttggaaaaagggtcttgtacatgtaatcaagttaagatgaggtcatactggattcaggtgggctctaaatccaatgactggtatccttataagaagagggaagtttgaacacagagaggagagtgctatttgaagacagagaacacacaggtatacagaatgccatgtgatgacggaggtggaaattagagtgatgtttttaaaagccaaagaataccaaggatcgtggacaaccaccagcactgggaagaagcaaagttcatcccctggggccttcagagacagtatggtcctgctgacaccttgattttggacttccagattctagaactgtgggagaatgcatttctgttgtttaagccacccagtttgtggcgttttattatggcacccctagaaaacctatataaggctcaagtagctctactctgagaaacatacaccccctgttccaggaacaggtacaataagggaaatgcacttctttcctggcagaagaagttgttccctgagctctggagccaagccaggcagcaaagccagtcagcatatccaggtgtgttctctgtcttcaaacagcattctcctctgtgttcaaacttccttcttcttataaggataccagtcattggacttagggcccactcgaatccaggaatccagcctatcgaaagagtgagggcacacggcagaccggagcaggggacatgaaggagtgagtgggcgacagctgggagatacagagagagagactgaggcagttgccagatcgcaggaaggggcaggccaggcctcagtgtgatgcatcccactctgggaccctcctagaggaacaaaggatgagcagggcagtggcctgctgttgggtggacctggatgtaccaagtgcaaagcgtgtccccgcagaccctaacccagtgacggatgagagacttacactgacatagatattttgtctgtcagtgcggctaaggggcttctgctcctgaatctgcagcatctgccccataagccagtgaagtttgcatttatttagtacggattaaatgacaaaggtcttgagtaaataccactagagggaaattaacattgccgacctcccagtagagagcaatcatgcacccacagataatcaagggttggtcttaggaccacatgagtaaacaagctgtttagataaactcccccacattcccttgttatttgctcttttgctgtcaactcaaggtagagaggattaagctgctttcagccaaatcttttactggagctatgcaacccccctggccttccaagaaggtttgcttctcttttctataatatcctcttacaatttttcccaccaccctgactgaactcccacatctctcctctaggggagataaggcagtggctcttgggccatcctatttacacaacaaggtcctttagagagcacaaaagcttcagattcatacggagagaggctacaaagatagccagagccagcctgattaaaagaatagatggacaactacccctttaaaaatatttctcctccttgtcatgagaacttgaaagtccctcaggagaaatttattcctttggttttgcctttgttctttcctgaaatgcaactctccccaggtggggaaagtttcagatacaataagttactcagattctagaatgaaccaaattattattttttcttgtctggctggtttccagttgagcacccttttgatccaggaaggaataattacagctatgacgctgacggatatgggagtagcagcacagcaccaaatctgactttcataggatttttactgtgggccagacaccaggtaggcgcctgccacagattctcctcaaagcttatgaggtacatatgctccccaacgtgaagaagaatgggagtcccagcattagtgtgtgcccaggctcccaagccagtgagccagagagccggggagcggggacacaagctctgaagcttgaatccagaatgcaggctgcggttttgtggggtggctggccctggaggggccctccaggcctgggtttgtgtgctgcagagaataagagggaatctgaaaggggagggagagacatgtatgcagcagcgcagccctcttcactgtgctgcctacatttgctacccaggagtagctgacttacagagcaatttgaagtgaggagacacagccacaggaaacactggtagcccttactgagattttattgcatcgtgagtcctcagtaaattcatagtcacaacgacacagagttacatttttactttctcttctaaagcaggtttctcaacttcaatgctactggcattttgggttagacagtgctttgttgtaggaggctgtcctgtgcattataggatgtttagcacatccctggcctctacccattagatgccagtaacacctaccctccccccacaaccaaaactgtctccatacattgtcacatgccccctaggagcaaaatcaccctggttgagagcccctgatctaaaggctgcctgtgtgaatccagagactgtgtagatctctcagcacttcccagtcacagctgtgaagactccagtcgaaacccctcttggagaatgtggcatccagggcactctcaggcatcacctactatcttgggccattgatctcagggacctgagaggcagagatgatctagatccatgtgccaaaccaatacccagagcttgttctctaggcttgttcaagagttaaatcaggactcagaagagatgcaattgggtacatacagatctttgttaatgagatttccggcttgcacccagagggcctttagccaaactgtctgcttctcggatgcaagcactgtagcctggcaccatggcttaacggggtcgtttgaaagctctgtgtacctaaatgtaattagaatgttttcatcctgtggctttgcttagcaacccagtggtatgtatccaggtttgtcatgaaaacctgaaagagtagttaacttcattaaggaagtcatttttcataagagtattaaaccagaaaatcattttgcagccatctctaagtagcattaatgatatttccccaagtaaaatggcatcaaattatcataaatggaagtatgacgatttttattttcttttcctttcttctcttaattttatagagtctgtgtctactcagagggtagcacaattgaatggtcccaaacagcttggcccaacttggctgccagtccaatcagcatcctagaaacagaagttttctttggccacagataaaaaatgacagcatctttgaaagcagtttaacctgtacagttcctgtccacaggtgcccagctgcgcaggtgctggatacacacagaggaacctgaccacagagagtcacagttgacttagcagtgccagggaaccagaatatcttgatgactgagtggcttagctgcactgttaatttgcatttatggttgaatttattcactattaatttgaatccctatgaactatggagctagtgctagaaactagaggtagcccctgggttcttctctagctccgccttggtggatccagcttagcttcaggcaaatcattttgtctgtgtttgatacaataatttctgccctaaagtgcctcaatgaataatcataagaatgaaagaagatactatcaagatgctttaaaaagtttttttttttaagttgctacaggaaagtaactacctggatagaacactattttctcatgcaaatatgcatattgtatgcaaaccagacatagccctcagggcttcaactttcaactttggtcaccaaaatccttgtggcagatgcttatacaaagctgtagccagtgttctgtttaaaactcacagggcaaaaggattactcattatagtttcatgtgcaggtagaagaaatggccaaacccaatagtattggcgtctatttttaaaaagggatttctgcatttttctccaaaatacatgactttcagatacaaaagcaaatatacttagagcaatgctggagagacgctgtctaggcaaacgctaaaaacatggaagttatcacattgaaacaggaaattttctgtgaccccttcacgggccttgtgatgggggtgcctcacttactcagcttgcagctctcaacccctctagggagtgggagcacacaggtgagtgagtgcaggagctggggcaagtgcttctgggcaccagcaggagcaaaactccgtgtgggccctgcagtggtgtctggcagggagtacccgcaacccctgacaccccacagggcatgtgtacagtgtgcactgttagctttgccatcatggatggcttaaatgttaactcagttggccctctgccttttcatgtgaggtggttgctctccaccagtgagggcagagggtcagtgtgacagcctttagcgcccgcatctatggcaccagagctcttgtttagcgtccagaaaaaatcaggtcacataaacgaattgaaagatggtgaatacagagggtttcattgccagtgaaagtggctctcagcaagaaggagagctggaaaggggatggaatgggaaagtaatcttcccccagagtctggccatccccagctgcactcctctttgaagcaatgctgtcaagccatccctctgaagtcaagctgcctctctctgacatcaaacgacaatctctgatgtcctgctgcttctcctcttctccccttctctgctctctgccagtggagcctggggtttttatgggtacaggatgggggtggggcagaccaggagtggttttggaaaaggcaacactcgagtgggaaaatagggatgtaaagttctcactttgggccacagttccaggcttgagggtggggcctttgccaggcaccccacccttttctgcctagaatttctctgcttcctatccctatcaacatattggtcttgtttgatgtttgctttcctgtgaaatcaaattatgatcgtgcaattatcaataaatctactgacttagaaaaacaaattaaaaatactacctcataatcatcacagtatcatctgctcacaaaaaacaagggccatcagctcataggaggggctcataggaggtggctttaacctgcccttccactgtcttacagctattcttattgtcagtgatgtgtaaaaaaataaaatggcaggtggcaacctcataaatcttcaacattgaacaaatagtataaattagagaaatgaaaaacaaaaagaagagtaactgctttctcaaaggaacaaagcaacaaaattcatcacaggaagatgtcttctgaaggttgtacaaagtgttgacagtttttcattttggaattttggtcatgccagaaacaatggcagtgctaaggaaattaaaatagaaattttagagaagcatttattttgaagactaattgagtttaaatcatgcatgtttttaaggaggcaacatctgcttgaagtgtcttggctatctcttaatgccatctgcatgaacaggtgggacacgtgccaggttgtgggcaagcaaggaacactgccaccacctatctctccagatgctcaaactccacctgaagcctcagtgattggagccctggtgaagggaaagttgggaagggaggtgcctcaggctcaccttcgataactttacactgactacagcctgaatgcacatctgcaatgcagttttgcatcactggcttctgataaactaaggccgctctgcctgttaacaccctcttcaagcccaggacctcatctatcccagccagatacgtcctgatgcacacttgtgtaaatatctgcatatgtagagactgtggtgtcaagagccctgtttctcattttgttatttatttttttagcttttgaactaatatagagtgcagtcgactttttggtatatggttctcttgagttttaaagcatataaattcatgcaatgaccactgcagtcaggatttaaaacagtcccatcttccaacaaaactcttgtgttgcccttttgtagttgtaccctcaacccacctctggcacctggtaaccacttatgtattccccatcactgtggttttgtcttttcaagaatgtcctgtaaatagcatgtaaccttttgagactggcttctttcactcatcatgatgcctttgagattcattcaagtcattgtacatatctatagtttgttccttttattgccgagtgctattgcattgcagggaatctactacaatttatatattcactgctcaagaatatttagcttggtccagtttttggcagttatgaataaagctactacaaatattcatgtacaagtgtttgtgtcaaagtaagtttccatttttctaggataaatatccaagaatggaattgctggatcatatggtaattctatgtttaatcttttgaggaactacagcttgtcctctattctctaacagtgtctatcacaaagcaaaagtttttaactggataaagtttggtttattatcttattcttttttggtatcatgtctaagaattttttgcctaacgtgggttataaaagttttctcctatgttttcttctaaaagtttcatagtattccattttacttttagatctgtgatccattttgagtttgtttacgtatagtgtaaggtttaacttgaggttgctttttttgcatatagagtctagttgttctaacaccatttgttgaaaataatatcctctctctattgaattgccttgcacctttttcaaaatcaatgggccacatttatgtgtcctgttctgaactgtctgctctgtcccatcgatctaggtgtctatccttgtaccaatgacacattgtcttaattactatagctttttatttattaaagtcaggttatacgatttctccaaggttactctttttcaaatttagttgttctagttcttctgctttaccgtgtaacttttagaatcagcttgtctctatgaggtaggagagcagcaggacttgttttctggtcccaaccctgatgaccaaaacaggatctggttcagatgggataaagcaaaaaaactgacaaaaaccacagatggtgacaaaagcaatccttagctgccctcattgctcataggtataagctactcccactaaagccatgacaatttataaatgccatggcaacaacccacaagttaccacccctttccagggcaagaccaaaaacttactgcccctttcctagaaagttctaaacaacccacccctcaatttgtgttgacctggcttttaatttgcatataattgaaaatagatttacatgagtataaatacagttgccaagaacccatactttgctgactctgggcacactgcctaggagttagcccagctccagaaggagcagtactgttcaataaaaaatttcagtctatcaccaccagcttgcccttgaattctttcctggttaaagccaaaaaccatcccaggctaagtcccagttttggggctcacctgtcctgcatcatatatctacaaaaaattatactggtattttgattggaattgaattaaatctatagatcaattttggaagaattaacatcttgtctgcgttgagtctttcaatccatgaatatagtatgtctctccatgtgtttattatttgtttctatcttcgattgctttcatcagcattttctagtttccagcataaagacacttaacaggatttgttagagttatacctatgcgtttcactgtaaatagcatttaaaaaaattttagtttattataaatgtatagataacgaactaataagatggatttttgtgtattgaccctatatcatacaacattgttaaactcacttctttgttttagaaattttttgtagattccttatagttttttatgcagacaattatgacatctgtgtgtatgagcaggtttttcctttccagtctgtatgccttttatttcttttatgtgcctggctaagatttccatatggtgttcaataggaatagtaggagtagacatgagaatttttactttaaaaaatgtaatcacaaaggaatttgagcgtaggagaatcataagtattctggtgcctttttgccttctctgccttccacaattgatttttaccagaaacaaatagaagtaaaaaggtatacttttttattagcttgtatttatggataccgtcatgattttttctgcaatcagacttaagtttagtattacttaaggtactatcatttctatgtaagttttgaaatacagttaaaatgattatatgtcacatgaacaaaagtcaatctgagttctttgaaaatgattcatttttataagcttttaaattaatgcaggagaagtgctacaaagcatatcttttttacatgtcttactctacttcctagggaatagggagctgttctctaatcttgtgttttgtttttcatctttctctcacctctcatctccctttcttgcctagaatgtcctatgtgtgtgagaccctgaaaatttgggtcaagttgcttcaagtatatttggtttatgacaatataacacctgtacatacctctactacctggttggaaaattataatatgaattttataacattgaagggacaggggagggtccatcactaagagaaaatatactatatcatctcctatttccagaaaattctaacgatgattcccaccgatgaggagaagcagaaaatccaggaagctcagctggccaaccctgaaatccccctgggcagtgcagagcagttcctcctcaccctgtcctccatcagcgagctctctgcacgacttcacctctgggcattcaaaatggattatgaaactacagaaaaggtaagctctctgtaagagaggccgctgatcccacatccacagtgttgagaaaggcagtttttcattgatcagtactaaggcagtgaaatatcattcttggcatagggtacggagggtgaattgacaatgaggaggtcgtgtgtacaccaagtgatcagcagctggccaatgaaggctgattctaaagtgtctgcctggtgccagcctcagacactagattgtgggcaccaggtcactgattacaaaacaaaacaattacatttttttttcagatcctatattctcattgtagaaaatatggaaaatacagaaaagcacaatatagaaaatttcctataatccttccacgtgatgataatcacctaaactgccagtgattgtggcaattagcaggtctttttatgttgcctattgcaagagtttgggaggggaacagaaggaaatgggccttaatggagaaagcttgaggaggctcctcctgagtagaaagcagaggacatgggcatcctctctggaatagggcagtgggagtttttcgcaggctgaacagaaggagccagtgtagaagaaaaggaggagatggaaagtgaactgtgtgggatcttagttgagaggaagtctgcagaagagagattctatagcccaggtgagccaggtgcagtggctcacacctgtaatcccagcactttgggaggctgaggcaggaggatggcttgaagcctggagttcaagaccaacctgggcatcatagtgagaccctgtctctacagaaattttaaaaacttagccaggtgttgtggcatgtacttgtagtcccagctactcaggaggctgtggcaggaggatcacttggggccaggagttcaaggctgcagtaggctataatcaccttactgtactctagcctgggcaacagagtgagacctccatctctaaaaaaaataaagccaagtggggaggctgtgtggtctccatcttctggcaaaggaaggagcaaggtcctgtactgagggccagatggtggtgggtttgggggactttagaagggaactacagtatttgaattcatcaggaagtcaagcagagaggaagacacctagggattgctgaggtgactgctatgactgggtcacaagaccagacagcatgctcaggtgactttttttagccaagggaggtaacatcagggagaaaacagatcactgggtcagcctggcaagacctgggctggagaaactgaagctggatttcctggctttgggatataggctgggggagagcctcagtcaagacaaaggagtgggggccacagaataacagcagtgagggtgggggagatggaggccatgaggctacagagcaggctggaggtctgagggagggtgatcatgaaagcagtggggtagagggcagtagccttctagtgagcagcccaggctgccaggtggctagccgtggagtgccttgaggggaggaggaggcctggggcagttcagggacatcgagcgcacaactttcattgccaatctgcctggaaggacaaaaagcaaagaagaagactgtggtctagaagccgaaggaagatgagaaggaagagtgtccgaggagtcagccacagccagaaaggagagtaagaggagggcattccctaaggcagaaatggggagtccagagcccttgtcaccccagcacaaggtccttttggtctccactgcagggtctggggagtagaggctctccctgccacacgtttccatacctaggagcaatgcccatcgcgggggattgccttgtgctggggagaacaccgtgtgttattcccttatacaaaaagtcagaagaacaaagtaaacccaaattgtacactctttattgtctaatttttttttaactgaaaggaagtagcagaaccactcctggacctgaaggaaggaatagaccagttggagaacaataaaaccttgggctttatcctgtctactctcttagccattgggaactttctaaatggaactaatgtaagtcatccccatccctcatcctgtagcccccccttgtcacaaaatccctgcccagcaattgctgatgaaggttgtacctcaggttccccaaagcacagtggaacaaatgacttttgtgtcttcttgctgaaaatctagaaggaatttgttcttaagatatcagggcctaggccgggcgcggtggctcacacctgtaatcccaggactttgtgaggctgacgcgggtggatcacgaggtcaggagatcgagaccatcctggctaacacggtgaaaccctgtctctactaaaaatacaaaaaattagccaggcatggcagcacgcacctgtagttccagctactcggaatgctgaggcaggagaatcgcttgaacccgggaagcagaggttgcagtgagctgagatctcaccactgcactccagcctgggtgacagagcaagactctgtctcaaaaaaaaaaaaaaaaaaaaaaaaaaagatatcagggccgatttatttcaatctgtgtcttgctataaataagaaaacagaaaaacacacacatgattctttatgaagtgtaactactctcaaacttgacattggaaaacttccttctgccccattttttttctgagcttatcactcaaatactcatgcttataagcattttgatgcttaaagaaaaacaactgtttaaaaatcttttttttaagttctggggtacatttgcaagatatacaggtttgttacattggtaaacatgtgccctggtagtttgctgcccctatcaacccatcacctaggtattaagcccagcatgcattagctattaagaaacgcaactttttaaaattggctcagctttgtccaggaagtagacaacaacaggcaaagggaggaagaagtagataggcagatgtcagagcccagccccacagcaccctgatttaggggtgagccctgggacatggctcatggctgtggtgggaaagggctagaggctccctcattctcagggtggctggcccatgtgtgatcagccatggatcatggagcatgtggccccaggagcttcagccacagagaaactgaatgttgggtgactgcagccaagaattgatcctaaccatcctgtgctattctctaagagcctgcttgaaacatgtcttttattgatgtttgcaaaacaggccaaagcgtttgagttaagctacctcgagaaggttccagaagtcaaagacacagtgcacaagcagtcgcttctccaccatgtgtgcaccatggtggtagaaaacttcccagacagctccgatctgtactcggagatcggggccatcaccaggtcagccaaggtatgtctgtggacgctgaggagtgggcctggtctcgctgcagccacgggatctttatcggtcatcctcgaggaacacgagccctattaagtaaaatgcccaagtgctgcctgcattctctgctctggagtttatgaatatgatttgttttgtggcatttctaatgaacttttaagatctttttcctatctctggttctcagtcagattctttcctactaaggtatgcaaggcaagcctgccatcccattcctaaaccctgcgtccactgttaggcagtgttactcaccagggtggattctccagaacgctgaaacagcacagcttgtcttaggtggcaaccatgtcaaaaagatgcaatttggctcttcctgagatgtccataggaccttgcagtgaggtgtggagccagaaaacagggccctcccggctcctgctccccacagataggcagtccctatgatcttgcccagagggaacatttttatagagctgtaaacagtatatggccttggccctcagctgcaagctcttaaagcgagtgcagagttaatatcttcatgaacttatgcttcattagaaaagagacagtcacagtatgtggacacctggctgcctctagtgcagggggtcactgaggctgaccaactcctagagggatcccaaacacaccagaactgggagatgtgaaggtcttaggagcacaggaaactcgctaggggagagggcaggggtggaaaatacccttaaatagggcacagcaaccaggctagtgtgaaggaaccttctagaaacactcctggctggagcatgagagctggaagtactggggtgtgttggaatccagcatgagaggaagagagagagtggtgggcaaaggtggggaaggatgtgggttggctgctgaggcctgcttcaaggggccctccctctctgtctgccttctgccacagccctggcttgtggggacctggtggccgagagcctcctccacctacctccagagccacaggctggcctctgccaggtgcaccgagcaggggaccctgaactggcctatcagaatttttttctaagcctcattgtatcatgagaaagcgaagcctttcctatctggactcaggattcctttggtttcagacaaatcattttccccaaagtgccatgaaaccctgcatacctgaatcccagggctttgcctaaactcgccttctctttctgatgcaatagcatcaggaagcccagtacatacggtgtcttgcatgcctccctgcctcacaccagacacgacactgcgtgtctttatcctgttggtgccacagatcctcacagaatccacctttgcgaactctttccccttcattgtccttctaagggtgggcctggaggtctgaagtcactccagcaagtcccctgtgggcttcagaaggccctgctcgttgcctctgtcagtggcccctaagtagcaacggcttacctccgcgcccctgctcacctccacgcatctcccgctcagcccctcccgaccccgtaccctctgtgcacctcccgctcaccccccgccacaccctccatgcacctgccactcatccccccacctgcaccctccgctcacttcctgctgacccccgtgtacctcccgctcatccccgccacaccctccacgcacctcgtgctcaaccccgcgcacctcctgctgctctgacttttgcttgctggacacagcctttcccatcttagctactttccatccacctcagtcccctcctttcagcacacccacttacctatttcttcctccgctcctgtccttcacaatttctttccccatccctttgttaaatgtggccctctgatgtatttttttcatgactaaaaatctctctgatttatgtaatttttagtctggaaattctataaaatcatcaccttagaaaacctcatctcagtctccttcaggcaatccagcctgtctgcacgtccctgaatacacagccagcactctgttacatctgtcccttgcatgtgtgatgtgcatctgctggcaaccctcacccacacacaggcacacacacgagcctggtggggtctgtgtgtccttcagagtttgggaatcacctgtgggtacagttagcctccttgagaacaggaagttgtcttattcagcatttgtgtttatgttcaatgcctggcttagagactggtgtatgctagtttctccatgagtgttggtggaatgagtgagtgggcaggtgaataaaacaacttgtcactcacattataaaggagatcatcacgaagagaagctggctgcccattagttggtccccagcatagcagagccatcttcataggactagggtgcatttctcaactttaagagaaatattatcgctgaagaataagagtgctctgaaaaaaatttatgagacatcttcttagttcatcttgtactagggttccttgatatcatgttttaatttacagttcccaaagatttatttctaaatatggccaaaaaaggtaacacatgtattaagttcatttggagaacagttttatcactaaataatgtgatgtcaagataatgacagatacacatgtgaataatttttaggctgtaaatatgtttgcatttcaaaatgtgaatttcgttttgatgtttgtttctccccagaggcagttttgtctctcagttcaggctggtgtccggcggtttcagtgtttgcagtgttctcgctctgattttcaggttgactttgatcaacttcaggataatttatgtcagatggagagaagatgcaaagcttcatgggatcacctcaaggcaattgcaaaacatgaaatgaaaccagttttaaaacaacggatgtcagagttcctgaaagactgtgcagagcgaattataattttaaagattgtccatagaaggataatcaacaggtaagtggattgaggaacttatagaaatatcagtacaatggcatattgaaaaatttgtactggaaattaagagccgatggttaaatttacagattttttgtacattcttggtacatagcaagtacactgatgatacagatgtttaacagtttcatggataattaatttttcttacacaataatataatgccatcaaacctcaaagttggaaggaatctcagaaataatttgatccaaaaatcctacctatcaggaactgcgtctgtaagatttctaacaaattgaaccctgcatctctgggtctgctggaagaatttcacctatagagaggacactccctttcaaggcagctctctttgttagaaaagttcctcctttacctgatctgcagctggccttcggaggaccttccagtaacagatcctccaacagctgcttagctatgccacagcctacctgagggaggtccaagctccatcacagcactgtcctctggaccagccctcctcagagtcacaggatccaagaggaccctggagacacagcagtgatgtgtcagaccttgttgtgcccacaaggagaatggggtctggaacagcccatggctgtccagggccgtgccaccagaaagcagtggtagcccgaagactagaacctggatcttctatcttcccaggccagggcctttcctaccatgtgctaccactctcttctcctttgctttgtcacagaacacggttgagggaccctcacccattcttccttcctccctccctccctgcctttcctttctttcctcatctccttctttcaccttccttaagcctatacagaactttttaaaacctgatacttttatctgcacatgaaccctctcccagcttgtgtcagtttctgctttgatattcatactccctgggtctccattcagaccactgagaaaatggcaagtagtttttaaagttggacgggacaaaaataagaagcagaatcttccctccaggttgacaactatccgtcagtcagttcttttggaatttaattgttcaactataaatctccctgactatctatctagaccttctggctgtccttccttcctcaagggaacttttaggatattttgtcagatttcttactgaaatcaaagaggcagggaatgtgagctggtttggccctccatgctttgtatgatgcaagcaattccccatttaaaatacacgcacgcgcacacacacacacacacaacacacacacacacacacacacacacacacacacacggagagagaaccaactattatttggaacgtcatgaaactggagtaattttatgaatgtcttataaagctgttgagcttggttatgttaaccattttatcccagacagattaaaaactcagtttggtggtgtgtctatttcttaagctataaagtatttgctctgattatcccattctccttggtaagctggtcacccagatgatggctgctcccgcctcacctgtccacatcctactggggatgaccaggaggagccagaagttcactgtggttttggtgtgggtagtaaaaggggcgtggctaaagggaggtggtacccggaagtggccagtccaaagtatctaaaccgtagaaccctgtgttcaaatgaagtctttagctggagcgctgtatgtagaactgattaaagcaggactctcttgttgaaattgagatggaggactgagagccccaaggactgtgcctcatttttccttccccctcccaccaacagtcctcaggatcatagctgaggatggctgtgatttttttttttttaaacttaacacattgggaaactgaggcacagaaaggaccctattcagggccttacagctggtaaccagagggatcatcttagtcatgcaaatgagcctgcctaaatacttatattttgatgtcagatcaaaaagtttcaaaaggtgtctctttgggtaaaacctactttttgaaactgtttcctggctaagaaaattttgttttggatgttcaaacctgcatttgttttaacttttattttaggttcagggatacatgtgaaggtttgttaacataggtaaactcatgtcatgggggtttgttgtacagattatttcatcacccaggtactaagcccagtatccgatagttatcttttctgctcctctccctccttccaccctccaccttcatgtccagtgtctgttgtttccttctttgtgttcataagttctcatcatttagctcccatttataaatgagaacatgtgatatttggttttctgttcccgtgttggtttgctaaggataatggcctccagctccatccatgttcccacaaaagacatgatcgtgttctttcttatggatgtatagtgtttcgtggtgtatatgtaccacatttttttatccaatctgttattgatgggcattgaggttgatttcatgtctttgctgttgtgattagtgctacaatgaacattcgtgtgcatgtgtctttctggtagaatgatttatattcctcttggtatatatatacccagtaatgggattgctgggtcgaatggaagttctgcttttagctctttgaagaatcaccatactgctttccacaatggttgaattaatttacactccctccaaccgagtataagtgttcctttttttccacaacttcaccaacatctgttattttttgactttttaattataaccattttcactgatgtgagatggtatctcattgtggtttagatttgcatttctctgatgatcagtgatgttgagccttttttttttccatattcttgttggtcacatgtatgtcttcttttaaaaagtgtctgttcggggccgggcatggtggctcacgcctgtaatcccagcattttggggggccaaggtgggtggatcacgaggtcaggagatcaagatcatcctggctaacacggtgaaaccctgtctctactaaaaatacaaaaaattagctgagcatggtggtgggcacctgtagtcccagctactcaggaggctaagacaggagaatggcatgacctgggaggtggagcttgcagtgagccgagacagtgccactacactccagcctgggagacagaggaagactccatctcaaaaaaagaagtgtctgttcatgtcctttgcccacttttagtggggttgttcatttttctcttgtaaattaaagttccttaaagatgctcgacattagacctttgtcagatgcatagtgtgcaaaaattttcgcccactctataggttatctgtttactctgttgatagtttcttttgctgtgcagaacttcttaaatttaattagatcccatttgtcaatttttgctttcattgtgattgcttttggtaaatttcgctgtgattgctttgtcagcctgttcctatgtccaggatggtattgcctaggttgtctcccagggtttttatagttttgggttttacatttaagtctttaatccatctagagatgacttttgtatatggtgtaaggaaagtgtccaatcttcaacatttgactagccagttatcccagcaccatttattgaatagagagtcttttccccattgcttgttttgtcagctttgtcaaagatcagatggtcataggtgtgtgaccttatttctgggctttctattctgttccattggtctatgtgcctgtttctgtactagtactatgctgtcgcaattactgtagccctatattgtaaagttgggtagtgtgatgcctccagctttgttctttttgcttaggattgccttggtaatccaggctctttttttgttccatatgaattttaaaacaatttttttctagttctgtgaagaatgtctttggtagtttgataggaatagcattgaatctgtaaactgctttgggcagtatggccattttaatgacactaatccttccaattcatgagcatgggatattttccatttgtttgtgtcatctctgatttctttgagcagtgttttgtaattctcattgtagatatctttcacctccctggttagctgtattcctaggtattttattcttttcgtggcaactgtgaatgagattgcctttctgatttggctctcagcttgactgttgttggtgtgtaggaaagctagtgatttttgtacattgattttgtatcctggaactttgctgaagttatcagctgaaggagcttttgggctgagatgatggagttttctggatatagaatcatgtcatttgcaaacaaagatagtttgactttctctcatcctatttgaatgcgctttatttctccttcctgattgccctgaccagaacttccaacattatgttgcatagaagtggtgagagagggcatccgtgtctcctgctggttttcaaggggaatgcttctagcttttgcccattcagtatgatattggctgtggatttgtcatagatggcccttattattatattttgaggtatgttccttcaatacctagtttatcgagtgttttaacatgaagggtgttgaattttattgaaagccttttctgtgtctattgagataataatgtgggttttgtctttaattcttaaacgtgcatattaacctttccttttatccttttgtactctctggatgtacagacccacccactcactcctgtagattcattaggctacagttgcactgtgaaaggcacagagagggactggggagaggaagagaagaaagctgttattagtcgattctcatgctgctaataaagacatatccgagactgggtaatttataaaggaaagaaggttaattgactcacagttctgcaccactggggaggcctcaggaaacttacaatcacagtggaaggggaaccaaacacgtccttcttcacataacggcagcaaggagaagtgccaagcaaagcgggaaagcccttataaaaccatcagatctcgtgagatcttactctcacaagaacaggatgggggataccgccccctatgattcaattgtttccacctggtccctaaacaatgcatgggaattatgggaactacaatttaagatgagatttgggtggagacacagccaaaccatatcaaaagccttcctgggaggcctagcaaactacagcaatggactgccattcaagggggagagacaggcagaagacaagtaaacaccaagactggtgtgccattgcccaaagtccacccctcccattctgggctagacagtggcaggcttgagtaagagtcagatgatggaacaaatcaaagatgtttgacttgtgctttggcttactggttaggggggccagcctgcccataaccatacaatcttcatatcatgtattctaaaagttacaaactcaactgaaaaaaattccttaaaagttttatggcctcaaagtcatatcctttttgttcttctgaaggaataccatagtttctctcttttcaaatgtatatctggatctttttcagacctttacttgtttgttgttactctccttgtttgtaaaatacatgcttaaataacatttccaatttatatgttaagtttggattccctgtgcatccaaaaacaatgctctagaaagtgtaggataaagaatcttgggttgtacttatgtataaaataggacccagaatgttaatctattagaatgaggtgaagtggttagctagctgcaggctgatggattctcccctcaaatcttcctgcatacagatcttgaatagttgttatattatactgtactgtcctatcctaatatcatatcatatatctaatatataatgtcaagtggtaataacagccaggaagaaaaaataagagtataaatggttaggtagtgacctgacacagggtggtcatggaaggcttctcggaggaggtggtattttgggcagagacctgtggaatgagtgagagccatccatgcagctgtcagtagggaaaacattctacacatggggaacagctggtactggataccttgtcaggcctgtggtcctaccctgtggagtggcctcctcacccctccccacaggccctgcaggctctcagttccttggcctctgtgtccctccagggctcctgcacactacacatggtgtctggggctctgaggtgggctttttcagggaataaccaggattccagtgtaactagagtcacaagagatgaagtcagagaggtgatagggctagtcgtccagggccttatttggaaatgctatatttagtttatccatgcattatatccatccaatgctatacttagtttatctttccatggacatttgggttgtttccactttcagctattgtgaataatgcttctatgaacttttgtgtagaaggttttgtgtgtacacatattttcatttctttttatgcaaatgagaaaaattgctaagtcatgtaataaactctgtttatctttttgaagaactgccagatcattttctatggctgctaaaccattttatcttcctaccagcactgtggaaagggtccaatttctccacatcctcaccaacatttgttctagcctgtctcttttattacagccatcctggtgggtgtatgtggtgtctccttgtggttctgatgtgtattccttagtgatgttgagcagcttttttcatgtatctcttggccgtgtgcatatctttttaggagaaatgtctattcaaatcctttgtccattttttatttgtctttttagtgttgcgttgtaagattcctttatatattctgacacaagtcccttattagacacatgacttgcaaatattttctcctatcttttagattgtctttttagtcttgataatatcctttgaaacacaaaagtttttaagtttaatgaagtccagtttatctactttggtcacttctgctttgggtatcatatctaagcacattaatccaaagtcatgaagatttctactttattttcttctaagagtcatgtagttttggatagcattttttaggcccttttactttaaatacaagttgtatgtttacttcattattcgtctcaaaaagagtaagccagtgtcccttattttaaaaaatccatattcaagctgtgcaaattagagtgatcaaaattttttgtctataaatagtggtatcatttgcgtaatgttgtttgttccacagaaagctttccctctgtctcccactgtgttctttctcatttcctaataactaaaatttgggtacttatctgctcatgtaatttcttttacaacattttaaaacaaataatgtttaataatttttgtttacaaattaagtagttaaaataaatttattttctgcttctttggtgtttcctaattaaattaatattatatataatatcacaagaaatgtttaaaaatatttactcagaaaacagcatctacttagaagctatgaattaacatgttattcataatatgttcatgtctattttaagtgttcattccaaagaatttctaagcaacatttctttattcctattgaattgtcatataatctagaaatggtgcaatacttttcgaaaataccactttaacatttttcttacaaaagttttacatatatccattttagaaaaatgttaaaacacagatacgcaaagtgaaaaagtaatctgttgaggtcctgccacctagatataatctccatcagtgggaaagtgagttgaacttctgtttgcattttcacttgagaagactcttgaaattcaaagccccaggaatgaaggacagtgtcttcttactgagagtgtggcttgttggtttctttattattattattattattattattattattattattatttattttaagttctcacattggtttcttactgagagattttagacaagtaatttttatttcttaaaacggaagtcattgctattactgttttttccttgcagattccactcctttttactctttatgggccatccaccttatgcaattcgggaagtgaacataaacaaattctgcaggattattagtgaatttgcactagagtatcgcacaaccagggaaagggttttgcagcagaaacagaaacgggccaaccacagagagagaaataagaccagagggaagatgatcaccgatgtaagtttcacacaatccctctccttatgtcattcgttttcaaagtaagatcagtcaggaatcctccccacagttaaaagctgtgcttttttttttttttttttttttttttttgactataaaaaattatctcttttaaaaagtgctcttaaagtactcctccaccatttctgtgaaaatctgctaaataacaaggagctaggagatgtaaagttcagaacgtgtggctagaagaggaacatggaacccattttggtgtgttgcatgttgctgatgacattaaatgtttgattctatttttgtcctctgtgatgtgggtaaagttggatgaagacaagtaaaatataaaagataatgccgcttatcatagaaagacaaatgtactgattggggcattgattcagaattttaatcatcataacggtgctgtgtaaccaatcagttgacacatggaccacccattgtgggcatctgaataaactgatgtgattgctccaagatacaatctaatgggctcttgccagtcccttgaatcacaggacatcagggtggaaagagttcccagaggacagtgaatccagtaggagtttccccatagcaccctggggagcccctgcacacttacatgtctcccctgctcccgggctctttccccatctctcctgtctcagccccaagcctacctaggtcttggggggcagtggatattcagatgacagatgctcagtaaagtggagggtaaagggatgcatgacgatgccagagaccaacggaggtacatagtgcaggttcctttttcttaatgtgcctttacgaaacataaaaaccaggctagcatctcacttacctcatccattactgtaaggtcagttccaggcaaaaggctgaaattttctgggaatcctcctttagtcactatttattctttcttgaacagactcaacgataataaagtcatcttttttgatattgacaggtcatatttggaacttgttgaaggactctagagtgtgattttttttcatggtttggattgttgcccatggatttctcccatctgtgcgtgcatttgagtagcacatggacttctggcaatagagggaatggaatgaggaaaggattaagccacagggcgtgccatcatctgggcagttacacatttcaactgaaccctagttaggcagatttttgctgggggaggaagaaaaccaattaggaagacctcactgaagccgccctatgtgcacagacatgtgtgtatgtagtcagccaagcagagggcacttggttactgctctctagaagtccacattcctgagggtctgacttacatggaaggccagacacattaacttagcaattttgttataattttaagaaccacgggataatcatttctcttaccatccacctttgtgtaagctccttgttttcttggaattttctggacctttaggaagtgctcaggtcacttttgtgcagaaggagccctttctacagctctaccctgcacccaagcagttctgaattccagtgccatcagccaagagtcttctgtatcctttcctgaaatctcagttcagtaggatccacagcctcttggaagacagcaacccaggaagcatgttggatccacttgggcaaactgtggcccacattttattcatagtattatttttgaaagtttaaaaaaagagattgcttattttgtggctatgagacacatacaagccgaatatgcttatagttatgtggacacatcaaaatttcttgctaaattcttgagattttttacagatcccactaatttttaaattctttctcttaaaacatttggctttcccaatcataaacagaggtgaatgtttctagagtttgattcaaaaatatttaaattcccattaaaatctggacaggataggcttcgtcaggattcattctcagcctagtccatgtttttaatggccaaagtggcatcattcatgtagaaggattgccctctgctggaacattaggatattgtcccttaaggaaaactacagccttgggtttttccaactcaattattaagggctcattgtgcatccagcagtgcctgggacaccaaggaagatgtgagtataaagaaaagcttatatcccaaggacatcataacctggttaaaaatggcatatacacaacttaaaccactgaaaacaaagccagacagtagacttagaatcacggaccccctgaacgttggagctagaagagattttagagaaaactgtttgtagtaagtcaccttgaatgtacatgctgaataaaatgaggatgcaagtggtaacatttagagatgagaggtctgagggtaaaatctgcagcccccacgcaccagctcctgagtgcctatccctcttcttctccccgtttctgggtattcagaaggcttccttttcatcatccaggggtcctcccaggccaggatcactgagcaactaattcctcatcctgtgtacaaagttggtcctagagcaaatggtgacatagacaaggcaacacgaggcacctacagcctttctgccgcattcacactcgtgaggtgggctgtgagaacccaggctggtcaatcccaggcctcccacgttggagggcagtggtaatcctgggtgagacccttaacccttctcaatgccagcttcctcttctatagaaagggaatgatgattacttttagggatgttgagcgggccaatattttatatatgtagcaccttgaacatgtgtgaatttctggaaaaatgccagccatcccaggttatataaataaactgtaagaattttttaaaagagagtaatggaacaggactgttgtctcttgtcacaatgccatttggatgaggcagcgtggaatgttacggactggaagtggtttgtcattttaacttccaaaagcatagttcattctcaaaacacttcaatctgatttgctggcctggccctgtaacctcacagacactcctaaattgaaagtgtgtttaatttatgatcaagagattgacatgacttttcactctcaatttatgttagaagagagatattttatttaaagtaacttaaagcagtttagtgctaaagtaattaaaagtatggagagtcagttcaggtggctcccatgagaaacaggtgagatgttaaaaataaattaatttcatgctcctgaggagagagtaatgtgaacacgctgctggagcagttgtctcacttgtcctggctggcctgcatatggaaggaccagcggtagcccagaaccagcagcctgggcagggagggatcctgcgctcgggatgggatgggagggccggcagctgacaggcagagccaagcaaatggaagccagtccacttagaggggccttgatgactgtcaggccgtgatgggttcataaggatgtggccagccaagccatatggttcacagagcaggacactctcagcacgatgcacagctgcgagtgacgttggtggtggtcagggaatcgagttagctgactgttacctcagggacagccccagaagattggcccggagccgtgtgagtccctctggtcatgggtgatcttggagttcacacaaggagtgtccagatgaggacaagagggtggggcctggcagctcccaactcaagaggatgtatcctggttgtggtgaccagtttatttacttggaattttatgtgacattgcgatgatctttttgctgacttctgtgccttctaagaatcccttctgtcttttccgtcctgtcctgtcctgtcctctcgggtagactgatgaggaggaggaagttgaggtatgaccatttatgaacatgaagaatgccacattttaccacctcatgtatgctctggtctaacctaacataatcagcatgaagtgtcagcaccattcagtgctttaaacaatgcatggacatttttctggttggttttcgtgtgatcactaaccacctgacaggggctctcatcatgccacgtttgccagggactgaagggttaaatgcattttccgagctgtccctgaggcccagctaatcagtaaccatgtcacaagtggcaggtttagcaggtctctccctgctgctggaaaagtggacagagaattttcctttggcaacttaaatatgagaactagattctggaataaccacatgaagagtcctgaaatcaaagaggaagtggggcagtggccaagggccaggctagagtctctgtccccagccagtaggcagcctctgatgtgtgaccatttcctctgctggtgttaatggctcccatgggccaacgtccatgcagtggcagatggcaggggctcttccctagaccctggatgcaggtgcgagaaccagagaccaagggggctaattggccctggaaaataaggagagagccgtgtagatgctacaagccacagattgtccccaaccctgttgccatgcctgagacactgggtgacaaaggaagccagcagtctgtggaggtgttctttgcaaatgttaatctgactttttgttcttcatccaggtgttcggcattgtgtacgtatggtattccagcatacctcttttaaaatatatatgtcctgaccttttgttcagttagagaaaatcagcatgaatttatgtgtcttgttctgttttgggccctgataccaattcttttggggtccctggcaagccacatattcttgaagggcctcagtttccttttccataaaagcaaggtgggactaggtctagaagaattcttcccaactcttaacatgctaggattctgtgattgaatcccacttttgtaattctaccatcgtaagtgatacttaagaaaaatttaactgctttctgacactaagtaaaaaaataaagctcaatatgcttggttaacaaggcatatttcatttcaattcttatatcagggctttggtgtaagaaacacatttggttttagaccttcccagagccaatgccagttgctcctgacagccaccctttgaggggatctgagtgagtgacagagacggctacaatggatgaatgggtggtggtccttctggggccgggggcttttctgtctcatattagatcttcttgtaggcacagatgttttgtcattagttaacttcagtgactgccgtaatgaatgtgtctgcaaacaaaacaagacagaggagaggagcttttcctcaaccacgggttttagaagcttgagttgtctttttggggagtctccctcacctgctaacttccccttggttttgcagtctggcaagttctccggcagttctccggcgcccccaagccagccgcagggtctgagctatgcggaggacgcggctgagcacgagaacatgaaggctgtgctgaaaacctcgtccccctccgtggaggacgccacccccgcgctgggcgtccgcacacgcagccgagcaagccgaggtaactcctggctgcgcggggctcgtcttgtcttctcaggttggccgctctgggggggtccggtctccatcgcaggctgcggtccacggctgtgactggccctcggctccagtgccaacctaaccacacacattccctcactagcgtcttcctgacccaccttcaatagcttcatctccaaaacaaacattcccacgagagtacctcactttacacagagggaatccttaccggggatgacctcctgagggagagctggggtgggcagactgcaacctgcaagccaaatccagccttccccctgcttttagaaataaagttttgttgggacacagccatatttactcatttgtgtagtgtctgtggctactttggcagagttgagccactgtggcagacactgtaggacctacagagcctaaaacatctactacacaggacaaggttgccaaccctgccctacagcactacccctttgtccctttttcacatccttaggcagagacaaaaactaaaacttcaaaatggcggccagattcgagtttccagatttgtttttatcattagaagggattaagatgcatttgacatctgtgaatgtttcctcgtgtttccctggtctggcctgataacccattgaccctcctgggtttcttcactgcctgcagggtgaagcccacagtattcacactgttcttggaggccccctgtaggcaggtcctgtcctatctcccaagcttggcattccctcaccctgcatggtcaccgcggcgcttctccgcacgctgctcgtcctagagtccccgctcttctcatgctgctccctcagttcaggatgcccgctcctctgcctgtcccgttcccattcacctcatcctctgggcactgtccctatcaccaggccactctttctcttccatgcactccagagaccccagttagatctactaaagatggtcaactttaaggagaatcaactgttggagacaggctttcttctctcggtgtttgcttagcacacactatgcgtgcagctagaagaaaccatataatcttgtccaagctgggatgctttggagtgtgaaagggggtgctagtagtaattatgctgggagagcaagtaaaacagcatgccaggtaagctggtttgtgggttgccatacacatcacagaaatgcagtagtgagtgaacagatgaatattgcgcccaccagacattttcgtaggctctaatgaacatgcaggcagaaaggcagctagaatctggagggctgcagtctggagaaacctgaggaggctcttcagtgacttctaataggctttgctcactaactagtgctttttggaatcttgctgttgtcaacattcttaaatatacaaaaataacggtagtaatgataaattcaacataatggaaaaaataaatgcagctttgagttttcttgagaagaaggtgagtcattaccacaccacgcatgtggctgattgtagtttcctatgaaccaaagagccacaaactgctgtccaaggaggacctcaaagggacctgcaggctgtgctccagaaccctagggcttttgtgggattcccaagcagattggcacttcagtcttttttactaaattactgactggttttctcacttcatgtgactacagtgttactaactctagttctcttttcttctgtcttaatgttggactttggtgtttaccttttaatatagggcatcagccgggcacggtggctcacgcctgtaatcccagcactttgggaggccgaggtcggtggatcacttgaggtcaggagttcaagaccagtctggccaaccgggtgaaaccctgtctctactaaaattacaaaattagctgggtgtggtgtcacatgcctgtaatcctagctactggggaggctgaggcaggagaattgcttgaaccttggaggtggaggttgcagtgagccaagatggcgccattgcactcaagcctgggcgaagaagcaagactctgtctcaaaatatatatatatatgtattatatattttatatatattataaatatataatcatatatattatatacataatatataatatgttaaattttatataatatgtgtattatacacgttatatatgtgtattatatacattatatataatatgtgtattatatacgttatatatgcgtattatatacgttatatatgcgtattatatacgttatatatgcgtattatacactttatatataatatgcgtattatacacgttatatataatatgcgtattatacacgttatatataatatgcgtattatacacgttatatataatatgtgtattatacacgttatatatgtgtattatacacgttatatatatgtgtattatatacgctatatatgtgtattatatacgttatatatgtgtactatacgttatatacaatatgcgtattatacacgttatatacaatatgcgtattatacacgttatatacaatatgcgtattatacacgttatatacaatatgcgtattatacacgttatatacaatatgcgtattatacacgttatatacaatatgcgtattatacacgttatatacaatatgcgtattatacacgttatatataatatgcgtattatacacgttatatataatatgcgtattatacacgttatatataatattgtattatacacgttatatataatatgtgtattatacacgttatatataatatgtgtattatacacgttatatataatatgtgtattatacacgttatatataatatgtgtattatacacgttatatataatatgtgtattatacacgttatatataatatatgtgtattatacacgttatatataatatatatgtattatatatttctgtgtgtatatatatatgtatggattctactttgatgcacagctgaaaatatgcttgaagaagggcttcctccctccctgccccagtgttacaccaactgaggcacagatgacagggtggaaaaatcatatcttttactacagccttgatccccagacaccctaagtatttgcatatgttattattacatcaaagaattaaagataattagtctctctgagatcgggtctttccaaacctctttccaaaactgtaatttccatagatagttttggatgtggaattgggagaagaaaataatattatgctttggcaatgaaaaggtagccttttagtgaccaagagcagacagacacagctgaggagaaccaaaaccctgattttatgtgggatacattctgattgtctggtttgctatatggaaggaaaggtaccctcttcttgaccagtgctgtctgtaaaagacctccattccaggaagtgattggagagagagtgtgtgtaaacaagaaagaagaggagagaagaaggtggggaaggccagaaagtgaagaaaacagtctcattaaatggtgaacaatagagactgtcagtgtagagccagcataaaacaaggatgagaaatcgttttgcagtgttgggggacatggcaaggggtatcacttttaccttgtggcacccaaaaaggcctaagacatcccatgtatgagcttgtctttgcccagcagctcttgcaggctttgtatgctaggctaaacatggccaacagggatgtgaaggtgaacattaatgcctgcaccatggtgaccccagccatcagaccagagtcttgagcccctgtgtcttggtggatgcaggaggagtgcagttgaagccttcttagggggtggatctcagtaatagaacataaataggttgtaccaattttaaaggaaaagaaacatctattcctgaccagaaaggatagcgagaaaagatgttggtgggtttgtacaacatggggtcatctttgctggcgtatgaaagggattagaatgggaggctgttcagtttctctgcacattaatgccaatctcaagggagacttctgctttcatgcagcatgtgttatggagtggcaagccacccacctgctacaacaactagaagtaaaaataataaagccttctttgaaaaaacattagagaactgtaaaaggaaagaggactagacaaactagaattggaggtgagctgacattgcctctctgtgagcatttgccaaatctgggcacaagctgaggattgggcttatggtagtggagtgactctaatgggaaagagaagccagcagaatttgtagtagctgtatgaactggtacaagagattgaaattgagaggaggctaaaatgcagatgattttctccatgagacatttgctaaatggagcactgcgggatgggggttggagggaggaaggtcagcgggtgatgctgtgctagaaatgttgaaggagatgtcctgcagtctttaaactgaggagacaaagataggctagagtaagcaccttgaacagatacttactgatcttggcctcaagaaaaagagaggtgggaagtggactgattgttaattaaagctgctgtctggcctaaacccagctcaatacctcactgtatctgttaatagcagagaaaagactctctggaggaaaataatgctgacttcagtctctacgttcttctatacacaaagtccagtgtaataaaaattacaagccacaggaataacatgaaaatatgactgaaaatcaagaagaaaaatagataatagcagcagacccataagtgattcagatgttgaaatctacagtcaaggacttgaaatgaccattataaatgttaaaataaaaactaaaaggaaacatagacaagtgggtaaaaaggtagataatttcaatagcaaattagactctataaataagaatcaaatggatattccagaactacaaaacaaaatatctgaaataaactcattggatgggcttagcagagactgatcacagcaaaagaggattagtgaattcaaaggcaggttaatagaaaatgtataaacagaagcatagtgagaaaaaatggaaagaatagaataaaatataagatctgagggacacagttgaatggtctaacatgtgtaattggagtactggaaaaagatggaccagaagcaatatttgaagagattgaagagatttgaagagatggctgagaatttaccaaaacagataaatatcaaccaacatatttaagaaacttaggaaatccaagaagagtaagtacaaagagaaccataccatagacaaagtgctaaaataaataaataaataaataaagataaaatctttaaaacagagaagaaagatacattgcctcctatggtgcaatgataataatgatggctcaattttcaaaaggaactgtagaagccagaaaaaaaaggaatgatatctttaaactgccagaacaaaaaacttcaaccacagaagtctatcttcagagaaatcgtctttcagaaatgaaagcaaactttttacattaaaacagtagaatatccattttgacttaagtgttttccttgtagactctttctttaggttagatttctataaggggaaaaacaaatttcagtgctttctttcaaatctcagttttcatgttttagaaaaataaaagtaaagtggtattgtgctattatggtctagattgctttatcctctccaccacatctcaaatgtcttgctaacacttactactacatggtcccttgggtatgtaaaatgtgtgtgcagtattaccctgatggctacagtgtgggtgcaagggttccaggaagaggaatgtatacatgactaggaagaatggaaataaatggtaatcaggcagtgaggatataaccaagaggagcggacataaagtagaaccaggaatgaagtcgtgagagaatgaagtcatcataaaactgagttgacaatcttggacctagggcaagatgtttcctttaagcatctcctgacacattacattgacagaagatccctgggattgtgtaagatggaaaagtataggtaattctcagagggaagattagatgatgccttcatttctggcccagtgctctgcaaatgtattatgagcaaagacaatttattgagctttgcatgtttttagaaggtatttcggcattttaagataagacaaaattataaatcaatagataaaagggaaaacaggaaattgcggggtaaaacacaattgcatgattgattgctctactctgaggaggaccattgttcagaggatctgcagaggcccagtctaaaagctgtggcattataaggacttttatttccaattaaaataccgtgaccattctgagaatgcagagactttcagcagcaatttcaacagtttattttttaaaagagtctattttttaaaggatttataatgctgaaaaaaactggcctaatagcaagtagatcaagttcctttgggtataagcacaaaaagtacaatctactgtttttgcatgtgctcatgctgtaggtatgctatcatttaaaaaataaaagctaagcaaaaccaaaaaaaaaaactgtatcagtaataacggaaatcagagtctcactttgttgcccaggctggagcatagtggcgtgatctcagctcactgcaacctctgtctcccgggttcaagagattctcctgcctcagcctcctgagtagctgggactatagatgcacaccaccatgcttgactaatttttgtatttttagtagagatggggtttcactgtgttggccaggctgttctcgaactcctgacctcaagcgatctgcccgcctcagcctcccaaagtgctgggattacagacgtgagccactgcacccagccaacaaaaatcttaccattggaaaacatcattgttctatagccacaggttttatgtacatgcaggtgacagggcacctggtgtcctggctctccttttgcaaagtgtgaaatatttatgtatttaattcagtcatgaattttactatcagaaattatgactactttatagcacagtgtgtatttgcagcaatatgtcaactacacacacacacacacatatatatgaaaatcacagtccattgaactgtgatccactgttcccaaccatttccattgatatctattttttcttggttcattcattaccagccaggtggttgtaagcaccaaaacttaaaaaaaaaattagtgtgggagaactcaaacattttaactatttattaacatttttttcctccaagttgggaaaggctggcagttcccttgtgttgtactttagtcaggctggggctacttgtgtgccataggcaatgattctgataattctcacctacaggtttttgaagttgttgtgcatctactataaaatgaagtgtagatggtagaaattaacaattttgagcatattgtacatctttcctcttgtagcaacgtatattcactatcgtatagaagagatttcacaagaaagctgatcaattacaaagatgtagttctggatatattacattagcattaatttctaactgtttaacactgcagttgacctttgaacaacttggatttgatggagcacatctacctacatgcagattttttccaacaatacagatcaaaaataaagtatttgcaggatgcgaagcccatgtatatagagggctgtaaacccaagttctgcagagttgattgtggaacttgattatgcacagatttggatatacttgggagtactggaacaaatccctctgtatactgagggatgactgtacttgggacccatgttttggtgatgctttcttctgacttgttttaatatgtagttatttataaactacagaaaatgttgagggagcagatttatgtaccagagaaaaatttaagttaccaacccctttgctggttaaagagggcaatcctgttacaatttttaaaggctagataattcaaagataaactgtgtattataaaatctatttctttctacttagcgagaagttagggtcagctgacagactaggcacatacaaccactgatagagagctgacccagtaagaccctcagtgagtctctacattactagatgtgcatcaccggatattgatggctgtgtagcagggtgtggcttgggtcatctgccctcaggtgatcacaggacctggcaggtaaagacaacacacctgggttggagagttaaataataatgagagacaagatacacagctgtgttacagggtgatatgaaataagtgccccgcgtatgggtttgctcagagcctgcagggtagcagtcacgagttatggtggtgctccctgcagtggggacaggttagccctctggatctatcactagctctggggctttaactctggccttccctgtgatctgttgctgaaagaactcaactgcttggaggaatactgctgcatatatcttttgtgttttccttctgagtatgttgtgcactctggctgtttaatttttaggatccactagttcctggactatgggaactgatgactcgcccaatgtcacagatgatgcagctgatgagatcatggaccgcatcgtcaagtcagccacccaagtgcccagtcagcgagtggtgccgagggagaggaaacgatcccgggccaaccggaaatcttgtgagtgcattaaaggaggggcgagccttcacccctacagggatctgccctcccattctacgtgaactgggaaaggtggagacacagctccagtgaattgtcagtggctcccagagtgcctacttgcactcatccacagaaagtttcagggttggctgttgacgttggccattgtggaggaggggagctgcagccacacctgttcagtgtatctgccattggtggctaggcctctctcaattcatactttcttcccaggaaggtatgaaaagtccttaagtgtctgtggtgtaccaggggtgagcacgatgggctagtggagcccatcgtcaagtccagcctaagatgctctgctggaggctgtgtttctgccctgcacccagcaccagggggcgcttgtggggctggagactggcctctcctgggttcatcgctgcccacaagcatgttgaaggcaaaaactagggtagcaagggatttgatggtcattgggatgcttgaaatatttaacgtggcctaggttgaccattttttccttttcccaccaaatagaggattcaactaaatcaaagtgactgattttcctttttggtctgaacctactgcctgctcctgcccacccaactcatgggtgtggggttgcctctgtctgcccctctcagggacagtgctccatagggaaacaggttcctgtagatcctttgacatctccctgcatgagctgtggccttgagtgtttcagaagagcactcagccagccgctgggtcactctagaggctgctttagtctccactggctttgcctctgagaataagggttagtgacaaggaaagaagccagtggcttcctcctgttttctcccaaaagtgaaaggagcatgagtccagctaggcagggagttgagtaagtactcaaattcagagagccccaaacttgttccacccttgagattcacacaggaggtgaccagggtgtggcctgtgtatgttggacccagtggttctgcttgacccatttacacacgtttccaggatacagaacactaacccacattcctgtggtcccctgctcctttcctatgatctgctttcgtttctgatgagaatttttccccagaaaggaaaataacacttgaggttggggtgggggtgcagatagggatgggatgaggagcagggaatgggattctcattcagtaagatgggtggactgagaatctgtttctgacaagctcctagatgaggttaatgcttctggcccttggtacacactgtgagtaacaaggctcttgagctgtggttctcaaccctggatacacattagaatgttctgcagagatgtttaaattcctgatatctgggctgcacccacacacactacttcagaacctcaggggtgaggccttgaggtgtgggtccctgccccttggattagtggcattaggtgtgggctctctctttattgtatgccttcctctgctctccactacgtttatttcattttttaaatggaaaactatcgttcagggagactggcttgtacatcttcaagaatatgtttgtagattccaacatcaatatctaaggcctttacatttctttcttctgatattttcctatattctcactgctactatgaattctttgctgtctcctggtgcacttgtgaaagaacttggctaggggctcgcaactcaaagttgaacctcagacaatacgtgtgtctcctggaggcttgttggaattgcagatttatgggccccctttctagggcaactgattcaaatctgcatttaatgagatccccaggtgattcatgttcataataagatggacagcaccggggcatgagaccaggagtggaaactcttctccgaaggggcgaggctaatccacactcacactccaggctgcatctcagttgctctaggccaaggcaacgcttccatttttgcctatctgcaggctgtgaaataacatttcctgtggttttaatttgcatttcccttcactctaaggaggctgagcctattgccatttgcatctctccttttgtgtatggtttgtctatatcattggctcatttttttgtgataggaaatctgcttaaatagcttttgaaatgaaacttccaaaagattttttgaggtcttaagtagtttatcttcagtagttgccctttattggcttcctgttagttcattcaaggaggccaatagctacttcaaggtcaccacatggcaggaacctgcgcaccagttaactcctggtctttctggtgtgggcaacctcatcgcagggctcaccatggggaggagctgggaagagccatggagaggtgggccaagggagaaggttggaccaaggctgtgaagacagagacgtcccatttgtcaggtgcatggcaccctgacagagggttggaaggtttgggtcagggacctcagacaggagacagcatgggacattggactggctggtccttggaggcccagagcatgttcttctcctccaagtcttcatggccccatcctctggtctacagagatccaaattcttagactcataatgtcactgggcacaataacgcggtcataattaattttcctcttcaatctggccagagagatgttttgcctgtttttgttgttgacataaaataatttcctatggtatcgttttcatttcaattttatgcaaaacagtcatatattctttttatttagccaaacacatttttcctgtgacacagttactataacaagtacagcacagcatgtatgtgtttatctgtaatgggcttaatttattagtaatggcactatcaacagaaatttaagaagggagaagttagactttgatttctgttataaagggatgataaactccagcttttcacagaggttaaaggaacaacaaaaagcaatttgcaaaatcaatgtgaagtttagtggtttgggcctcatgctgaaacagtgctgtatttgatttgtttaatgatggcaatgaggcaagtggataatgaataaccaacatatttgggccataactcatttggctaaagacaataatagttctgctcttgcaggaaacaaaacagaatccatcccataaccttgaaatttatggcctgcaaggcaagccactcgaggatcagagataattaaatgtctgctttcatgtttgatgctggtgactgagcccacacatgccgaacgtcccactgaagcctgaactttgcagtcagctgggatagccaagggcctcgtaatagattcacaggttcccatggctcaggtcggctgctctcccagctggtgccaatcaggggcacattgagtaaaatgtctcaaatcgtccaggtgatctctagcctgtgaaatggctgatccagcttacttcgggtgcccaccctgccccagattctatccaaggatctccagtagcacctactaatttctagagctgattaaagatggactggcccctcctgtaaagacagcggagggtacctatgcatgagcacaagacacaggacaagaggataaacagaacaagtccaagagagaactgaggtctcttccctaaacccaggtggacagtcactgccttttagagggcatccctctctccagagcagggccaggctggaggccaggacactgatatgctaagtcagaaagtcgggactcaggtggaagcctcggggttagagaggcagatgcaagaagcaagatgcattacatggctctctggtggtttcacttttagacaaatcaccctcccaaacagggggaactgacacattaaagaggaggcttgtctgtaagtcccccccacagtgtccgcctgagtgccaggttcaaaaggatgaaggagcagtaaaaagacgaatccaagaacctgtctttcctacctctgagagcctttttgaggggaggcatagggttcccatggtggtactcagggaggtgccatgcacctgaccgaaggatgtttccgtctttcatcatttttgctgccaagttcaaatggaatccatttccatgctcaggaatgcacacatgcccacagcagggatggggcctgggtctcacgagtgacttggcccttaccgtgtatcagttatcttttgtacgatgaaggcagtagtgccagcttcctgggacggttgtggggttaagcgaggcatctatgacaggttcccgccacctttcttcccttccaggctgtgtctcactgctgcccaagggacaagttgctgatgggaattcgttgctgcctgaaggtgcttagggtctgctgtgcacatcccgacccaactgtctgctcttttcacccacctcactccccaccacactgtccacttcactctggcctgctacaattagtagcccagacagatcttcaccactcttttttacccccagaatgcttgcaactggcacataaaggctgcattgtcagcatagcacttggctagcattgttgagataacctaggcagagggctgacactctcgacttaatctgggaaggggaaaggcagttttgtcctgcccagaacttaaaatattgtggaaaactcaagtctgtagattcctgagctgcctttcctttctatccttagtttaggtagattgtcccagaaaacaattggcagaacttatttttcctttcgggccaaactctccctttgcccacctccaacatgactcataggaggaggcagttggtgttcgcattttaactgactgccttctgttcctttcctacctaggaaccaaaaagagtcttcaggagtactggatgctaatgtagccacaggtatagtaggagggcatgggctgggctctgcaaggccaaggaagccacagccagaccagtgatggcagaaagcgcctaatgccatgagtatttctgagtgctgtctcagcctcagtgaacttcatcttgggttagatggaactaggagacttcaaccttgtcaccacagactgtcactgtcctgaaaaccccgccttttcctgcatctcagatgacagtgatttaagtgaggggccccaaacctggacatctgattacccagggaaggttcaaatgcagtgcctgagcctctccccaagactcttgctcagtgtgtctggggtgagtccaagaaattgaatttcagtcaactagatttgggaatgtctgctttttgttgttgttctgggttttatcgcttcaacgttttattctgaaaaaatataagacttacagaaaagttgcaaaaatagtaggacaatttagcaaaaccaggaaattcaaactggtacagtactattaaccgaactgtaggctttattcagatttcaccagttttgccacgaaggtcctatttttgctctacgatcctacccaggattccagattgcatttagccctcatgtctgcttagtctcctctaatctgtgaggacactttgtgaccttggtatttttgaaaattaccggccagttattttgtagaacatccttccatttgggaaggctgtgcatataatggacaggattttatgtggaaaaaaaggaagtcctagggagcacatctggccctgccgttttacgtccactcagaacaaggagggcgtgaatggacggtgttgaacagtggccaagcccgggacctcccagccacaagacatggacatttaaggcatcttgaagttctgatgttagtcaactagactcctagacacattgctcccagtacacctggtagaaaatctttgggatctttgggattaaaaaaccaaaaaacgattttcaaattacacttgataattatgtgcaaaaaaaccccgaaataacatctctcagtgctgcaaaggtgaaagcgcacagatggatttctgtcacctgaaagtaaagttgggtcgatttcctgttgatgtgaaagatggtcaggaactgtcctgccaagcatcggcagggcacagctgtttccagtgtggactgtgatccaaagtcggctcaaacccttctctaccactaagtgtgagccctgggccagtgaccaggttctctggtccgggtttgctcacttattgaagatataacaagagttcccatctcacagtgtttccataaagattaagtgaaacaacccatgtaaacactcagtaaatggtggctgccattgccattgttctcggatgcgactcatcttagtagagtcacctgtgagccctttgtgggaatttttaatgttttcatttctagggaggaagaaaaagaacttgggtgtttttcctgagtccccagacagtcctgtgctgcatgctggcagcagaggcaccccacatcagattcttccaccatcactttgacaccgtgagaactgtcaccagggcctggggtgcagtgtggctgctggtgccttcagagtgacccatgccatctatggcagagttgcaaggcagacagggataaacatttccagtctgttctctgttatgagctttgaggggaggccgtcccgtgggaaaggctggagagcagctttgattcagctggagcatttgagtgggaagtggaaatgaggagtcgggagaggcccaggtgtcatccgcagccagccgaccttgccacagtgctggagaagcctctctactgggtggcagagttgtttctgctgtggaagtttgctgtgtaccatttcataccctgccagcacctgtttgctggcccccttgttttgttctcttatgtccccagccttttttttttttttgctttctggaaactttctgagagccagctccctggctggaccccatctgctgccctgagtgtttctccccacactgtgtccccatcaggcccctgcctttctccccagaggctcccatcgcagaggctcagggtgtacatgtacatgatgtttgatgaatggcaaagaaactgaccagcagacagatggttgaccaaacacccaaaggggctcttgtcgcgtgtgacttgaattgggtgtaagactgattttagctgattactttcatttcacgtggtctttcaagtggtgaggtgaattaactttggctaacaaagggaaggtttcagattctcaggtatttttcattacaccaaggggataacatatatctaagagaatttttttcaaattgccatggaggtccacagaaagtagaatttcataaatggggaagacttttccatgaatactcgcttttcagggatacatctggcaagctaagggaatgaagcctatgttggcttttccctcacagcagaggacacatgagcccagaccagagggtgaagcagcatcccaaggggtctggaatatccaaaccatgagtagacccacgagggagagggcacaggctctgtgctgtcaggtagcaagacccataaaggtacctttagttctgttctctgagcctgtcccagataggctggctcaatgtccgaagctattaaaagattgttacatgagctgtaaggtgaccgggcccttattcgagtattaatatttatatcaactgaactgagcagttacaggactaaagcaaatgtgcaaacagaattgttaagcatctttaaataccttcatgggtaaaatatctgtggggtcttctgtagtcattcagccacaatatatacctaaatggacaaagattcatagactgatgtccacaccaccttctgtggctggtgaaattttaagatgcccagctagtgcagcatgaactacttcttcttctttttcttttttttttttttttttttttgagatggggcctcgctctgtcacccaggctggagtgcagtggcaccatctcggctcaccgcaacctccgcctcccaggttcaagcaattctctgcatcagcttcccgagtagctgggactacagatgtgtgccaccatgtctggctaatttttgtatttttagtagagatggagtttcaccatgttggtctcaagctgctgacctcaagtgatccacctgcctcagcctcccaaagtgctgggattacaggtgtgagccactgtgcccggccagcatggactttttaaggaagtattttgtatcttggttaagaagttgcagcaagaggtctttcttgtcaagagagatattttatcttatttactgttgttaaaattatctttctttaacaaacactctaaggagtctttaaagaacataaaaggttattacaaactagtatttttattgctgccccatagaacaaattctgttgctcagttgaatgtaatctgtctccagctgagacttaggagccaaacattttgtcttgttgagccaaacattcagtctggaggccaagggatcaggggtgggggaaagaggagctagtgcaagaacagctacagatagattgcttcagggcccaaaggtaggcttggaaatacagtagttgcagtaacacgatttgagagaacccctcaccacatatcccatgtctctctaaaaacccatacttgatgtctgtgttttgattctttgagttaaatgctgagcacacaatgggttctcaataaatcatttgttggttgaccaattgatggatattatgttgacccctgttccaagtgctgattcctggaagagaaggagccctttattttcataataggtattagtccccattgattctgccatggacataggtctttcagatcttttgtccacaggctgagtgagcttatatttaggggatgatgggaaggcatagaccatggggtgtggcctgcagatgcatgaggtgggccctggcctctggggagtagatgaggggagttggcaaaggaactggggagacattaaggtgagcttactttctctgaactttgatcaacagcctgccctggtcatctcaggaactctggctgatttagggatttagggtgaaggcagatccataacgtttctcttctgaaaatgaataccccaaactctgtgcgaactttaaagaaatacacagtgggtcaaatacaatttgtaaattaaggaaaatgtaattagccaccctttcaaatgaagacttgtcttgggtgaggcagctacctcctcattcacccttatccagcctttattttgatgttgaaattgaaatactaaacaatgggaataccatcatgccaagctaaacacaagccaattctaagtcagttaaatatgagcatccctccagttgccaactgcaaccccccagtgagagtggtcattggccattcttgagtcttgtgtgttccatagaaaacagccaccaattccagccagaataagtttggcagtttgctccttagcctccattcctcgaggagccactggttattttaattattgtctctagaggccttttagtgagttgaggctaagacccacagtactcatggagagatttgtcctcactgctgccccttgccctggcttcatgcacttgctctgtgggtcttgagcatgtccccagctattgttggtcgtctgttggatttgtgaggttgttgggtcttgtggaacccctcgctgtgcactggttgcctcacctcatttgtattagtggagcttgcattttcccctgctctggaatcaccttcccagctctgatacactcctcatactgggtagatgctgaggtctctcctgccctctgcacttctgcagttcacccccttctcagaagcctcgtgagggtgagcctctcctcctttctctcctctttataagtgcccgcatcactcctctcggccctccaaatcagcacctgtggcattgttaggccagcctgtgtagccccaaacttttgtcctggcagacagactgcagggcacttcagcaagagcaggaaggtacagagtgtgaaccctctggcttctctggaagtccctggggagaaggggggactggagtcttgactgccctgtgccttgctgctcatacttccttttcttctcatccctttgggtgtgacctgcaccaccactgcagtgcgaagaaccctgaagagcggcctgaccccagaagaagccagagccctgggcttggttggcacctcggagttgcagctgtgacactcataggttactcccaggagtgtgctgagcagaaggcaagctcttgctggatgaaacccctccaggtggggttggggagacttgatattcacatccaacagtttgaaaagggagagctcaattcccagcgtcaccccatggcttgtgttgcctgctacgcattgacttggatctccaggagtcccctgcacataccttctccatcgtgtcagctgtgtttctcttgattccgtgacacccggtttattagttcaaaagtgtgacaccttttctgggcaaggaacagcccctttaaggagcaaatcacttctgtcacagttattatggtaatatgaggcaatctgattagcttcacagactgagtctccacaacaccaaaatatccagatgtaaaccccaaacttgtacacaaaagaaagcacagattgtttacctgttgtggattttagatgtaacaaatgtttatacaaatacatacatgtacaccatgtttcaaatactaaataaatagagtttaatgccataa

SEQ ID NO: 106 - DNA, 4306 bp, Homo sapiens
tttgtagtggctgaaggtctgacatgtttgatcaaggtgggagctgaggctgatcagaactatcagaactacatcttaagggctttgggccagattatgttgtatgtggatggaatgaatggagtaataaaccgcaatgaaaccattcagtggctgtacactctcattgggtcaaagttccgcctggtggtgaagacagccctgaagctgctgctcgtctttgtagagtactcggagtccaacgcacctctcctaattcaggctgtcactgctgttgacacgaaaagaggggtcaaaccttggtcaaatatcatggaaatcctggaggaaaaagatggagttgatacggagctactggtttatgcaatgactttggtgaacaagacgttatcaggactaccagaccaagacaccttctacgacgtcgtggactgcctggaggagctgggcattgctgctgtgtcccagaggcacttgaacaagaaagggactgacctggacttagtggagcaactcaacatttatgaggtggcgctcaggcacgaggatggcgatgagaccacggagccaccccccagtgggtgccgggaccggaggagggccagcgtgtgttccagtggcggaggcgagcaccggggcctggaccgcagaaggagccgcaggcactcggtgcagagcatcaagagcaccctgtcggcccccaccagtccctgctcccagtcagctcccagcttcaagcccaaccaagtgcgagatctgcgtgaaaagtcatcaccgagtggtcttctcacatcatccttcaggcagcaccaagagtcactggcagcagagagagagaggcggcggcaggagagagaagaaaggttgcagagaatagagcgggaagaaagaaacaaattcagccgagattatttagacaaaagagaggagcaaaggcaagcaagagaagaaagatacaaatacttggaacagttggcagctgaggagcacgagaaggagctgagaagccggagtgtgagccggggcagagccgacctctccttggacctgacctcgccagcagccccagcctgcctggctcctctgagccatagcccctcatcttcagactctcaagaggctctcacggtgtctgcctcctccccaggaacccctcaccatccccaagcaagtgccggggatcctgaacccgaatcagaggcagaaccggaagcagaggcaggggcggggcaggttgctgatgaagctggccaggacatagcctctgcccacgagggtgcagagactgaagtggagcaggcactagagcaagagccggaagaaagagcctccctcagtgaaaaagagaggcagaacgagggggtgaacgagagggacaactgctctgcctccagcgtctcgtcctccagcagcacgttggagagggaggagaaggaggacaagctctccagggacaggacaactggtttgtggcccgcaggtgtccaggatgcaggtgtaaatggacagtgtggcgacatcctcaccaacaaacggttcatgcttgacatgctgtatgcccataacaggaagtctccggatgatgaggagaagggggatggggaggctgggaggacccagcaggaggcagaggcggtagccagccttgctaccaggatatccaccctgcaggccaactctcagacccaggatgagagtgtcaggagggtggatgtcggctgtttggacaatcggggcagtgtgaaagcatttgctgagaaattcaacagtggggacctggggagaggttccatctcccctgatgctgagcccaatgacaaggtcccagaaacagcgccggtgcagccgaagacagagtctgattacatctgggaccagctcatggccaatccaagagagctcagaatccaagacatggatttcactgacctgggggaggaggatgacattgatgtcctagatgtggacctgggtcacagggaggcccctgggccacctcccccacccccacccacctttctgggtttgccgcccccaccccctccgcccctgttggacagcattcctccccctcctgtccctggtaatttattggttcctcctcctccagtgttcaacgctcctcagggcttagggtggtcccaggtacccaggggtcagcccacattcactaagaaaaagaagaccatccgtttgttctggaatgaagttcggccttttgactggccatgtaaaaacaaccgacgctgcagagaattcctgtggtcaaaactggaacccattaaggtggacacttccagactggagcacctgtttgagtctaaatccaaggaactgtctgtctcaaagaaaactgctgcagatggaaaaaggcaagagatcattgttctggattccaagaggagtaacgccatcaatattggtctgacggtgctgccccctccaaggacgattaagatcgccattttgaattttgatgagtatgccttaaacaaagaaggaatcgagaaaattctaacgatgattcccaccgatgaggagaagcagaaaatccaggaagctcagctggccaaccctgaaatccccctgggcagtgcagagcagttcctcctcaccctgtcctccatcagcgagctctctgcacgacttcacctctgggcattcaaaatggattatgaaactacagaaaaggaagtagcagaaccactcctggacctgaaggaaggaatagaccagttggagaacaataaaaccttgggctttatcctgtctactctcttagccattgggaactttctaaatggaactaatgccaaagcgtttgagttaagctacctcgagaaggttccagaagtcaaagacacagtgcacaagcagtcgcttctccaccatgtgtgcaccatggtggtagaaaacttcccagacagctccgatctgtactcggagatcggggccatcaccaggtcagccaaggttgactttgatcaacttcaggataatttatgtcagatggagagaagatgcaaagcttcatgggatcacctcaaggcaattgcaaaacatgaaatgaaaccagttttaaaacaacggatgtcagagttcctgaaagactgtgcagagcgaattataattttaaagattgtccatagaaggataatcaacagattccactcctttttactctttatgggccatccaccttatgcaattcgggaagtgaacataaacaaattctgcaggattattagtgaatttgcactagagtatcgcacaaccagggaaagggttttgcagcagaaacagaaacgggccaaccacagagagagaaataagaccagagggaagatgatcaccgattctggcaagttctccggcagttctccggcgcccccaagccagccgcagggtctgagctatgcggaggacgcggctgagcacgagaacatgaaggctgtgctgaaaacctcgtccccctccgtggaggacgccacccccgcgctgggcgtccgcacacgcagccgagcaagccgaggatccactagttcctggactatgggaactgatgactcgcccaatgtcacagatgatgcagctgatgagatcatggaccgcatcgtcaagtcagccacccaagtgcccagtcagcgagtggtgccgagggagaggaaacgatcccgggccaaccggaaatctttgcgaagaaccctgaagagcggcctgaccccagaagaagccagagccctgggcttggttggcacctcggagttgcagctgtgacactcataggttactcccaggagtgtgctgagcagaaggcaagctcttgctggatgaaacccctccaggtggggttggggagacttgatattcacatccaacagtttgaaaagggagagctcaattcccagcgtcaccccatggcttgtgttgcctgctacgcattgacttggatctccaggagtcccctgcacataccttctccatcgtgtcagctgtgtttctcttgattccgtgacacccggtttattagttcaaaagtgtgacaccttttctgggcaaggaacagcccctttaaggagcaaatcacttctgtcacagttattatggtaatatgaggcaatctgattagcttcacagactgagtctccacaacaccaaaatatccagatgtaaaccccaaacttgtacacaaaagaaagcacagattgtttacctgttgtggattttagatgtaacaaatgtttatacaaatacatacatgtacaccatgtttcaaatactaaataaatagagtttaatgccataa

SEQ ID NO: 107 - protein, 1220 aa, Homo sapiens
MLYVDGMNGVINRNETIQWLYTLIGSKFRLVVKTALKLLLVFVEYSESNAPLLIQAVTAVDTKRGVKPWSNIMEIEKDGVDTELLVYAMTLVNKTLSGLPDQDTFYDVVDCLEELGIAAVSQRHLNKKGTDLDLVEQLNIYEVRHEDGDETTEPPPSGCRDRRRASVCSSGGGEHRGLDRRRSRRHSVQSIKSTLSAPTSPCSQSAPSFKPNQVRDLREKSSPSGLLTSSFRQHQESLAAERERRRQEREERLQRIEREERNKFSRDYLDKREEQRQAREERYKYLEQLAAEEHEKELRSRSVSRGRADLSLDLTSPAAPACLAPLSHSPSSSDSQEALTVSASSPGTPHHPQASAGDPEPESEAEPEAEAGAGQVADEAGQDIASAHEGAETEVEQALEQEPEERASLSEKERQNEGVNERDNCSASSVSSSSSTLEREEKEDKLSRDRTTGLWPAGVQDAGVNGQCGDILTNKRFMLDMLYAHNRKSPDDEEKGDGEAGRTQQEAEAVASLATRISTLQANSQTQDESVRRVDVGCLDNRGSVKAFAEKFNSGDLGRGSISPDAEPNDKVPETAPVQPKTESDYIWDQLMANPRELRIQDMDFTDLGEEDDIDVLDVDLGHREAPGPPPPPPPTFLGLPPPPPPPLLDSIPPPPVPGNLLVPPPPVFNAPQGLGWSQVPRGQPTFTKKKKTIRLFWNEVRPFDWPCKNNRRCREFLWSKLEPIKVDTSRLEHLFESKSKELSVSKKTAADGKRQEIIVLDSKRSNAINIGLTVLPPPRTIKIAILNFDEYALNKEGIEKILTMIPTDEEKQKIQEAQLANPEIPLGSAEQFLLTLSSISELSARLHLWAFKMDYETTEKEVAEPLLDLKEGIDQLENNKTLGFILSTLLAIGNFLNGTNAKAFELSYLEKVPEVKDTVHKQSLLHHVCTMVVENFPDSSDKEIGAITRSAKVDFDQLQDNLCQMERRCKASWDHLKAIAKHEMKPVLKQRMSEFLKDCAERIIILKIVHRRIINRFHSFLLFMGHPPYAIREVNINKFCRIISEFALEYRTTRERVLQQKQKRANHRERNKTRGKMITDSGKFSGSSPAPPSQPQGLSYAEDAAEHENMKAVLKTSSPSVEDATPALGVRTRSRASRGSTSSWTMGTDDSPNVTDDAADEIMDRIVKSATQVPSQRVVPRERKRSRANRKSLRRTLKSGLTPEEARALGLVGTSELQL

SEQ ID NO: 108 - DNA, 2841 bp, Homo sapiens
gtttgtggcccgcaggtgtccaggatgcaggtgtaaatggacagtgtggcgacatcctcaccaacaaacggttcatgcttgacatgctgtatgcccataacaggaagtctccggatgatgaggagaagggggatggggaggctgggaggacccagcaggaggcagaggcggtagccagccttgctaccaggatatccaccctgcaggccaactctcagacccaggatgagagtgtcaggagggtggatgtcggctgtttggacaatcggggcagtgtgaaagcatttgctgagaaattcaacagtggggacctggggagaggttccatctcccctgatgctgagcccaatgacaaggtcccagaaacagcgccggtgcagccgaagacagagtctgattacatctgggaccagctcatggccaatccaagagagctcagaatccaagacatggatttcactgacctgggggaggaggatgacattgatgtcctagatgtggacctgggtcacagggaggcccctgggccacctcccccacccccacccacctttctgggtttgccgcccccaccccctccgcccctgttggacagcattcctccccctcctgtccctggtaatttattggttcctcctcctccagtgttcaacgctcctcagggcttagggtggtcccaggtacccaggggtcagcccacattcactaagaaaaagaagaccatccgtttgttctggaatgaagttcggccttttgactggccatgtaaaaacaaccgacgctgcagagaattcctgtggtcaaaactggaacccattaaggtggacacttccagactggagcacctgtttgagtctaaatccaaggaactgtctgtctcaaagaaaactgctgcagatggaaaaaggcaagagatcattgttctggattccaagaggagtaacgccatcaatattggtctgacggtgctgccccctccaaggacgattaagatcgccattttgaattttgatgagtatgccttaaacaaagaaggaatcgagaaaattctaacgatgattcccaccgatgaggagaagcagaaaatccaggaagctcagctggccaaccctgaaatccccctgggcagtgcagagcagttcctcctcaccctgtcctccatcagcgagctctctgcacgacttcacctctgggcattcaaaatggattatgaaactacagaaaaggaagtagcagaaccactcctggacctgaaggaaggaatagaccagttggagaacaataaaaccttgggctttatcctgtctactctcttagccattgggaactttctaaatggaactaatgccaaagcgtttgagttaagctacctcgagaaggttccagaagtcaaagacacagtgcacaagcagtcgcttctccaccatgtgtgcaccatggtggtagaaaacttcccagacagctccgatctgtactcggagatcggggccatcaccaggtcagccaaggttgactttgatcaacttcaggataatttatgtcagatggagagaagatgcaaagcttcatgggatcacctcaaggcaattgcaaaacatgaaatgaaaccagttttaaaacaacggatgtcagagttcctgaaagactgtgcagagcgaattataattttaaagattgtccatagaaggataatcaacagattccactcctttttactctttatgggccatccaccttatgcaattcgggaagtgaacataaacaaattctgcaggattattagtgaatttgcactagagtatcgcacaaccagggaaagggttttgcagcagaaacagaaacgggccaaccacagagagagaaataagaccagagggaagatgatcaccgattctggcaagttctccggcagttctccggcgcccccaagccagccgcagggtctgagctatgcggaggacgcggctgagcacgagaacatgaaggctgtgctgaaaacctcgtccccctccgtggaggacgccacccccgcgctgggcgtccgcacacgcagccgagcaagccgaggatccactagttcctggactatgggaactgatgactcgcccaatgtcacagatgatgcagctgatgagatcatggaccgcatcgtcaagtcagccacccaagtgcccagtcagcgagtggtgccgagggagaggaaacgatcccgggccaaccggaaatctttgcgaagaaccctgaagagcggcctgaccccagaagaagccagagccctgggcttggttggcacctcggagttgcagctgtgacactcataggttactcccaggagtgtgctgagcagaaggcaagctcttgctggatgaaacccctccaggtggggttggggagacttgatattcacatccaacagtttgaaaagggagagctcaattcccagcgtcaccccatggcttgtgttgcctgctacgcattgacttggatctccaggagtcccctgcacataccttctccatcgtgtcagctgtgtttctcttgattccgtgacacccggtttattagttcaaaagtgtgacaccttttctgggcaaggaacagcccctttaaggagcaaatcacttctgtcacagttattatggtaatatgaggcaatctgattagcttcacagactgagtctccacaacaccaaaatatccagatgtaaaccccaaacttgtacacaaaagaaagcacagattgtttacctgttgtggattttagatgtaacaaatgtttatacaaatacatacatgtacaccatgtttcaaatactaaataaatagagtttaatgccataa

SEQ ID NO: 109 - protein, 743 aa, Homo sapiens
MLDMLYAHNRKSPDDEEKGDGEAGRTQQEAEAVASLATRISTLQANSQTQDESVRRVDVGCLDNRGSVKAFAEKFNSGDLGRGSISPDAEPNDKVPETAPVQPKTESDYIWDQLMANPRELRIQDMDFTDLGEEDDIDVLDVDLGHREAPGPPPPPPPTFLGLPPPPPPPLLDSIPPPPVPGNLLVPPPPVFNAPQGLGWSQVPRGQPTFTKKKKTIRLFWNEVRPFDWPCKNNRRCREFLWSKLEPIKVDTSRLEHLFESKSKELSVSKKTAADGKRQEIIVLDSKRSNAINIGLTVLPPPRTIKIAILNFDEYALNKEGIEKILTMIPTDEEKQKIQEAQLANPEIPLGSAEQFLLTLSSISELSARLHLWAFKMDYETTEKEVAEPLLDLKEGIDQLENNKTLGFILSTLLAIGNFLNGTNAKAFELSYLEKVPEVKDTVHKQSLLHHVCTMVVENFPDSSDKEIGAITRSAKVDFDQLQDNLCQMERRCKASWDHLKAIAKHEMKPVLKQRMSEFLKDCAERIIILKIVHRRIINRFHSFLLFMGHPPYAIREVNINKFCRIISEFALEYRTTRERVLQQKQKRANHRERNKTRGKMITDSGKFSGSSPAPPSQPQGLSYAEDAAEHENMKAVLKTSSPSVEDATPALGVRTRSRASRGSTSSWTMGTDDSPNVTDDAADEIMDRIVKSATQVPSQRVVPRERKRSRANRKSLRRTLKSGLTPEEARALGLVGTSELQL

SEQ ID NO: 110 - DNA, 4333 bp, Homo sapiens
caggatgacaaggatttggtgcatgaatttgtagtggctgaaggtctgacatgtttgatcaaggtgggagctgaggctgatcagaactatcagaactacatcttaagggctttgggccagattatgttgtatgtggatggaatgaatggagtaataaaccgcaatgaaaccattcagtggctgtacactctcattgggtcaaagttccgcctggtggtgaagacagccctgaagctgctgctcgtctttgtagagtactcggagtccaacgcacctctcctaattcaggctgtcactgctgttgacacgaaaagaggggtcaaaccttggtcaaatatcatggaaatcctggaggaaaaagatggagttgatacggagctactggtttatgcaatgactttggtgaacaagacgttatcaggactaccagaccaagacaccttctacgacgtcgtggactgcctggaggagctgggcattgctgctgtgtcccagaggcacttgaacaagaaagggactgacctggacttagtggagcaactcaacatttatgaggtggcgctcaggcacgaggatggcgatgagaccacggagccaccccccagtgggtgccgggaccggaggagggccagcgtgtgttccagtggcggaggcgagcaccggggcctggaccgcagaaggagccgcaggcactcggtgcagagcatcaagagcaccctgtcggcccccaccagtccctgctcccagtcagctcccagcttcaagcccaaccaagtgcgagatctgcgtgaaaagtcatcaccgagtggtcttctcacatcatccttcaggcagcaccaagagtcactggcagcagagagagagaggcggcggcaggagagagaagaaaggttgcagagaatagagcgggaagaaagaaacaaattcagccgagattatttagacaaaagagaggagcaaaggcaagcaagagaagaaagatacaaatacttggaacagttggcagctgaggagcacgagaaggagctgagaagccggagtgtgagccggggcagagccgacctctccttggacctgacctcgccagcagccccagcctgcctggctcctctgagccatagcccctcatcttcagactctcaagaggctctcacggtgtctgcctcctccccaggaacccctcaccatccccaagcaagtgccggggatcctgaacccgaatcagaggcagaaccggaagcagaggcaggggcggggcaggttgctgatgaagctggccaggacatagcctctgcccacgagggtgcagagactgaagtggagcaggcactagagcaagagccggaagaaagagcctccctcagtgaaaaagagaggcagaacgagggggtgaacgagagggacaactgctctgcctccagcgtctcgtcctccagcagcacgttggagagggaggagaaggaggacaagctctccagggacaggacaactggtttgtggcccgcaggtgtccaggatgcaggtgtaaatggacagtgtggcgacatcctcaccaacaaacggttcatgcttgacatgctgtatgcccataacaggaagtctccggatgatgaggagaagggggatggggaggctgggaggacccagcaggaggcagaggcggtagccagccttgctaccaggatatccaccctgcaggccaactctcagacccaggatgagagtgtcaggagggtggatgtcggctgtttggacaatcggggcagtgtgaaagcatttgctgagaaattcaacagtggggacctggggagaggttccatctcccctgatgctgagcccaatgacaaggtcccagaaacagcgccggtgcagccgaagacagagtctgattacatctgggaccagctcatggccaatccaagagagctcagaatccaagacatggatttcactgacctgggggaggaggatgacattgatgtcctagatgtggacctgggtcacagggaggcccctgggccacctcccccacccccacccacctttctgggtttgccgcccccaccccctccgcccctgttggacagcattcctccccctcctgtccctggtaatttattggttcctcctcctccagtgttcaacgctcctcagggcttagggtggtcccaggtacccaggggtcagcccacattcactaagaaaaagaagaccatccgtttgttctggaatgaagttcggccttttgactggccatgtaaaaacaaccgacgctgcagagaattcctgtggtcaaaactggaacccattaaggtggacacttccagactggagcacctgtttgagtctaaatccaaggaactgtctgtctcaaagaaaactgctgcagatggaaaaaggcaagagatcattgttctggattccaagaggagtaacgccatcaatattggtctgacggtgctgccccctccaaggacgattaagatcgccattttgaattttgatgagtatgccttaaacaaagaaggaatcgagaaaattctaacgatgattcccaccgatgaggagaagcagaaaatccaggaagctcagctggccaaccctgaaatccccctgggcagtgcagagcagttcctcctcaccctgtcctccatcagcgagctctctgcacgacttcacctctgggcattcaaaatggattatgaaactacagaaaaggaagtagcagaaccactcctggacctgaaggaaggaatagaccagttggagaacaataaaaccttgggctttatcctgtctactctcttagccattgggaactttctaaatggaactaatgccaaagcgtttgagttaagctacctcgagaaggttccagaagtcaaagacacagtgcacaagcagtcgcttctccaccatgtgtgcaccatggtggtagaaaacttcccagacagctccgatctgtactcggagatcggggccatcaccaggtcagccaaggttgactttgatcaacttcaggataatttatgtcagatggagagaagatgcaaagcttcatgggatcacctcaaggcaattgcaaaacatgaaatgaaaccagttttaaaacaacggatgtcagagttcctgaaagactgtgcagagcgaattataattttaaagattgtccatagaaggataatcaacagattccactcctttttactctttatgggccatccaccttatgcaattcgggaagtgaacataaacaaattctgcaggattattagtgaatttgcactagagtatcgcacaaccagggaaagggttttgcagcagaaacagaaacgggccaaccacagagagagaaataagaccagagggaagatgatcaccgattctggcaagttctccggcagttctccggcgcccccaagccagccgcagggtctgagctatgcggaggacgcggctgagcacgagaacatgaaggctgtgctgaaaacctcgtccccctccgtggaggacgccacccccgcgctgggcgtccgcacacgcagccgagcaagccgaggatccactagttcctggactatgggaactgatgactcgcccaatgtcacagatgatgcagctgatgagatcatggaccgcatcgtcaagtcagccacccaagtgcccagtcagcgagtggtgccgagggagaggaaacgatcccgggccaaccggaaatctttgcgaagaaccctgaagagcggcctgaccccagaagaagccagagccctgggcttggttggcacctcggagttgcagctgtgacactcataggttactcccaggagtgtgctgagcagaaggcaagctcttgctggatgaaacccctccaggtggggttggggagacttgatattcacatccaacagtttgaaaagggagagctcaattcccagcgtcaccccatggcttgtgttgcctgctacgcattgacttggatctccaggagtcccctgcacataccttctccatcgtgtcagctgtgtttctcttgattccgtgacacccggtttattagttcaaaagtgtgacaccttttctgggcaaggaacagcccctttaaggagcaaatcacttctgtcacagttattatggtaatatgaggcaatctgattagcttcacagactgagtctccacaacaccaaaatatccagatgtaaaccccaaacttgtacacaaaagaaagcacagattgtttacctgttgtggattttagatgtaacaaatgtttatacaaatacatacatgtacaccatgtttcaaatactaaataaatagagtttaatgccataa

SEQ ID NO: 111 - protein, 1220 aa, Homo sapiens; identical to SEQ ID NO: 107

SEQ ID NO: 112 - DNA, 58775 bp, Mus musculus
  misc_feature (1)...(58775): n = A,T,C or G
tcagtcccctgagctgttctagtgcgcggcgtggagccagggctcaggctggtggagcggccggggctggaggctgggagtgcggcgcgcacggcctccccgcgccattatccgcgctcgcttcgggcgaggccggcgccaggatggcagagatggggagcaagggggtgacggcggggaagatcgccagcaacgtacagaagaagctgacccgagcgcaggagaaggtgagtgaacggtaaacctgccacacctctcgcccctacccctgggatctagctggtcacttccggaggatcaccgccaaggaatccccgggtttgatcttcttgcagctaaggtgccccccttctccctacctgggcgccagcaggggagagcgcagctgtccaccttgtacccccctcccccaatcgttttgtaccttcgtggctcttctgcagagaagtggaggcccacgctccggtttggtcctcggacgcggggtccactctcgccctaccgtggagtccaagggtcaggaggctgggaggtgacccccagtactccagacccaggcgggcaatccaggcggggcttgtatggggcgggggagggagcctgtcttaccacccctggggccgaacgcgtcccagacttctaaggctacactttctttccagctggctagtgcgtacgcccactgccctccttttcctaccgcctctctaccttagtccctgaaggagggatcgctttcctttttccaagaggtgcctgcggcctagaaggtcccgcccagacccgccgggcagcagattctgcacccctcgccacaccgggctttggcggttccagccgctggagagagtggtggtggtggtgggagctcaaggctctccggtggccaagagaggggtgtggagggcgccacagaagcccctattcctgttgtttgagagtattctggggtttttgcaggggaagggatcagagcttcctgggacaccctgactgtgcaggaaatgcagggattgggggcgggggtccttagctggcctgccttttaccccacgccgtccctggcttattgaattggatcacgccagctgctgacgccacttcccctgccaattccgactatgaaatctgagattgtacaatctgtgcttctgccagggatagcccctcatggctctatctgggctggggcctggtggggacagggacaggcttgcctttttccgtccgtcttgggctgtttataaacaatgacttttgcagctgagagctgtgagctccccaaggatgcagccacgtgatggggggcgggtagatcttccttagagccctactcctcatccttgtggttgctagctaagaagagggttactgtgtctggggaggctcttgctaatcccctgatctggccagctctcctttccccatgcaggaggaaagcgaagagagagattaggaccctctctgtagtcttcgggtggctgaggagacctgggtgacccagctggaacggtaggcagacagagccaccctggctcccagtgacctagtaattcatctaaggtgcctggagcctgcttctcactcctaaaggaaatgaatggaaatattgggagtaagctgagacaagttccctacccccaacacacgaagaccaacttcattatggctgctcattatagccagcctgcagctcttcccaggtgcatttgtttgtgtatttgttctttggcagtagcctccttgatgcaactctgggggcctcaagcataggctatgttcctttcttgtacatggccctgattcactgggcaactgagcagccatctctcttctcagtgcctgctcagaggttttgggcagttggctgacagctggttggctttggaacatggctatggccaacagctggtcttggctgagcctgggcttcgtggacctgcactcgtctttagtcacatttgctctctgtctcatgggcattagttagggaccatttgcccagggaagccaagacagtctgacaggcattctgagacaggagcctgcttcccatcctctctctccttggcttcaggaagccccgtgccttacctagacactgtcctcttccatttgtctttctgacatttggaatctacatttgtcgcggcttgggtatactgattgggctgacttcccagcatcttctagcggtggttcgtttcctcttcaatgcccactgctaatgggacctcagtcccattgccttacaaacagtcctgacactggacctaccttcctttgccaaataaactagccacagggcgattttcatctttttatttgtattgtcatagaagggcatttcctgagcaaggatagcatctgccatagtggaaagcaagagaaagttggggagatagctcaggtggagaagtgtttgccacacaaatatgaaggtctgagttccatcccccagaacccatgtgtaaagctgggaacagaagtgttgtaaccatctgatcccaggtctgggatcacaagttagtgatgtaagtgagctccaggatcagcgtgagaccctgagcgctggcctttacatgtgtgtgcacacagaaacaataaaaggaagcctgcagtgtatttgcataggaagaaggccttcgtccccaacttctcagccctgacacctatggagactcagtgacaagaaaggccagtgtgccttctggtgtcatggggtcctgtgtgggtcatagagccccctttctgcagtcttccctaatgggtcttgggttgctacctttggttcatctgcctccttcactgccctgggcagatctgtgcttgcttgtacccctcttgtgtctgtctggctctggtgggtgtttagtggatgctttcgaatgaatgtggggacttgggtgcttgatctgggagccctggctggcccagacctgggagttagctggttgtcttttcttctacgttcctggttgcacatgtgccaagtgccttgtcctaggttgagtccctgcattgctgcttcaggcagacagcgtattattcaggcctacacggtgcttatttctgctctgctgctgtgtgcctgtggtgagcgagtgtgcctggagcctaggcccatggacgccatgaggtcatcttcccattgcatttggcttagctgaccctctataaatgactgtgtccatttttgggcctcagaagggtggctgggcaaagccagttcagggtggaggctgggtcagatgacaagaggattagaggttggcgagctgggcccttgggggatggggtggttggggaaaaggacagctggggtgggggtgtggaatcttgccctccctagtccaaggcctaggagtcctcagggaagagtgcatgagggaggctgggctttgccctcacagtattgggccagtggttgagcataggtagacggtcttgggttttggtgggaataggcaaagagagaatgttttcttgatggctgttgctgtccctgggcatgcttggaggggtgcaaatgagagtgtttggaacaccagtgggagtgggaagtcctgggctgtcagtgcacagtgcacaactctggcatgtggagcagatgctcagcaaaggaaggggcagccacagttatttataggaccttgacccgtggaggtaaactgcgccatattattatgctctgttatgccaccctgacacatggctgagaactgcactgtgttcctctgcatggtcacggtcttcccatgtgggaggtacatcagacttcttagtaggagctgggtttgaatataaagcttctggtagagaccccaagagtagcttggctacctggaggagcatatatggatgtcccctttaacagaatggaggagcatatatggatgtcccctttaacagaatggaggagcatatatggatgtcccctttaacagaatggaggagcatatatggatgtcccctttaacagaatggaggagcatatgtggatgtcccctttaacaaatgggctttggctgcatggtgctgactgcttgctagaaacacacagcccttgcaactgaggtcgtctgggcccctggttttacttacacagtcatctctccagtctgttcttcatgaaaggcatcttctacatcacctttctatctctgtgtttctgtcaagggccctctctcaggctggaccatcatctcttttcctctcttcctgaaactctctgcactgggcctctctccatgagcttggacaggttctgctgaaccttccagcctagatcagacttcctgaaaattctatatgcaagtggtttctattccctgcaagattctgtatcctgtatggggtgttgggtacctgggtgtggggtaggggagatgttctggagacactgggctcaggaaggtatagacgagctataggcacgttcatgggggtgtccctgagccccacccccttaggcctggtggcctcagtactatactggccatagcaggtggaagccaggctattactagtatattgggggatggtagaaaagggagaggctgctggatgcctagggtacagggatagtgggaggtataaaggccagtgaggatggtgagaatttcagttccatgagagggaaggtatggctgggtgaaagacacaggccagatttaattaagtgttgcatgctggggcgggaatctatgcaccccagagagtttcccagctgcggaggcagaacctcctcactgttcatcctttgaggttcccttgtggccttcctgctctggcttctgccctggatggctttgggtccattttgtcccaagttgtgaggctgggacaataccaagaaagcttcagtcctccactgctgcaagtaagggatgtacctcatagagcttgtcccctgaggtagattttctatcctgtatatcaccctgggtggtagccgagaacatggggcctctaggtccccctgactggctgcagggggacctagtcaggtggcaggtccttccagacttccctaccaccaggccacggataaactggagataatgctagttctcttcacaggcacgattgtgaagaactggaagctcttgacagatgcatgttatatagtacacgctcactacatatcagctaagtaggtagactgatgtcacagaacctccttggggaccctctttccctacagggcccactactcagaacgctccctgggagtgtccattataggcttctgtagacagctaatccctgctgagccgttagccagttagggcttaggataacagcctgtgtgtgtgtgtgtgtgtgtgtgtgtgtgtgtgtgtgtgtgtatacacgtattctgtgtactttgtgtttatgtgtgtggtgtatatgcacatgaataagtgttgtgtatcgaggcagccttgatggcagaagacttggacttggagtcagaatattttagagttaactcagctcctacaaataaactaacctgggcccccttctctgctcttttgtttcttgacactgttggggtggtgatggatttgcatatctattctacaggacgggtgtagcacccactgtgtgctaagctctgaggaagtggagctgatgtcctagctggagacatacctggtcatcacccaagcggtcacagcaggggcatgttccatttgtgaagacctatggctgagcttgggtctttatatgtcaccgcagatgtgggtggctggataggtggggaagactgggggcggggagagcttctagtctccaggtgagaggccgcctctagtcgtggggacttcctgtcggatgtctggtgtgttgtgttttcctaaaagctgcctctttggcaagttttcactaggtctaacaagtgcaaagaaaagaatactaatcctaaaatcttataccacagagggacaggctgggacagatgtatatcttggcttgggtgtttgtgcagggcaaggtgggtgggggtgcctgttcagagtggactttgggaagcatgggagaggcacctcacgaatgctaccaaagatgtcaaagatggcctggactgcaggggtccactcgcaagattccgcccaagcaatgctgcagtggacgatcccaggctgagtcatctcctgtccttgggcaagtcatgctagtctctgtagcctcagtctccccttctgaaacaggattaatgatacctgcttcctcaggtacttggaactttgaaatggaaatctgcacagatgctgctaggccagaccagggtcgagaggcactagtaggaccgatttaatctctcattgttctaaaagtggggattcctggagggaaagcgtggtaccccagcctctaaagccccctgtaagaggctaccacctccaaactgcatatgccattaaactatcaaggggtcagggctggggaatggagaagagaaaggctgctttttcctgcccaagagaagcttcatctaatatcattattaataataatagccacgaataataaacacctatgtcttatcatcattgctgcagtgttctgagtctcagtgaaggaactgaggagccacaaggtggcttgggaaataaaaaggcacttgtcatccagactgaccaccagcgttctaccccagatccctgggggttccatgtgatgggagaagagggctgacttccacatgtgtgccatggtacatatgcacatgtaggtacacatgaatgaatgaatgatgaatgaacgatcgaacaaaaaattggatgtagtagaatttatcttgaaaagaaagaagggctggagagatgattcaatgattaagagcttttccagaggtcctgagttcaaatcccagcaaccacatggtagctcacaaccatctgcaatgggatctgatgccctcttctggtgtgtctgaagagagcaatggtgaataaatttaaaaaagaaaagaaaagaaagaaaaagaagctttgttctgtggttgacatttcagattctctctctggtccaagcagacttatggattgccaccgctcctgaggggaggtgggctttggcccctgaaagacttgacccttaaataagatgtgcccctaattccacttggggtagaagtttatactgtgtgtggtagactaggtgatgggaggtctgggtttccagagtgaggctgaaggtgacagctcagtctcacaatggatgctggaggccagaggaccttagttttgggaacaagatgtctcctgttcaaacctggagcttgctgtcagtgagccgcctgtatctgcctcctccggtgtcggagttactggtgtgcctgggatttatgagggagcttgagatctaaactctggtccttacgtttgtatttctgacagagtcatttcttcagctcagaaactctttttattctaaattatatactatatactttagttcctattgttgctacaacattccttctataaaatcactgagataataggtttttaaaaatgttctggggaggaaatagctatgctgtggctcctatatgagctacgaaatctttcttagtgtgcagcccctgctctgggcctggcactgggccccctgtaccctctgccttgcctggagagttagtcctgtgtctactctcaagggcaaagtattgtctcctgcctctgtggtgtctagacctccagctcagcacacagcaggcattctaagcatgaaatcatccctaaaggtccttagaaaatggatttgaggatacccagggtgcaaatgtccaagtcttctggcggccaagtgtgttacataaatgaatgtaatatttgcatagaaactaacgatgcatatcatcctatatgctgctaactctctctacatgattcggtaccacactgtatatcattcaggatacaacagcaagaaaatccatctgtgtgtgttcagacaccattttgtcttttgaaatgttttttgatattcaatttgttgaatctggggctgtagaatcagagagccagtgtacttattgccaagggatgcatgacttctgacatcaggagacagagctgatgcctcacaggcctggaggctgtgtttcatggtggagaggagggatgcttgcggcaggactggggttatttagacgagaggatgctatcccacccgactttgccacattagggtaatctaggcctccctttccccatggtcagatggatgagtaaatatcttaggtatgtggtggagtcaaatctcagcaagtggctgcagatgggctgcctggtcagatggttcttgtggctggtcagggcggtgtgtgtgtgtgcgtgtgtgtttgtgtgtctgtgtgtatctctctctgtgtgtgtatgtgtattggggtgggggcactgcttgcttttaggtcagatgacaaacaggaccttggtcctcagcagaggaatgccatatatgagcgaacttccaagagacagaagtaccaggctgtatggctcaagggctgggacagtgtgaatggctaggcactcacagctacgcaggtgagtctccatccttagaagtggttcttaggccttttgtttttcctcccagactctgcacttttgtcttactttctgccccagatcccaagtttcacaacagatggattggggtcacaacatggggtttggagggagcctcagactctctccgggtatttctggggaaagggcatttgtgtctctagtgtcctttggaagggtgcctaagctgcatcatcttcccactgcagcgtgaggactctgcactaagctgagccccaggtcatcatgggagtgagtgggtggccacagacagcagctactatgggctggcctagctagggaggtattccccctgtcagagctgctgcagatcctactaccacaggctcaattccttataccttgacaccacgtcagggtaacctctgtgggttcctcacgttgtgtgcatcacatctgacctgagctaaacactggggagaatgtagctcacttgggctgaggttgtttctctcactgagcacctggccatactgggtcaggaggctgagagggaggagctgcccacctcccacacaggtgcccccacaggcctggatgatctgaggaggctgcggagaggaagtagacctgagctgagttccagggcaaggtggcaggtttcgggcagtcacggaagtagaattttcaaggcctgtttgagatgcagttgcgaggataaggcttaaggctgagaaaagataaatggagaccaggttgggcatttaactgtggctttgcctcagactagggctagctaatgtttacatgtgtgtgcacatgtgaggaggtcagaggtcaacttctggactctgttcatctttgttttttttttttaattaattcttaaattaatgaattaatctagaatgcatattgtgtgagtgaaggtttgtgtcgtggagtgtgtggagatttggagataacttttgggagttagttctcaccttccactttgttgaagatgggtctctagtttctgttgctcctgggtgcctccaggtagttggcccgcgaccttccagataattctctgttcttttctcctctttcactgtagatatgctgggattacaaatacacattactacaccagcctatctatctatctatctatctatctatctatctatctatctatctatctattgctatccctatcacctatcatttatctataactctatctatctatctatctatcatctatctatctatctatctatctatctatctatatctctatctatctatctatctatctatctatctatctatctatctatctacctacctatctatccaagggtttcaggtggctattgcctttacccactggcccctattcctggcttgctctcaccttggttttgtgagatagggtctctcataatttggaactggccaagtaagccatgctggctgcctaatgagccccagggaactgccagtctctgcctcccagaactagtgttgacagtatgttcaactgcatcctgactcttttatgtgggttttgagggtcaaattcaggtccttttgctcctgtggcaaacacctcacccattgacctgtgttcctggccttctgggttgagccctgtagctctcttcctcagacatatctggaaacattttgtctccccagcttgtgctcaaccaaacattcagtgtttgggcatctgactccaggcatgggaatctcaggagagttgaggggagaacatgagctcttcattcccagggggagtaactggccagagtagaaacaagctatttctaagaagcctaagggccatgggttagatgaggctagtagacaacctcctatactggctctgtgatgtttggccctgcttatgccttcttaaaggcccgttggaggggtatgagggggtaggggatgaattaagaggaggtggcacaagtggatctgctgagcagccgtgtcaggacccactcaccctcttaagccactgtcccagaaaggcacaaggctgtctcacccttgggtcctgtcagctgtgtctgtacctggctgtaggagcagatcccagggtgggagatgataatgaattctgtcgtatggaggactataacatggttggctggggagggggtggagatttcatggctgccttggttagaggagctttgctggggcttcacagggccggaagggggatagggtgacagggtggccttagctggctcagcccccttctaacagctgcagcttctttctttggacctttttctaagttcagcctctccctgggacatcagccaagatgcctgggctctggcgaacctgggcctcaccgctgagccctgggccctgggctgatacccaggggtcttcagtggaccccattttcatgcttctggatcaatctgttctctccatttcttaggtccaagaatgcacgagctattccagtgctactattccatgtaccactgtccatgggaccggcccagtgatcagacatgcatggtggagtagatggggttctgatttagatgggaccacgggcagggagcccgggagacagctgcagctgataggatgaaagggaggaagaaaatttattgacatcttagggagagttgagatttaactttcagagagggaggagaatttgtccttcagatttgcttgttctctgagtccacttttcctttaaaacctgtcctcttctcctgacaggattaatctgctccacctcacaaagatcctgggaaggctgagatggtctgcaggttaccacctctgtagccctgcagccttgtgtttctctgtggttgtagcaggtctctaggaattgaactcctgtgctgtatgtggctccaggctaggactgtgtagggaagccctggggtttcttccttcctgagtctcattctgggtctaggctggctttgcccagagagagcgagagcgagagcgagagcgagagcgagagagagagagagagagagagagagagagagagagagagagagagttgggagtgtagtatatacgtacatggaggtcaggaggatattgggggagtcctcagcgttattcccttgagacaaggtctctgaacttgaagctgggttggcagccagcctgtcctgctgtgtcctccctagccactcacccagtgctggagttagggattggaacccaggtccttacgttgtctcctactgagccattccctcagtcctggctctgcccatcttgtgctgtcctcctcttgaatacagggagtgagaggatgggcgagggggaaatgtctaccctagagcaaatggcagagcgcctatgtttttagatggaaccttgatgtggtcagggtcttgctaccttgaaggctagcgctccagagaaagtgaaccgtatcctgaactgtgtaagggatctctccatgaccctggacctcctatcgactccagaaatgttccagggtgaataaaccgagatattcttatgaataagggtacccagaggttcagggataaaaatgaataaagctgacctggtccctaatggggtggtaacagctgggtcaagaaatacccaccatctcccatgaaagaaaggttggggactctagaagccattagtggctggcaggagacttaaggatcaatttcatcaatatagactgagtcttgtccccaactgaggggcagaccctccttttaatccctttgacattgggaaggttacttgtggaggacaatatcctccatggtagagcggaggtgtcattttttgtcagtccaggacactgtaggtcaggcagccttttacaaggtgtgtggtggcaccttagaccagcatgggtgtgtgaggctgctctctggccttcacccgctcttggccttcatgctaagtgcagccccagcttgggatccagctggtggggcctgaggctcagtggggaaggaggaagtaagtcacttcttgcagggagccacctctaggccacactgcccctatcagctgttggccaagggccagcttgtggaatctgctgagttgtggtctacttccagcctcaggcctttcttctgccttctgcgtgggctccttcttacactggaaactgttgcatttaagccacagccccagtgggcaggggcagctaggggccagtgggacagtctgacgaggggttatgtgacagttgggttgggttctgggacctctgccctctcttctgctggggtttccatgccaccctccctgggctcagcacctaaacccttctcccacagaaggcagtgaagaccggatggtagaacccagctcttggcaaattctctacaagagttctgacatcatagaaggaagtatctgctgcagaggagaggggaccagggtgacttgcccaaggctgcagtacagtgaccgtcttggttgctcctcgttcagtttctccgaactggtggacccctaaagtgttgatctcagtggtgctcagggctctaggcagaaatcatttaaggcattcattcagtttgtgttacttgccaggcaatgctcaacctctctgagcttcttcacacactgctggtgtgctcagtaggacctggagtgtgaggtcatgggaagaccacacaagtgatcagagccttttcctccccacacccccacccccctgcccttgacttgcatctagacttaggaggtcagtggcttctctggcctctgcaccctctcttcagttttctctttgccttctgtgctttctaagccactgtctttgcctagacaggaacaataggggtctggttatacagcccaggctagtcttgaactcatagtcctcctgtctgagccttccaagtgctgggtctacagacatgcacccctacatcactgattgattatctccttagaggaagaaattatggaaagttgtaaggaaagtatgaattcccatggctttttttcctttcccttggatttgtgtaagttcacatgtgtgtgcatgcgtgtattggtcagaagtcaacctcaggtgtcatttctgaggtgctctgtttctttgagacagaggttttcactgtcccggagctttctgattcacctaggctggctaattagtaaactccacagagctccctcttctgccccctccccatgctagaactcctggcatgtcctagcatgctggatagttttaggggaggggattgaactcaggtcttcatgtttgcaaggaaagcactttactgactgagccatctccccatgatccactcttgttcctcagagaggaagcaggaataaaaaacaaaacaaaacacataaataaacaagtttattcttttatggaataacgtaaactttcagtgcttctgattttgctttgtaatgctgggagtggaacccagggcttctccctgctaaggcagctggtacactgggccatttgttttcttccccagcccaggcagcaggtgttgagggggtgggagatggtggctgaagaggcagatccacccccatgcctgggctgagaataacgccacactcatgttggggcaaggagtggtggctctggtgacatatctggagaggtgggtacaggactgcagccaggggtaaggcatgtgcctgtggggactgtgccccacccaatgacagccctggggtcaccctgtgctattcacatttcactggccatgcctggtcgccagccttttggcccagctctagggccagactattgaggcccagacagggctccacatagtggctgctgctggttctgcgagactgtccgtgtagggactttgagtttccctttcactgatttttggggactgtactgtcttattcttgtgtatggcacatgtgtagtggcctcaagctgacgttgctctctcttccaccttactcttctaaggcagggtctcaattaaacccagggctcacccatcttactagccaacttgctgtgggggatcccctgtgtctgctttctagggctggagttacagaaagctgccatgcccacccaacagatacatgggttctgagaccctgaatttgcagccttcttgcgttcataactatctctttgagcactggcccatgtctgttttttgggagtctctcattgcgccgataggctgggctaacgggatactctgagtctggccttccagtgcttggattacaagtgttccaccgtgcttgtctttttatgtgggttctaagacttggatcctcaggcttacaagggaaccagcttactaactgagctgtatctccaacctctttacctctctaaccaagaagcaaggggcaagaggctggggtgcttacaggaccctgaagaactgcagccaaaaagtctgctgctgggggagcttggcctatgagttgtaggcttagctgctgtctatccctggggaaggctaagcacgaactcaagagagtcacagaggcatgtgtgggtccatgcggagagctgggtagggtgggggctaggtggagtgggctggcttgggaaaaagcaatcctacttaggttagcataaagcagagatgacaggaatagacccagccgtgactcctagggtggggcctgatctttatgcccctccccccccccccgtactgggtacctctcttccccatgtaccaccatcttggggaatgacatcctttctctaattgttcaaaccggaatccccttcttcccatttttcatttcccatttggctattctcactattgcctgcccatgttctggccactgtaatctcacctgaagcgattccctgacctacccttttgaaggatatccctatgtagcaaaacctgatagaatggaagtcagtcaacaccgggcttgatgggtgggaggctggcccaattggtacagcgtttactatacagacctggggacctgagttccatccttcagaacttagtgctcattgatttcgctagactgccgggctagcaagctccttgtcacttccccagttattcaccagttgtgaatgtcagtaagcacagaaaatgttgctggagggctggggatgtggctcagttggtagagtatttgcctgtgcaaaggcccttgggttttttttttttttccctagtaccacacaaaccagggctggcagcacacacctgtaatggtaatcccagcactacagagcaggaaacagaggctcaaggatggtgacttaaagagattcaggagctgagctgagaggattcaggtctatcccttagggtatccctgagcctgtgggtggggggagacccctttacctcaggggaaaatatgtggtctctaccctgtggctttctattactttgggtccatccagagggggtaggggatgtctgagggctggcgaacattctagtcttctatggatggaactttgtctctggcttcttcctaagactggcatcacagacacttgtgttaactttgaagacggaaggcagagctggtggctggccagccggtgctgcactgcaggaagcgtcaagggttgttcctggccagggtcttctccatcctggatgtgctttcagacactgacctcctgcgtgggaacttgattctctctactaagaccacagctggggcaggtgtaaggccctgggcccaagcctttctctttggttgctttcccttccttcctggaggtggggattaggcccagcaacagctctgtttgcatgggcccctcaggcctaagctgtcagttacaggctaacaggctttcgctggggctacactgaagtaatggagcatgcatttgttatatactgacaaaagcaacttgaaggaaggaaggaaggaaggaaggaaggaaggaaggaaggaaggaaggaaagaaggcaggcaggcaggcagggagggcttgtgtggtccatcattacaggaaaggcaggacttcaatagcgtgaggcagcaggtcacactgcatctgaggtcaggaagcagagaagggaatgctggagcttagctctccttgtcctgtttagtccccccaggactgcagcttacggaatggcgctgcctgcattcaaggtggatcttcctaccttaattggcccagtctagaaaacccttcacagatgcacccagaggcttgctgctggtgatgctagagcctgtcaacttgtcagtcaatataaatcaccacagaaggctcagacctcagtgtctgaactcaagctccggggagacactggcagagcttggtgagatgataagctgcccctcaagcagtcaccagcgcatgaggcaagagccacctccaggggccacctggtgatgaagctgcagtcctaggtcaccctgcttggtgagcctctgcctactctctcacaaaatggctactataagcctgcttgttctagaaaagaagagcggaagccacggttggaggtggctcagatggcggcttagaccaagaaaaaggtctggccaggcctgtgagcatacctcagccagagccccctgtggaggaaaatgatctctattggactataaccacactaagcactggccagagaagcctgcagaaggggctgcttggtctcagccccaataggtgatgggctgagtaactgctggtcctagtctgtctgtcttcccacattgacagatctgagctgcgctgacccatgactgcttcaagaccacagtctcctggccctgttctgtgtagcaatgtggccaggagtgtcttttgctttggttcccttttcttgcttaaaaaaaaaataatggtgtgtgtgtgtgtgtgtgtgtgtgtgtgtgtgtatgtatgtgtgtgtgtgtgtatgtatgtgtgtgtgtgtgtatgtgtgtgtgtatgtgtgtgtgtgtgtgtgtgtgtgtgtgtatgtgtgtgtgtgtgtgtgtgtgtgtgtctttctctccttctaccatgggttctggggatcagctttccagttcatgggcaaatgctacaagaggttctttcccatcaagctatctggtccacccatcttgcttttcttatctttggtttagtttcttctttcactgcttaagaaaggagaggtttatttcaccttatagtttgaggagataccgttcgtcatagcaggagcctgaggcagctggtcccattgcatctgcagtcaggaagcaaggagagatgaatgctggtgcttatcttattttctcttaagttcatcaccccggcctaggggatggtgccgcccacatttagggtgggtgttcccacctcagtgagcccagtttagaaactctctcacagacacacccagaggttcttcttccaggttattctatctctggtcaggttgacaggattaactgctacagagggctatactcaggagcctcagacatgaagtgaaggctaaatgcctgggagcaagggttcccagtgcagtgatacccaatgggaagaaaggactgattctagggtggaggcaggacaggagaggaggagtctggaacattttgcaatgctagaaaagaaggttaggacgataaatggggataagtcaggaggctcccactggtcacatttgggaccaaaaagaataatgataggaactgatttgtgccacagtgaatgcagaatgaaagaatgagttcttggcagtagccttcctacgtgcagaggtaagcagggaggctcttcatagaaggccagggcacatggaggaggctgggccacacttaacggggcttcacaggcttctgtggatactcaggactcagggtggaggaggggctgcatggaggaggggcacctgattcagcaggacaggctggagcctggaattccttctcttcaccaagctcttggctaatagttatgcagctggtccatagacttcctgtgctgactggtttaatgtcagcctgacaccagatagggtcatttggaaagagggaacctcaactgaggaaatgctcccaccacattggcaacgctgtaggattttctgattggtgattggtgtgggaggtcccagctccctgtgggtggtattacccctgagcaagtagtcccagatgctataagaaagcagactgagcaagcctcgaggaacaagccaataagcagcactccttcatggcttctgctttagttcctgccttgagttcttgccctgactttcttcagtgatggactgtggtgtggaactatagttgaaataagtccaaccctaagttggttttggttatggtattgtattgcaacattaaaaactctgagatacctccctttgattagcaaacctgtgtgtgtgcgcgcaccccccccccccacatgcatgtgtatgtatgtgtttgggtgtatgtgtatatgtgcatgtaggcccacaccaatattttttcagttgccttccatctgatttgcttagtcagggtgactcactgaacttggggctcactgattctgctatgccagctctccagctggccagcaaactccaggaatccattgtccctgcctccccagtgctggaatcacagacatgttcttttacactctacttttctatgtggttgctgtggatctgaacttgtgtttgtttccataaaacggggtgtattggccacagctgtaatcttagcacttgggaggtagaggtaagaagatcagaggttcaaagttactcttggttacatagtgaatttgaggctagcctgggcttcatgagacactgtctcaaaacaaacaacaaacaacaaacagacaggcaaacaaacaacacaagaaaaagatcaaaggtggcagatgccaagagttgcctagtgggtatggaggaggagagtgtacagtggagtgttgtgttacatggtcattttacaagctctagtctttcagaatgaggctttgaggggggacctgtggaggctggtgtgaagcaggggccttgattcccctcttcagacgtcccgccttcttactcttaggagcctggatgcttggtggctgcccatattttcacccagtccttgtgagagccagcacaggtagctccagtgtcctagcagagatggagagacgaacccctcatctctagtgcagagccagaagggtatgggtgtaagagacaggctggaaaggaactttgacactgagggtccttggaatagagaatgaatcccatggaaactgtcactgctcccctttgtcactgctaacccctctgaaggcttgacacaagagagccctctgggacaaaataggggcggtgggagggtcctgcaccacttctcctcctgggtacccacctctggccactcccacatcccttggtctatcttttcatatccctgtatttccctataaggcttgcagctgaccaatctgcctctgccaacctgggaggccctttaagtttggggcaggggatccaggggcagcccttactagctctgaatcagagcacctagcttggctgatcctagctctgtatgagcggggtgtaggggtgaggagggacccattagaggaataccctagagaatcagagaatcagtgtaaaactcaggggtacctgggcggatggacagacctttggcctgattctggggtcctttgctcatttttgcttcccatgggagaaacctgtctgatttctcacagagccttctgcctgccttcctgtctgccccagtatgagtttgtgagggcgttagagcgtgcatcctgtctctgaggtccccaaccacagcctctgctgtgtgaagaagttcagtggggagggtgggggagacgccctactgcctggatgaaattcactcggagacagtttcttgctgaagctacagctggccgccgggagaagatgatgaggaaggtgaagacctggggactcttttgagggtctcagcaatgggtcccaggagggaggctggcgagtgcatgcgctcatgtctgtgagtaggtttgccagtgttggcaaaatggagtgagtggtgggtggagttcactctctgcttcctacagcaggtgggacagacagcagagtccatcagctttcctgcctggcttgggctttccggttccctttagttttcctcctgggctcctggatttgaccctgggttctggaaaagtccttattcctgcctatcttctaccactagactctctctctctctctctctctctctctctctctctctctctctctctctgtgtgtgtgtttgtgtgaaagagagagacagtcagacaggtagacagacacagacacacacagacacacacacacatacacagagagagagagagagagatacataatgcatacatacatatatacatacatacatacatacatacatacatacatacatacagatagacagacagatacaagcacacagggagatagggagggaaagaaagagatagtcaggcagacagacagacagacacacacgcacggggggggcggagagagagagaggaagtgagggagggagggagggagagagacatacatacagacagacacaagtgcacaaggagagaacgagggagagagagacagtcagacagacagacagacagacacacacccacagagggagagggagaggagggggtggaagtgagggagggagacatacatacatacatacatacatacatacatacatacagacacaagcacacagggagagatggagggagagagagacagtcagacagacagacacacacccacagagggagagagaggaagaataagaggaagagagagagaggctgttatggagttgctggagggtttggcagggtgtctcatacactcaaggagaatgctgagcccagagcctctgttcttactctaggccaagaggaaagccacactaggcactgggggacttagagaggacttccttccttcccagaggcacaggtggctcaagcagtcactggcctttgcccaacagctcctctcagccctcccagggaaagtgggccgtctccttttgctgctgcagaggggctgtacagctggatgtttgtggaaggaggcctggagccatcactgaggtgttccggcagccgttgacagacacttcagctccactcacatctggccaagggctgaggatgtgaggagaggaaaccctgataggaggtgacattgagtggcactgataaggcttcctggactgctggctctgggcctgttaagtgacctcctgtgctggcaagcacatacacgtggaggtgtggccagtctgagtcttatcctttgtcccatgtgaaagctcctctttgttccttactaagtgccgcatgcagggtgagtgtgtggagttgtaagtgactggggtttccttttgccatgtgtgtgaattagaatctacatgacacccactgggatttccaggtgtgtcctacaacaaggagttgaaccaggaacacatggcgatacaaatagacagctcatgaaagacgagagagatggggctagggaggtggctcactactcaagcaggtgacctgaggtcagacctctggaagctatgtaaagcccagtgtctgtgatgccactaatctatggttagataggggaaaatccctggaagcttgagggggtagtctggcattgaaacgtggcataaggtcagctctatatgccttgcagggcaaatggcttacccactgagtcaattccccagcctctcacattgtcagtctgatgcttctgggatctcttgctctgcctttccagttctgtctataactcgggatacctgggtaccactgcagccaccatcactccacccttctcatccttcaaaccttagtgtaatgtctgtgctctcagcttctcctggtccaggctgcaccagatactgagggcccctgcttccccatttctctgtgtctgtgagctcagcacaagagactccaatgagagagatgactctgtctgtgggaagaggtgtgtgtgtgtgtgtgtgtgtgtgtgtgtgtatgtgaatataggccatggaggaagaaacagtggctatacctatgttactctaatggtctactcaagtaggaagctgatgataagtgacttcagccaggtctagcagcccttgctaccctctccggtctgtgatctgtggtggtctgttctgtgtttactctgggcttccctgcagtgtcacgggccttggccgaggcagcagaatcctctgagtatgtgaggacaccctgtttggcccctttcctgctcagcccatgttgagtgggtggggctcccagcagtgcagtgagatcagtggggaggggtgtttggtctcttaggctgtttctgaagctttcttcttggtgacatcatgacagcccgttggaaactcccttcttggttgttaatagagctttggatagaaggtgaggaggagtcttggctgctccggtctcactgtcttcgtctatttcttggtggtataacacaggcagggtaatttataaagagaatgctttggagttgggcacaattggtgaagtacatgctgtgtagccacaagggtctgagttcacatccccagcacccacataaaagaaagaagggaggaagaaaagtattttagtcagtttgctgtcattgtaaaaaatacttcagacgacctaaaagtaaggaaaaggagtcgtccccttagttctgtaacagcctgcttgcaaatacccttttccccaccctgcctccgtttgctggagattctgtctcttggttagctctttcccctggactctcccagccatcccttctagcctatctatattcctttgtgtcagccacagatatccagaaacaccctcagtgctactagagccccatagtggccacactgagcacgtgggtaggccattttcactatccttctggtcttccattgtgttctgtccagacttactctgagtccttcctgtagcagcctgctttcaggagcccctcctcccatcccaactctgttcactagagatgccatctcttggtactgacccagaatcccccttcatccctgtcttaccaggcttattctttgttctactatagcttacttgcaggagcccttcctctcaccaagtctctactccctggggactaacctcttggtgtggaccaaatctccctaggtctttcacatagcaccggccagccattcctactagtccaccccattcctttctgccacccactaccagggtccctgaagccacatttacctaggatctagagagggcaacagaaaccaaagaacaaaacacctacccaacaaagataaggctaaatatattgacacctagaaacacccctatcatcataacttcagatgcctagactccagtgcaaaaacacagcatgaatagccatgacagcataccttcaccagaaccaagggcctattacagtgggccttgagaaatgcaagtatagttaaagcacaaatcaaggaccccagaacagcagttatgaatatgttcaaggatattaaagaggctatgaataaatcccatgaacataaagaaatagttgaatgaactattaaaaacagttaaagacatgaatgtagaaatagaatcactaaaaaaaaacccaccactaccaccactaccaccaaaacaagatggaaacaaaacaggaaattaatttataatgtcaaacaaaaacctcagaggtaagcctcaccaacagaatacaagagaggaaaaagacaacctcaggcattgaagacaaggtaggaaaaaaatagatacttaagtcaaaaaatgttgaatgtaaaaaatctcccaggcacaaaacatccaaggacactatggaaagatcaaatctaagtataatagggatatagaaaggagaagaaactcgggtcagagacacagaaaatatttccaacaaaatcatagaagaaaatttccccaacctaaagaaggaagtacttatcaagacccaagaagcatacagaacaccaaataaataggactagaaaaaaattcctacacataataatcaaaacactaaacatatagaacacagaaaggatattaaaagctgcaagtgaagaagatgaaataacataaaaggaaggcccattagaacaacacctggtctctcagtggagactctgaaagccagaatgaccaggctggtgttctacaaagtctgagagaccacaaatggtaacccagactattatacccagcaaaactattgatcataattgatggagaaagaaaaacattccatgatgaaacctatttatatattttctatctaccaatccagttctatagaaggcactagaagaaaaacttcagtctgaagaggcgaactacacccaaggagtcacagggactaaatagtaccagaacagtcgattaaagagggagaaaaacccataccataacaacaaactaacagagtcactaaacactgttcattggtaactgtaatggctattcttggttgtcaacttgactatctggaatgaactacaatccagaaatggagcacacacatgtgacccagatcttgagactggaaaccacatgcctttaatctagatctcgaggcacacctttaataacttttcccatccttttaccttgagataatgtgagttatgtttctcaaatgcagcagaaagatggatctggttttctaatccaatctgttaatctgtgtctgggctaatccttctgctggaggtctacataaggacaatggaacaaggaagggtttgttcttctttctctgcttgcacttaacttgccagcacaactgttggagcttggcttcttcagggttccagcttatacagaaggccagctgaaacacccagcctcatgggactgagcaactactagactcttggacttcccattcacagctggccattgttaagttagttggactgcagcctgtaagtcattccaataaattccctttatatatagactcatttcataagttctgtgagtcaagagaaccctgactaatacagtaactctcagtattaaccattaaattccccagtaagacacagattaacagattggattagaaaggaagatcttcctttctgctgcatcagagaaatacatgtaaccattatctcatggtaaaagaaaacaaatgttattccttgcaaatgaatctatgaagcaaatatatctagccattttaatatcttacaaatcagactttaaaccaaaactgatcagaggagatagggaaggatactatatactcatcaaacaaaacatccaccaagaggatagtgcaatcctaaacatttgtacatcaaatacaagggcatgcaaactcataaaaagaaacactacaacagctaaaatcaaatagtgactcacagtgatagtgagtgacttcagtatcccactcttaccaatagacaggtcgaccagacagacactaaacagagaaatactggagctaatagacgttatacactaaagggacttaacagatatttacagaacatttcacacaagcacaaaaatttttcttctctgaacctcatggaactttgtccaaaattgaccacttacttggacacaaagcaagtctcaacaggcacaagaagattaaaaaagcatcatgcattctattcaatcaccgcagaataaagaaagctgagtatcagtaacaagaaaaacaatggagtgcttacaaactcatggacattgaacaactctactaaatgaaaaaatgagtcaagacagaaattaaggaggagatcaaaatatattttagaatgaaatgagtatgaaaatagaatataccccaaaactatgggacacagtgaaggcaggttctaagaggcaggtttatagcatgacgtgtgtgtctgtacacacgcacacacacacacacacacacacacacacacacacacacacacgagagagaccccatattaacatctttaaaaaacacctgaaagatctagaacaaaatgaagaacttatcctctcaatggattaaatggcaagaaataatcaaactcaggtatagagatcaataaaatggaaacaaataaaatcaatatgaagaatcaatgaaatgagttggttcttcgagagcatcaataagattgatagatgcttatttaaattaactaaaaggtggagagagaagactgacaaattagagatgagaagggagcataacaacagacaccaaagaaatccagagcctgactcataaggacaaactttaaatatctgtaccccatcaaactgaaaaacctaaaggaaatgaataaattccttgatatatatgacccactgaagttaaatgaagatcagataagcaatctaaatagactcatcagccccagtgaaaaagaagttgtaattaaaatagtccaaatgaaaaagaagcccagggcaagaatggactcagcatagaattctatcagacctccaaagaagaattaacatcagtatacctcaaaccattcattccacaacgtagaaacagaaggagcattccctaattcttcttatgaggtcacaattatcctgatacctaaaccaaagtctcaataaagaaaaagaaaattaccaacaaatttctcttatgaaccatgggcccagggggaaaaaaaatcaaacactactaatctagtaaaagaatgtagcaataaaatgacgcctaatgacattctgtaatagtcataggtcagttgctttgctcagccatcatcagagatgggagctaacacagagacccacagctgaacagtgtgcagagaggaagagactctggagtactcagccctcaatgggaagtttccatcaacctctctctcagggatcagggatcttttgggaacaggaggcagaaagattgtaagagccaaaggtgatggatgactctaccaaaatagtgttcttagacaccacaagtctgatgcacagaggaacccctcagtaatgtggtagcatgcaaaggccttgcacaggtttaagccagaaggggtctcagtgctgagaaggagaggtggccactcctaacaagaagctctctgcaattggtatccatttgcaaaggaaaagttcgttttctccaatggcgtctcactgggaatactaactatacttcagggcaggctccatgcccagcagtaggtggccaacagaaagcaaactcagtggtccttttgtcccatattgttttgtttggattttttattttttgacttattggtctttgattatatatttatattactgatttgtgtgtatgcatgtgtatttcttggctttatttgtttgtttttgaaaggcagaaaaagaatgtgtgaaattgagtgggtaggaaggtgggaggttctgggaggagttggaagagggaaaaagactgattgaaatatactgtattatattgttctccaattttaaaaaaggcagccccttaaaaaaacaaaaacaaacaaacaaacaaaaaacccaaaacacaaaaccaaatcagaacaaaagaggataggtctgtttggtgcccaagttagaagttaaaatcttcagttggttttgctcatagctttgggcccagtgtgagccagcgtgtcatttctgggaagtgtacatggttggagaagttccttttcttatagcagacaggaagcgaatgagagaaggagaagggggtggagccccaggagtgtcttcaagggcctgtcctcaatgacttaactctctcccatgtccttccatatcccagtggcaccaagtcttgtaaccaggtctttactgtatcgcatttggcagatagttggagaaatgcttatccaagttaatatgtacaagggagggtgtgtgcatcactatggtatactactcagttttatacaaggaatgaacactggtgggacttggtattggatcagagtcctggaaccaatcatgtgtcagtactgaggcgcaccgcccaagtaagtcacttgtaagaactgacctattctcttgataatggcgcccatttttccacctgtgatgaaaaagccctcttggcctggttaccttccatttggtcttctgcccacactgtgttgttaggataaaccttccaacacaggaagtgtgggtatacaaccattctgcccattgcacaagggacagtcctcatgatcttcgggccccagtctttcttgactgagcacccttgttccggcccctggcttctcaagctgatgttgccccttctctctgtgcggcaggtcctgcagaaactggggaaggcggacgagacgaaggacgagcagtttgagcagtgtgtccagaacttcaataagcagctggtgagtgtttatggaggtgggacagcgtttgctaggtaggagatggtgaggaccatatttgtggagtaggaaagctcagaggagggaatagtgtgggtcggcgaggttgtggaggaccctttcatagatcaagcagcaaatctcagagatgtagggtcaattattcaaggccatccagctttggaagtagatccagatccaaggtgtctgactctaaagcctggaaacactcttagggcatccttaccaggatacattctaggcttaattatgtagacagtgtggaggaaacagatacaaggaaggacttttccgaagggaaaaccctgaatatcccaaatgcaaatgaccttcaccattccctagttgagggttggtgaaaggcaaggcagctgagggaggctgagccagctaggccatagccaatggcttcttcagcatagacccctgagaatctgaggccacaaagaaaggggcagggaatgggaggtgaggttagagctctgctagaatggggtaggaccaggctgtaagactccagcttcatgctactcctagtctatgatgggccttggatgcctctgtagctggtctggaacccaggggaagcgtctcattagcttggcctaggatctgggagtgacagcatgctgggagaaagctggagcatgctgggaaggtcaaagaggatgctgggagagggttggtgaacagcaagagagaatggggaagtgtgtcaggagagtgcttaaggacatggcacctggcctgccagagatagcagcagtgggagccactgtggctacttgtccctcggccagtaatgggaggtgagtatgtcccctgacgggggggggggggcatcttctgccttagcttctttgtctgccaaatggaagcttgaacaagcagtcagaagccccagcctccgagtctgtgtcttgtgaggcaaggcatgtccccaccttagctgttttcttcaggctgtgggcagctttgaggcccctttggagactgctattacgtatgtactcactgtgggccatgcatagccttgtctgccttacaggcttgttctaccatacagtttatgtagtacttgggatggcgttgtgtttgatagcaagcactctaccaaccgagctaaactaaaccctcagcttttggtattttctttattgtcagaggaagcactgtggtgaggaacagttaaagccacatggctagtttagtggggcgtggagattgaaatttggactctgggctgtttcacttcctctacgttcacgcagccctgagtggatgctgagagcttggagtgggactgctcatgtccctttaaggcaggctgggctggtagggggaggacaggaaagcacagagacagaagctgacgtccacgtggcctgggccagcagagtagcacttcctattcttcccatagtgtttacaggcatggctctgggcctggagggcacctgctgggatgtctaagttctcgtgttccagaacagggaattgaaccaccagcacacggatagtgatagaaacagagaactcttctaagtgaagggtagttttgtgattgctgttttggggtgtcctttgcatcacttggaggttatacaggtttggagcagcctggtgtatatgagagataacttggcaaagggctgggggtggggtgtggaaagggtatgggggccgttctctatgcttgagggaaagaatccaggagctgtagtgagcatggtcctctgccagcctacagagctgagatcagagcaggctattggaagccccacttcctcctctggctctggatggagtcttcagcgtagtgaacccaactctgttagtataaagctgacaatgtattcagtctcagggcagtagatctctgactccttctgtgtcctctggaggtggcagaggtgacctgctgttacttaccctcaggtgacccaggtggatggctctcttctggcccagttggtgccagtcacaggtagcacagtcacccttgacttctgccttgtcctgagtgaccgtaatgggcagagctagtaggctttgaggtacttggcagttaagagtcaggtttaccttccaaatatgcttggtttgttcacacaaagactctttacaacaattctatacagagattatggtagtctcatttaaacagaccaagtggtgaactgttgggcagaatatgcaggcttctactgggatttctctccagggagggcattttggagcaggtttgacccatggcgttaggtccttcagctgtgtcagattgggagggtggtgctgttggaagttccagattgtctttgagagccatgatcagcgctgatgggtgcagcaaaggtgtaggaaactggagccagagtcacacagtggccaggctcaaagtccccttgcccgttgggatcagtgcagaggcttgagttgccatctcaggagcacagcagtacaatcatggggccacctccaaaatttcagcttttccatattgtttcagtgggtgtgagatctgggccatccgggctctcagcttagggctgtttcattaacatagaggagctgccttaggcttggctcatatcagagttgacttgtggttggctccttaactgacagtgcagatgtggatgcttagagccagccatcagactgagctcagggaccccgtgggagaactggcagaaggactggaggtgcggagggggattgcaaccccataggaagaacaacattagctggccagaccacccagtgctcccagagactagaccaccaaccaaggagtgttacagggagggatccatggctccagatacataggtagcagaggatagccttgcctgacagcaacgggaggggaggcccttggtcctgtggggtttgatgccccagtgtagagggacgctggagcagtgcggtgggagagggtgggtgggnnnnnnnnnnnnnnnnnnnnnnnnnnnnnnnnnnnnnnnnnnnnnnnnnnnnnnnnnnnnnnnnnnnnnnnnnnnnnnnnnnnnnnnnnnnnnnnnnnnnnnnnnnnnnnnnnnnnnnnnnnnnnnnnnnnnnnnnnnnnnnnnnnnnnnnnnnnnnnnnnnnnnnnnnnnnnnnnnnnnnnnnnnnnnnnnnnnnnnnnnnnnnnnnnnnnnnnnnnnnnnnnnnnnnnnnnnnnnnnnnnnnnnnnnnnnnnnnnnnnnnnnnnnnnnnnnnnnnnnnnnnnnnnnnnnnnnnnnnnnnnnnnnnnnnnnnnnnnnnnnnnnnnnncatggaagcaaaggggaggggagagaggatggatgtgggatgggggggggttgtggaggggtaaccaggaagtaggatatcatttgagatgtaaatgaatggaatgattaataaaaaagatcttgtagggattactttattcaaagttacgcaaaatagtttcaagtgtgtcctaatatgtatcctagggagactatgtgctttcagcctccagtactgcataccccattcaaccctctagaaactatcatgggattccaggttggttgagctattactcataggactgctctagactgctgggtcctaaggctcaccgaggtgtgaaagccctactcttggctgcttagagtaaaatcctgtccctggcactgaatgcctagcagcgagagttggagctgaagtcaactgtccctagaaccactaggagctgggagtccgagtctgcaggcttagggtggaactgagtagaggaaggcctaacaggggtgtgtggaggctggctggactcggcctcctctggctccgtgttagacccttactaacactcatgggcccagctgagcaatggcctagaacattctcctctagctggactctaatggcactggaactcagaacttgtagagagttactgcccagctatcctatttaggtaccaaggaaggcagttctgggtagtcccttgctcacagctcagtgtctggggaggcacaaggagccttggcacagcctgtagctgttgagtgaatgcatagcccatggggagcctcttgctttggtacatgctttggaagagataggaagggggctgaaggtatggctggggtgagggatgcttagcagaaagagaagctgggtctggaaggttctatggcactgggtaatagaatagcatcaccgcaggagcgcactttaaccctcacccctaacagtgaaggatttaaggtgttaaagtggggacactttggagtaccgggattctaactgtccagtgccgcaagcctcacatcctgtcttgggacacttctaggtcaggcttttgtttcctcatttaatttgttcccagtgagccttgaacttgggtcttcagaattctatctggccagggctacatgccaggtggtcagcctcccttatctgcatgatgctcatctgtggatctaactaactgcagagtgaagatgttcctagaaacaacaacaacaaacaagattatataaacaaaagcaacgcagtgtgctgttcatatgccatttgcattatgaataatgtatagataggtggcgtacagtacacaggaggacacatgcagagtctgtgcgtattctttgacatttcatataacaggcctgtgcatctgtgggtgtgggtgtctgacagggctccaggatgggcctccagtgtttctcaaagcacagctattctctagggggacagagagagttttagagagagattttgatcctttcaccctctctggtttattttgtgtgtttttcttaaaccactggggctagtgtccttggctgtgaagcagagtgcagacggcaaaacttggattctatccaagtcaagcgtagtgaactagtgagtttgttggagtgcgcacgggtgagtcaaaggcagctgtgtactgagaagcccacccagcatgggtaatgactcaccaaagctgtacccctagcgtttcctgacttgcaggcagtgtggctggctggagcgtcttctctaccctcccctccgccccccagcaattgttactgtttatataaccttggggagggagcttagagttctgcacagatcaggagcttccccgggagacactgttagcagttacccagctagcccgagccctccctctgcttggaggtgctccctgaatctcccaggcttcgtatgatgctcagtatgttgctgatctcacagcatctttgtcaagtggtggtaagaagatggtacacagggctgtgggcaccagggagacgtgcaggtcccagccgaggaagagggataggcaatagaggtaagagcgtgctgggttgagtcaggaaagcggccagtccctgaatgcccttcctggaggtggaccagtatgggcagagatcatcttcaggctggagtgctgcaccctctaggtctcctgtgccatatctgcatccctctcctccagagcgggaggggccaagacagaccagcctcagccacataccccttcccagtatgaaacccacctcctgacttcacagctctggggcccagtgtctcatctgagctgttcccgagcacttgtggtatgccaagcagggtcattacttgttttgtgttctcaaggctcagggaagtatactgacttgcttattgcatgaccctcaaacttgtttgttcctttgttctgcttcgcactttcgatagtctgaggactctctcctgttgtaacccgccctgtaccctggtctcagcattcctggtccatttctatatcatagggacgtgaggtctagcccatggtaccatcctctctgctgcctctggggttctgctactctgctagctcagaaagagtctagtctgccaactcctctacagccttctccacgatctctctcacctgggctggaggcccttggagttcttggcagtatctctatacttctgttctccgctaactctgggcttttcttcttcttggagtctgccaccttctatccatcagcaccatagtccccgtgaagactcacaggagcactgtgtccttactttggcactgtgagagtctctgttcctaggtgctacctaaaattgcagaacaaggtgcctgatgggccttgaacccacctggacatgcttctgtgctcatttgtcacatgttcactgtcatccgagatcggaactgctgcgtttgtgtactctatatggtatcacatacatacatacatacatacatacatacatacatacatacataatgtggcatcactgtgcaggggtctgtcttctagccattctaacactactgagtggtggctgacaagtgaggctgtggggctcccaatgaagagagtaacaatgacaggaacaatggccagagggccacagctgctaactctctgaggttccaccttgtagggagaacacaggttggtggctgttggcaagagtgaagactggtttgtcatgcaattggtagtaggaaggggagggttggtgacagggtccccaggacctgaccttgttcttggcttttctggcagacagagggtacccggctgcagaaggatcttcggacctatctggcttctgttaaaggtagggtacgtctctctgtaaggatttggggctgtcaagctgaggtgggccaaggtgtgggtcagctgggccacatttgtggtggcaatggctgggtgggggatggcatgtggagcccatgcacctctccctaccccacagcgatgcacgaagcctccaagaagctgagtgagtgtcttcaggaggtgtatgagcccgagtggcctggcagggatgaagcaaacaagattgcagaggtaagcatgggtgggtgcccttggttcttcccccaaggcccttttggctttagctcctgtccctgcaatgtctcaccttctgatgcaagctacgctgattctctggcactcatacacaacgtagacctagccaagttgccttcctcttctgcagtctgtgcttctggtacttgtcacactgacctttgagaaagtcatacagtctcccttgcagaccctaatagtctttactgtatccataccttgctgtcatcccagggacaccacgacctcaggaaaccaaggcactgagagtccatagagctttgaagtggtgggctctgtgatgagagctgcagacagtgtggcttagctctacaaacgctcctgtttctatgtttcagaacaatgacctactctggatggactaccaccagaagctggtggaccaggctctgctgaccatggacacctacctaggccagttccctgatatcaaggtaagaaacctctgggcccattgtcttgcttgggttggagcttgtggaaggagctggagtctgggagaagcctacaatgtagggctggctcaggtaggaggtgactgccctgtggccaggtatgtgcttagcctggcactttgtctcttcaggactggtctatctgtgaccagccactagctggctatatcaggggagatatagggcactgataataccccaaagaaatcattttacccaagtatactcatagtttcttgggggttatgcctaccctagcttgagtgacaacttacaaagctgcatccctggtgcccctgcacagcttttgggcagtgtggcaagtgagagcatttccttttcagtgatagttactactgatacaatctcaggcaggggcataggtgtgatgtgtgtaagcacatgtaagccaaaggtcccccccacgtgtgctgtgtgtttggtagggtgtgtgttgcccgttaacagtgtgggttatgtttatattatacaatgttcagaaacccggctacttctgttggaactgaatctgtgcttggagccttggatactaaggtttccactcatgcctctgggcccctaggtgctgtgtccatggatgttcaggagcctaaggagcctagggcgtttaggaggggctatctcacttacaggcagtgcagatatatacagtcactaagagtggttcaagaatctggggcctggctgaggaagaggttcagctcagatggtcctggctagagtgtctgacaggtgaatccctgttgccagggaagtgggggatacagaaaggacagagtgccctgcagagtgaacttcctgcctccagaaggctctgtggccagattggagtctggatccagatatgctacttcaggcctgctgtgtttctcttgcctgcctttctctgggcccagcctggggatcttggcaccaggccccactgatctctcctcctctctgctccctagtcgcgcattgccaagcgggggcggaagctggtggactatgacagtgcccggcaccactatgagtctcttcaaaccgccaaaaagaaggatgaagccaaaattgccaaggtaagggtgggctgcgacagggtcagggaatccaagagaggttaattccaaggttcccagctgtgggtggggatggtgctgagtccagggccagatagaagaccctgtggtgggtgcctaggcaggcgggtggggactgttgctggcctctttctacccgtttgccctgctctgaggcagtcttccagaatgagaatagacccagcttgggtttccctggtgtggcactatcttgctcaatgcactgagcggaattctgtcatgggatccgatgtgactctatcttgctggaacaagcccgtgggctggtcacatagtcctgtgccgcgtatgggtgggtggcggagccctatgtgctaaacccctctatcctgcttacttttcttatagctgttgtgcagttcgacaccccctctccacacccacttgggtgggagtccccttattttctcagccttgggggttggggaggggagaggccacacctgctgcaggcctgcctccagatgggggctggcttgtctttctctgcatgggagtgtgggcttggtgtttaattatctatgtctctgtttttttttctcccacctccctcctgtctctccattctcctttgccatgacctctccttccctcccccctcctttcccccagcctgtctcgctgcttgagaaagccgccccccagtggtgccaaggcaaactacaggctcatcttgtagctcaaactaacctgctccgaaatcaggtgatactggcttctaaccttgcacgtgctggcgccttccggtctgttgtcctctcctgggtgtctatctgcctggcctccacaagcttctctgggataagggagggctcatcttcttcctggggtttggaggcaggcagggccagtgtctgaactggaggcgtgtgtcacggggcggggttcggtggggcttttagattcctttgagactcctattttagaggagacacctgaccaagtgtctagaagttatggctgacccgggcacctacccaggtctgtgcgcttttcagatgactggcatcctgtaccaggaacacctttgagcattccagtgtctctgggggctcctgccctgttcctcaagctgtttggaagttccaacgttatttcgaagaaacctatctgctcccaatggcactcgtattcccaggatcccagagctggctgcagctgagtcaagccctggggtagttaacctggcccttggtctgggctccatcaaagtggtccttgctacagaggactcagagcctggccactggaggagactccaggaagcctctgtatcctggccaggatgctaagacctatcagggagaccggggtccaggagggtcatcctttggagattacatgaagggcaaaggttgaaaaggactttctactaatcattgggctatactgccaccttgctaggggatcctacagtcttcttggtgtcctgaacctggaactggctaaagtttggctggggtcagctagagatgaggcaggtagatcaagagaaatgggccacatttttgtttgtttgtttgttcgtttgattttccttccaaccttgcttgagactcaggaaaccctttgtagaggggacgaggcaggtagccaagacttgacccaggaagaggtcggatttctcctggacagtgccccatttttccggggccacctcccgattgatttcatcttctccaaccgcacggatcaaatatgcaggacggaggaggaggagatccgacctgacagggctagctgcctaatttctgttatgaaccactgcttaatatcttgaagaccaaggcttggggctaactttggaggcactgaggttaggattaaggtgattggcttttcagagcctgtgggtgtggatttacagttctgggaacgcccactgagccttgggaggtagagcaggagaaatacgaggacggatgcgtggtgggaggggctagagctggagctggcattcgggcgttccttccccttcaaagtggagtactttgaatgaattggagcggccccagggacactttaggccctgggacagggtctgcctgatgctttagggcctcttaggtcaccgtgggggagcagcaggggaggctgagccacagggtcacctttcagatactgggccaattcacatttcccatgggacacctccctcttgtctctcccctcctaatgcctaactggaaaactagagcaactttacagctacccttgtcactagtaggcgccagtagcaagctgtgagcttcaacttgggaccctaatccaccctgagagaagatttgactttaagggacagtgtatcctctgctggctgtgcttgtagacctgactggctttcctatggccctggctggtcctgggagctctgcagacttgctccagcctgttgggtttgcctgcaagacaggtctagactctccagtcagctcgttttctttgaatggagagtggtgtggggcctgggaggtctgttttatccacagctcttccctcctctgtcacttctgagtgcttcctaaggtgtggtatttgtggtatggtgtacatagttgccttccaagcacttcctaaaaggcagggatatgaggcacgcatcaaaagacacaggccctgacttcggggaatttaaagtggacatgcccttgttctatgctgtgttgctgggaccctggacctatctgtgctgagaggctcacagctttgatctgacctgtccaaaaggaatcatttgtctttaggtcaccctctcaattcacctttaactgtgtgcgggtgaatgtgtgagtgtgtgtgtgtgtacacgcgcacgcgcgcggcgtgttctctgaccacaggagtaggtcctcggatactgtcttaattagggtttcattgctttgatgaaacagcaggctggggagaaagggtttatttggctttacacttccatattgctatccatcattggagaaagctcaggagctccaacagggcaggaacctgaaggcgggagctgacagatgccgggagggggtgctgcttactggtttactcttcatagtttgctcagcttgctttcttatagaatccaggatgaccagcccagggacaaaaccactcacaatgagctgggcccttccctatccatcgctaataagataatgcctagtgggcttgcctgccgctcgagctcatagaggacttttctcagctgaggttccctccctccagataactctagctcgtgtgtcagtttgacataaaactatccagccaggtactgtcgacctttattattgttattatttaattattgctattattacttagtgtgcagggcatgcatatgtggaggtcagtttagaatcaaattaaaacacagaagaatccaacaaaagcctctaagggtgaggctgggaagacatgggcaggaagcacctttaacctaactctgcatgtggaaggacttctgtttgacccccaggacccactttagacttaaagttcaaatgcaaggttttgtggagccattttttcttctacctttacatcggcctcagggattgaattcaggttgccaggctcctgtagcaagtgctttttcttggtgagtttctgtaccacatgagacaggcttcctcactggcccaagacttaccaaataggctgggctgactggctggggggtggggggggcgggagggggaatggggagggtattcatctgactctttgctggacaacacataccaccaggtcctgctctgtgtgtgtgtgtgtgtgtgtgtgtgtgtgtgtgtgtgtgtgtatgtctgtctatgtgtatgtctgtctatgtgtatgccacctttggaagggtaccctcagaggctagaagagggtgtcaggtcacctgaaactggaattaaaaggggttgtgaccttcctgatgtgggtgctagaacagaatctggtcctttggatgagcaggaagcagcctttaacctaactactaagccatctctctgaccccagaccccaaatttaaagtggggttctagggggtcaaacggaagtccttgtacatagagctgttttccagcctcacctttaaagggttttgcttgttattgatttttattttattttattttattttattttattttattttattttattttgtgtgtgtgtgtgtgtgtgtgttttcccccattttaaaattagacaaaaaaggctgctcagaagcccatgtgttgcctgacgtatatggtggtcagatgtcacagagctctcatatcccatccaaggctccagcttggggtgcactagggctgggtgctcggtggactggtcctggtgtgccttaagctgggtgaagtggccagcgtggcctgggagagaaagaaaaaggtgtgcttctgtctgagtggtgttctggccggctgtggtcccaacgccagccttagaacgggaggctgctggcctcacattttccctgagcctgatgccccagggagcctgggttgtgagtcagaactgaatatgagccaaccctgcctgtgtaactcagatctgcatggtgctggggtctagtgccacctcttggtagagtaagagatgtaggaagagccatggccactgagcaggggcatctcaggccacttgggtcctctcagcctcatcttagaggtgctgacccattgcctcttgtccttggttgggacagatcataggagagggacgtgtggggaaaaaaaaactttcccatgaaagtaatgagaaactggacaccaaagggaagcaggctctggccccaagagagcaagcaggagctccaggaagggccatagaaagcagtagccggtagctgaatctcagggctgacagttgactcaagggaactgatgtggggataggaagggtttgcctgagtctggggcctgcctctgcactccaactctctaggttgtttgttttcaagctcccctccccccactgtgtgtgtctctgtgtgtttaggttaagagtcaagttctggtattgtccctaggaagctgtctgaattaatattttgagacagaatctctctttgggacctgaggcacattggtttagtttggcaggctacccagtgagctctggggatcttcctgtgcacatctccccagaactgggatttctagggtgttccaccacatctggcttctcacgtgggtcgctggggagcaaactcaggtccgcctgctcatcctgaaagcactttatcaaccgaaccatctccccagccttcttactggccatctcgacaaaccctctctttgtaatggcagctcaaccttcccattcccagagtgtccccttagggctccaatgggaagttctggggtgggtatccacattcagtcttgcctctatcctgctcaggccctgggtcccgcatccagactggagagggtaccagctgtggggggtaggtctggctcatctccccagggtagagttccacacagacgctgacgtaccccactgcctctccatcccaggcagaagaggagctcatcaaagcccagaaggtgttcgaggagatgaacgtggatctgcaggaggagctgccatccctgtggaacaggtaaagtcaggaggggcccaggaacctggcgttcagcctggccctgtgtctgtctactgacttcagggctctgtgtctctgaggatgcagcatcccgtcgcatatggttctcaccatgtcacctcctatctctctggcagccgtgtaggtttctatgtcaacacgttccagagcatcgcgggtctggaggaaaacttccataaagagatgagtaaggtaggccagggggactgggctgtgcagaggatcagtcagaggcagggatgggggagcttgggtactatggtgacctggggcagctgtgggtggttcagtccagccctagcctgccgtgccctgtcctgtatgtcttccctggaccacattttggaaatgtgatcagccccttctcagactatgatctagctcagggctagaaatagtgatggatattttccgcagtaaaaataaataataaagaagttaccagaatttttgtaattaaaaaacagtctcccgtgtttcttaaggtagggaaatgggatatttctcttcccgcatctggcatagggggcgcgataaagctcacacttttatgttgtattagaatggaagctgtgtaacatggcggtcggagatacctggtgtgacagctctcccactccatatggtggctgttctgactttgtcccttggacccagaggaatgaagtgaatgatgattccaggttttggggctgaagagaaagagctggtttggggccttttcctgactgccaccctcccgtttaaggcctctcttttcttcccgtgtttcctcttcttgaagatttgaggcaaatcatacaacagttaagactgatgagatggggctggcgagatggctcagcggttaagagcactgcctgctcttctagaggtcctgagttcaaatcccagcaaccacatggtgcctcacaaccatctgtaatgggatctgatgcagctacagtgtactcatacataaaataaataaatcttataaaaaaaaaagaccgttgagatgggtaaaggtgccacacaagcctggttagggattcaggtttagttcctggaacttaaataatggtgaaaggagagacgtaactctacagaattgtgttcccccaataagaaatatgtaaataaaaaaaatcaaacaggtattttagggaaggaaaccttcatgcaaaatttgttcaagacaccaaagacagaattatgtataagtaggagaaaaattaatctctgtactttctagtggccgaagtaaaaagaggaacattttcagtgatgagccccaccatttgcatgggacaacccctttcttctgttaccttgtgcttttggagggatttctggaagtcgtagttaggtttggaggcgtcttggcaaaatgaccttaataaccaggattaacatgaaatcctgcaatcttcaaaaacaaggtttaagaaataaaatgtcgacatgccttatgctttaaatccagcaagtaggaagactaaggtaaagaattgtgagtctgaggccagggcagctttctgagagattatctcaaactaaaataaacaaaaagagctggggctgtgggccagtagtagagtacttgcctaacatgtaaagcctttggctcagccaaaggctttgaatatgttaggtattctacttccccctgccccaaacagtagactcttgtgtggcatttaggatatccctttaaatagcaagagagaaaagatgaccccagagtcagtagctgtgagcaatacggctcacatcccctggtttctatgccatcatttggctttctgggttcactgtgctggtatcatcttccgttggtggagtcaggggaagctgctcctgggagaggcaggggaaggagcgaggaactattcctgacgaagatgctcgtccaagcctgcttctcttcactcttcctcctgcagctcaatcagaacctcaatgatgtcctggtcagcctagagaagcagcacgggagcaacaccttcacagtcaaggcccaacccaggtaggttagggcagggagggtgaggtcagtggggccctgtggcatgatggtcagcgccacagaagcagcttctggagacccttccttgttcttctcgcgggcctctggaaatcttccagactctgcctcctggcatcagggaaatagctcctatagtcttggtctgtggccagggagcctgtagatcccagagccttagtagaatagaggtcaagatggagatggggctctattgttgacacaaggctgtggctcctggcatgcaggccttcctgcctcttgctcaaggtaaggtccaagaatggcagcagtgccttggtactttgtcctttgctgcctttcctgggcagctgccaggagctcctgtcacctgagggaggtcatgagggggaaggaatagaaacaacctggagtctgggattgcacgccttccccctccctccctctctgtctctcccttcttactccgtgtgtgtgtgtgtgtgtgtgtgtgtgtgtgtgtgtgtgtgtgtgtgtgtaagagttggggtgtgtggtattgattgtgtatgtttgtgtaagtgtgagtgagtgcacacatgtagacagtgctgtcagcatctttccattgctctgcaaagtctctgcttcttgggtaactggtctgctggccagaactttggaaggcttcagtgaacagccttattcctttctctcctctgaaaatggaatgtggaatggacagagcggagcctgcaggtgttctggggagcctgggggaggggaaggggagatgaggctaggctgtggtcaccttagaaagacctggcccagttggaaagattgtcaggcccaggctggatgggcaggttcttcatcatactctccgctaaggttacctgtttgtgccccaccctggcctcctgcagacagacagggacacagggcagacagggacatgcagtgcagattgagggcaggtcctagaggggagactagaagacagaggtaaaggcaggagacatcagggcaggctggggatagatgggaaatctccggggaggagcagtgggaggagggctgggaacaggtagaggatgtgcaggctgaggttagtgtgggaaggtccagaatgggctgggtggaaaaggtcagaagcaggctgaagggcagactaagggcaggtagtggccatttgttagaggcccctgagcaggaaggaaggagaaggtggcggaggaaagcctagttctcctagcttctccaaatgaagcatccacactccaccatccccacagaaagaaaactaaactgttctcacggctgcgcagaaagaagaacaggtaccgccttgagtgcagtgccacgggcctctgggccccgccctgactgcgcatgcgccttgtgactgtgccctgttgaagggcccactaacccctaacctgcccgtgtgtcctgttgcttggggacatgtgtcaggagggcatggcggacttgggatactagggaggtagaaggtactggcatgtggtttgaggattagtctagccttgtcctttgcatacgctaaagccagccctgggctgctgctgatcgaccatgagtataggcgtgcaaaaggtactgagtggagacacggagccgcacttgcttaaaccttccccatacacactgtattttatattgctatgtattctttagggaggcaagtataccctcataaaacaagactgctccagatcaggagtctggggtaacagttctagtggtccttctagaatgttgtagatcttcacatgtcaacaccatagctgattgcttcatgtagctcttgagcagctgaaatgtgtccattgcaatcctggaagctgagctggcaatgctagtttatttaaattaagtaggcctatgataactgttggctgctgccttttgcccgcacggatgaatcccctccccctgcatatccagtggctgaggtgtgcatccctgacccgcgtgttcccaaggagaccctgctgctcagggcttggcgctctgtcaactatcacctctctgcagtgaagccaccggtccatccatgccagctttgctatgtttggatgtttctccagggtgtgcactaagctgaggaactatgggaaggaaagtgtaacgggcgggcgggtgggctcctgggttgtggtcacatctgtgcagttgggaagggacaggtgggagatgctacagaggtctgcggagcagactagggagtaggctgagtgaagaggctcctgtctgatgtaagagactcactttgcctctaggatgtctggcttgcttgtgctatgaggcccaggtggggaggagattggttctcgctgctgcacccttgcttccaagacaagccccctatgaaccatacagaagcatgctctggtcttcacacttctactctgcccatgcatacggacatggaattccataaagggattcctaagggctcacatgcaaacgtaggttatatatatggacttataggacatatgcttatgaatacattctttggacacaatgcttcagcatatgactttcttcacatgtaggtctgtggggttcatacatgcacacatgcatgggtttacacatggggccattgtcctcacatgtgcacacagcttcacatgtggatccctgggcctcacacatgtggtacacacacgtcctcttgtggatccattggagctcatacatgcatacagagctctacatgtggattcatgcatacatacatgtaactccctgtgggcacccaccaggtgctcatagactgctccatcgtgccttctggctctttgttctgttgataccactctcggtctgtccttcttttacagtgacaatgcccctgagaaagggaacaagagcccgtcacctcctccagatggctcccctgctgctacccctgagatcagagtgaaccatgagccagagccggccagtggggcctcacccggggctaccatccccaagtccccatctcaggtaggcacgactgttatctctatgtcctggttttcttctctttctctttccttgctgttatcctcccctctttctctataatcccctacctgggcctgaatgggttttgagcctgaggctcttctccctggaggaccagttctgacctcagtctgcgcgggctacacggatcctatggccccggtctacttcacaatggtatttgtaaacgttcccatccacagaagtgcaggacttccccttacatgtctccctgtttctctctcctgtttccttgacttggcacctcttctccctagatagttgccctgggtgtccagaccctgagtatccagtctctctccagactctggagccctagccctttctctggcaggggctgagggaggaaccctatcagttggtctcacaagatcatcaaaggaacagagtctgatctcagtgaggagaggtgggggcagccttcaggtgcagagcctcaatcctctctgtcctgtcccatttcaccaagccctctgggctcctgcagaggtcccaggaaccggcggctgggtggggttgaaaggaatgagtcctctagcctctgttcatgggaaatgaggccagtgatgccaagagcggcaggaagagcccaatctgagcaatgcgctgccattgctgaggttggatcccaggaagtgctggccacacttctgctcactgactcttttcaactgccctgggggcaagtggatagaaacgaagattaaggcagtccttcacctggtctacttatgggtagtcctcgtggggacctagttcaggctgacttctctaggctctttttgggaagtctcagcctagggaggtggaaggaaggtctgtgggagggcagaggttagcaggggagttggcctttcactcaaagttccttcctagataggcagggaaaactttctcctgtaggttatgggagcttgtcagggtcaggaccagataggtcttgctctgtctctgtttacctcctctgcttctatccacttcctctttctccttctttttttgcacagtggttttgaaccgcctgtcttggggtctcccctaggggtgtcctatcatcttgatgtctgttaaggggagcggtaactcatttattcttcccagtggcctgggtggggccgtggcccaggagtgactaacttaaccttggctttgtctctatctccctgtgccgtgctctgatccgcctcccgcgcttcccccttgctggcccacagctccggaaaggcccacctgtccctccgcctcccaaacacaccccatccaaggagatgaagcaggagcagattctcagcctttttgatgacgcatttgtccctgagatcagcgtgaccaccccctcccaggtcagctgtgtccaccgcggcccagccttctcccctgatattactctttctctcagagcatgcatggtctttcatcctccaccctgaaactctgggcttctctcaagagccaaggctggagagacaggctggagcctccatttttgatccatccatctcccctttccatcattcttttatcatcatcatcaccattaccatcatcatcatcattgtcatctccatcacccctccccccccccccatcaaagcatgcaccatggctagataagaggtcatgattgtgacaggtcttcccgtttcttgatggtgctgatcaatcacagtgattgatgctgtaatggggaacatggaatggttgggcagacatggggtgtttccttgtgcaggtgacatttgcctgagaaggactcacagagacattggtttgactagagatagccggattaggccagaagggctaagagacaggctcactgcttggtacaggtggctggcgatgctaggaatcaagtggagccccgttggataccataatgaccaagatgcagcgacgtgtcaggaggctgtttgtgtcatgaaatgcccaccctcaaatggtgatagagtcatgccttttgtggaggaagagcatcttgttaagatcggagtaggctgacacacagtcagacctgcctagggagatcagttccctgcttcaaggtgaccttaagcctcctagcctcctgtgctgtgtagggattccctttcatggaggtggctagcccagaccctaggggacttagtgagagcccttccctcccagggctcttccccaggttcccggagaagggggacagaggctgagggtgggagtgtggaagaaacaacttggaagggagaacagtggccactccaacaggcacctagagtgggtgggccttcagcccctgtgcagaaaggtggtacagaggcaggtaggaatagtctgtctggtaataacacgcaaataacagaagctggtaatcttcaggctaggttgttgctggcacccttcccttttttttatgtgcatgcctgtggcttgagggtacctgggcagctgaccagcatgtgtttaagatgagagagatgggataccacgggagctagcgtatgctgaggggagatggtatttacactgtcttgtttgattttcaaactcttcctgtgaggggacatacccatttatctgtcgagggacctgatctacagcttgttccatggtcatgtgtaacatgcagtggcccaccaggctccatcacgtgttccctttccttcatgtcattgcatgctttgcttgctggtttttatgttcatctgcagggagccggggctaccggtctgttagggggtggaagagagcgttgggttggtattgcatgagtgggaggtgggctcatgttgtccatggtgccaacaggctgtttggtgtgatgtggtgcgtaatctgcatcccttcagactcttggtcctgtgtgagaaacagtcatttgccacaggcaggtttgagagaagattggggtcttctgcttatagcacttcaggtgtattgctgtctgggcttgggtgacttctaagaagtgtggaaggggtaaggtcggtggctaaatgacagaggtgcctgccccccatgaatgagatgcacttcaaagtcctaaggccacggcatctctagcccagcttttggacgaggttggaccagaaggaaagcaggaaaacttctaaggttggcctgaggccacttggcctggcccagttgtgcaccagctggcccttagtgtcctcaggactgtagaggctcctctgaagagccacaggccacattacaaactttccagcctttcttggtgggagcctcaggataggcacgggcctggcatgccctctctgagagttgggctcccatgggaagcaggcggaggtcagaagaggcatcctgaaccatcttcctgcttagactggcgtggagccttccatagctctgagaagaaagcccacaagcaaagcaagatggcaacttctttatgtcagcctgtcctcacacactgatgttgtccaacatcctcccagccttgaacacttaccctagtcagctgccatcaacttatccagaggtctccctcataggcctggggagagatacctcccatgatgtgtttgtctgagatacattggagctttatcttgttgctgggatactagcttcatgtatactgctgagctgcagctgggctccctaaaagggaatctggaggtggtgttgtctgtagctgtaattcaggcaccccaaggctcgctgacactgggatcccatactgaagacacccttggggcatgtgtgctgctaagtctttcctcatccctagacctgaataacaggttggggcatcctgagggtggcttggctgggtaccaggcccttggcccggggagtctcttggttgggagactgaggtgggcgtgtccagaccaggccacagccttgtgctgctcttgactgggagcaaggtcaggtgagcttgtgaggcaaagggcagagaagagatagaggtgatctcatcttggctgggaggaacaaaaaataaaaaaataaaaccccccaaaccccaaaacaacagtaaaagcaaaacaaaaccaaatctgggcagtagttggatgtcctaatggcaatcagatatcttcacataggtgagggcctgtactagtttgtgtagttgtagccggtacttgtgtgtgtgtgtgtgtgtgtttttctctgtgtgcacaaggcataggcccaatctgttactaactgcttccttcctctgctgtgctgtcaccaagtttgaggcccctgggcctttctcagagcaggccagtctactagacctggacttcgagccccttccaccagtggcgagccccgtgaaggcacccacaccctctggtcaggttggttgtgcccagcagtgcccatggctcatcagcctcaggactaagccttgtgcttgtatgaaccacataggctcaagtctttgggggatgaggccttttgcccagtgacctagcccttagcccagtccttagcctgcttgacttccttcggatggagaacagaggtgggctagctgggctgctcttcctcagggcacatgtcataacctctggccattccagcatcctgtcccttcgttagctaccctgtgggcctccctgagctggggtctgaagcccttggagccaagcttggagcctgcagggttggggtgtgagtggggtcccttggtgtgctcacctgtctctaacctgtgtactgactctgtccttttgctgttactgctgcctcagtcaatcccatgggacctctgggaggtaagccacacacttgttctgcaccgctgcctgcacccctgggggctgcctctctttgtgcaaagccctactcactcctctacccagtctccccacagcacacttgcttatctgtgctcatatgcacagggtgcagggagactgcatctcgttatcaggaccttggtaatggggctccttggtagctcatgcctgggacttacattggttagctttcaggacttgctggtgttcacctcatcaagtagccagctgatcatctaacgtggctatttggtcaaggagtcctgactacagtgaagggttagaaagctgtttttctgggaacccatccctgggatctctggagattcagagactcacacttggaatgtgctcacgattggggaataacaaaatcagggctccaggacaaaatctgggaagggccaaccgcagccaggactctggggactcaagagtttctataaaagagcttcattctgtaaagtgctagctgagtttgaaaaaaaaaaaaatcccaggcattgggctggaaagatggctcagtggttaaaagcacttactgttcttacagaggtctgggttctagtcctagtaacccatatcaggtggtgcacaattgcctataatctcagttccttctaggctctacaggcctctgcacacatgtggtacagatacacttaaacacacacacacacacacacacacacacacacacacagaatcttttctgccatcaccagagaaataagactggagtgggctggcagggccattttggccattttggtagatgctatgctgtgtggtgatgtcacaccttcctgactccctggtagtggcaggacaagaggaatgggaggcagttgaccccacaaaatgctacctcaagccacatcccttgttaatgccgggcactgaagaccaccctctcttgtctcctgcctttgtccaatatacctttcccacctggccttctcaccccaacccctaccccatcttggtggcctgtcactagcccacagagagtcaagctggcatcctgccttccggggagcccagttctgctgagggcagctttgctgtggcctggcccagccagatagccgagccagggcccgcccaagtaagtgctccctcctcctgttcccatccggcggcttcccatcttgggtgtagcatggtcagagagccagaggaaatgcacagtatggacagggcctggtggccctgggacggtgtcgctagagggtccctaaggtgggtgatcgtggctcaagtcacatctttcttctactcttttacctcaaagtaactcctgcagggtggaaagtggggggacattttagatgacctaacaggttattctagacatttcccagaattttcttgtcttcatcataacttttgtctttgctacatttgaggaagtggagggctggaaggttgaataattagggtccagtgctcagaagtggctgagtctgggtgttggtagaggttagcccacagtagagcctttgtcatggtccactgtagtgttctgtgaagaagacagcatcccggactggaggtcctgcttgatatcctaagcatgcttggtgggtccaggctatccaccaggctctggctagcctgccaggggctggcagagtgggcaggacaaagaggggtatttaaaggaaagggcttgtaaggcaaaggtaggggtatgctattcactaagatgtagcctgttcactgcacactcatctgtgtcagccagcattttctctatacctgcgtgtcctgccggatgctctaaggattgtatgagacacatttctaggccagccgggtcaatacctgtggccctcccacttgcacgctgccctcctgtggtgtgttgtggatgcatcctgctctgtatctgatcccttgctggcattttatgttgcagccagcagaggcctccgaggtggtgggtggagcccaggagccaggggagacagcagccagtgaagcaacctccgtaagacggcaggggccgggccctgttttttcttccctgttgtctgtctgcccagtgctgtctgtcttctgcctgtctgcagcttccctgtgttcctcacccaggctggtgcagggcactgttctctggaagagcacagggcagggtagtttggcacaagacacacgaacacaaccccttccttcctgtggcttttcctacatggccattggtccagctgactcatcccctatccctcagagctctcttccggctgtggtggtggagaccttctccgcaactgtgaatggggcggtggagggcagcgctgggactggacgcttggacctgcccccgggattcatgttcaaggtgagcgtaggctagccaactctgtagcctttgtctccggtgccttgggggggggggtcacccttgtttacaggataagacacttagcccaggagccctgtggcccactcagaacgcagcctctaagtctcttttatgctgtagctggtgtacgcgcgcgcgcggggctctgtcttttgctggctagatggggggcatagccccctgacatgccctcctaatttctacaggttcaagcccagcatgattacacggccactgacactgatgagctgcaactcaaagctggcgatgtggtgttggtgattcctttccagaacccagaggagcaggtgagcaagggtgtggggaatcccctggctgctgatgcaatggtgggcatggccagcagggggcagcaaaggcccaatggcgcagggcatgtctaggttgccaattacctgcatcacttttctttaaccttatttatattcctcgccctgtccccgtctgtgctagtgcattccatctcttcccgatgccctgcaagattttgcatctgagttcctttcttgtctttgccatgctcttggccatgaggcctgctgtgacggagcactaggctcacattggccttctaggctggctccactctgtatggctgacctcttgccctgaggaggtatgggctgagctatggggagtgtccaggcttgaatctactgttgcagtgtgtgtgtgtgtgtgtgggggggggggggggctagaagacaaccttagtttttgttccttagaagccatctaccttaaactttttaagatagggtcagcctgtctctacttcttcagtgctgggttccaatacatccccctacatctggctttttacctgggttttggggttggaactcagatcctcatgcataagtggcaaggacactgctaactgagccaattctctagccccatctcctgctgctcccaaagccctgcgtatctactggccacttcggttggtctttcctagctggctgggtgagattttgagaagcataaaccctggtcaccagccaacagggtgattgtgtatgggtactggaggggttgaaagagggtatatagaggagattgataaaaatgcacagaaatataagagcactgataatgttagaataaaattgcaaaggtccagggaggtgccaggtatggtgcagctttgggacagtcactgtaactccagcagtgagggcctacacagacaatccctgagggttagtgtcagaaggaagagtaggatggaatcggagtccataatagaatggatccaggaccttgtggcaggcatgtctggcctgtagcctatggtccttatgtgtcctgggatagctatgaatgcaaacctaacataaaacagcaaccttatttagaaagttatgagattctgtttgtttgttttgagacaaggtctcatgtgtctagggctagccttgaacttaccatgcagctgagaatagtcttggaatcctgctcttcctgcctttgcctccggagttctggggtcactgacgtgctctaccatgcgtggttcttgtagtgctgggaattgaacctggtgcatgtcaggctggcatgctgccaacccacccacatcccagtccctagtgggatgggatttgtttgtttgcttgcttttgttctttatgttttcgacttggttgcacagttctcaggcataaactttgtagctggcagcagctgtcacagtgtctgaatgcgtctgttagaggttttaaattttttatcacgttttgtgtgtgtgtgtgtgtgtgtgtgtgtgtgtgtgcatgcgtgtatgtgcatgtgacatggactatgtgtggcagtcagagaataacttacaggagtcttcagtctttcctctacataggatccagggatctaatttagggttttagacttggcagcaagccacgggggtcacctcactttcttttttcctttcctttccttccccttccctttccctttccctttccctttcccttttcctttttccctttttccctttcccgtttcctttccttttcttttcttttcttttctttttttcagtgctgggtattgaatcaagggccacatgcatgttataccaccatgctatatcctcggccttctcttttaatttttaattttgggtcagaatctcactaaattgtccagaagtgaccttggactcactctagttcaggctggccttgagtttgcaatcatccttcagaatagctaggaatgcaagcctatgctaacaggtctgactagatgttcttaactgctagtacttaaggaactttccagatgtttctagaagtctgaagacttgagggggaagttgttaggatttgagaaacccggtgcagagagacacacaggagtcagaaggccctccagatttcttagttgacaaagcagtgggctctgaaggaagattcagcaggggggtggggtggagggagttggggagtgatggggtgggcacagggacaaaaagagggaggagagggtggaacaagggaatgtgtccaggatcatctgccaccaaactagactatgagatgctagctcagcctgtatttctgactgaggcaggtattttaggtcccaaggactgtctagaagaatagtggagtagttagtgtgacagctatcacttgtcactgcctggcttcactgtggacccccatcccagaacaggtaggtgaaagagacttggctcttgtcagagctgtgagagcatcggtgagcagtggcggcagctgcatgtggcaggtcctggtcgtttgtagtatctagagggtctggattctaagagggacgcatctgcaagcagcagatggttgtgggccagggctgagggacacagttcaggcttaggtcagtgcaatgctcaggtgcaggggagtccgaatagcaggcgggctggctcctctgaggtctgcttaggtcctagtgtactggtgagtgctgtgtggtgcgcctgtgttagccatgctctgttggccccaggatgaaggctggctcatgggtgtgaaggagagcgactggaatcagcacaaggaactggagaaatgccgcggcgtcttcccggagaattttacagagcgggtgcagtgacggaggagccttcccgagtgtgaagaacctttcccccaaagatgtgtgcttttcttttctttgtttttcttcctctcttttctgtttttgttttgttttgaaattcttgaaaagtgtcgggaaactggggggcggaaacctaagccaagaggtatacccccaaagatgaggtggttttccaaagagccgtccgaccccgttcagtggacttctccagtgttcctgaagctgctgtgtccccccctagttgagttcccgatgcccgcatgttcagggcgggccgggggtgcagagccaccgccacacttgcctgacgcttggctgcgccaccgagcagggcttgggtcctcttctggcagctgccctgggcagggcctgcacactggcccagcctggttccgctctgcagaccaaccgtgtgctgtttgaaaataagccctagtgttcaaaatgcagcgaaacaaacaaaaaagaaaaacctgacaaaac

SEQ ID NO: 113 - DNA, 2399 bp, Mus musculus
tcagtcccctgagctgttctagtgcgcggcgtggagccagggctcaggctggtggagcggccggggctggaggctgggagtgcggcgcgcacggcctccccgcgccattatccgcgctcgcttcgggcgaggccggcgccaggatggcagagatggggagcaagggggtgacggcggggaagatcgccagcaacgtacagaagaagctgacccgagcgcaggagaaggtcctgcagaaactggggaaggcggacgagacgaaggacgagcagtttgagcagtgtgtccagaacttcaataagcagctgacagagggtacccggctgcagaaggatcttcggacctatctggcttctgttaaagcgatgcacgaagcctccaagaagctgagtgagtgtcttcaggaggtgtatgagcccgagtggcctggcagggatgaagcaaacaagattgcagagaacaatgacctactctggatggactaccaccagaagctggtggaccaggctctgctgaccatggacacctacctaggccagttccctgatatcaagtcgcgcattgccaagcgggggcggaagctggtggactatgacagtgcccggcaccactatgagtctcttcaaaccgccaaaaagaaggatgaagccaaaattgccaagcctgtctcgctgcttgagaaagccgccccccagtggtgccaaggcaaactacaggctcatcttgtagctcaaactaacctgctccgaaatcaggcagaagaggagctcatcaaagcccagaaggtgttcgaggagatgaacgtggatctgcaggaggagctgccatccctgtggaacagccgtgtaggtttctatgtcaacacgttccagagcatcgcgggtctggaggaaaacttccataaagagatgagtaagctcaatcagaacctcaatgatgtcctggtcagcctagagaagcagcacgggagcaacaccttcacagtcaaggcccaacccagtgacaatgcccctgagaaagggaacaagagcccgtcacctcctccagatggctcccctgctgctacccctgagatcagagtgaaccatgagccagagccggccagtggggcctcacccggggctaccatccccaagtccccatctcagctccggaaaggcccacctgtccctccgcctcccaaacacaccccatccaaggagatgaagcaggagcagattctcagcctttttgatgacgcatttgtccctgagatcagcgtgaccaccccctcccagtttgaggcccctgggcctttctcagagcaggccagtctactagacctggacttcgagccccttccaccagtggcgagccccgtgaaggcacccacaccctctggtcagtcaatcccatgggacctctgggagcccacagagagtcaagctggcatcctgccttccggggagcccagttctgctgagggcagctttgctgtggcctggcccagccagatagccgagccagggcccgcccaaccagcagaggcctccgaggtggtgggtggagcccaggagccaggggagacagcagccagtgaagcaacctccagctctcttccggctgtggtggtggagaccttctccgcaactgtgaatggggcggtggagggcagcgctgggactggacgcttggacctgcccccgggattcatgttcaaggttcaagcccagcatgattacacggccactgacactgatgagctgcaactcaaagctggcgatgtggtgttggtgattcctttccagaacccagaggagcaggatgaaggctggctcatgggtgtgaaggagagcgactggaatcagcacaaggaactggagaaatgccgcggcgtcttcccggagaattttacagagcgggtgcagtgacggaggagccttcccgagtgtgaagaacctttcccccaaagatgtgtgcttttcttttctttgtttttcttcctctcttttctgtttttgttttgttttgaaattcttgaaaagtgtcgggaaactggggggcggaaacctaagccaagaggtatacccccaaagatgaggtggttttccaaagagccgtccgaccccgttcagtggacttctccagtgttcctgaagctgctgtgtccccccctagttgagttcccgatgcccgcatgttcagggcgggccgggggtgcagagccaccgccacacttgcctgacgcttggctgcgccaccgagcagggcttgggtcctcttctggcagctgccctgggcagggcctgcacactggcccagcctggttccgctctgcagaccaaccgtgtgctgtttgaaaataagccctagtgttcaaaatgcagcgaaacaaacaaaaaagaaaaacctgacaaaac

SEQ ID NO: 114 - protein, 582 aa, Mus musculus
MAEMGSKGVTAGKINVQKKLTRAQEKVLQKLGKADETKDEQFEQCVQNFNKQLTEGTRLQKDLRTYLASVKAMHEASKKLSECLQEVYEPEWPGRDEANKIAENNDLLWMDYHQKLVDQALLTMDTYLGQFPDIKSRIAKRGRKLVDYDSARHHYESLQTAKKKDEAKIAKPVSLLEKAAPQWCQGKLQAHLVAQTNLLRNQAEEELIKAQKVFEEMNVDLQEELPSLWNSRVGFYVNTFQSIAGLEENFHKEMSKLNQNLNDVLVSLEKQHGSNTFTVKAQPSDNAPEKGNKSPSPPPDGSPAATPEIRVNHEPEPASGDGATIPKSPSQLRKGPPVPPPPKHTPSKEMKQEQILSLFDDAFVPEISVTTPSQFEAPGPFSEQASLLDLDFEPLPPVDVKAPTPSGQSIPWDLWEPTESQAGILPSGEPSSAEGSFAVAWPSQIAEPGPAQPAEASEVVGGAQEPGETAASEATSSSLPAVVVETFSATVNGAVEGSAGTGRLDLPPGFMFKVQAQHDYTATDTDELQLKAGDVVLVIPFQNPEEQDEGWLMGVKESDWNQHKELEKCRGVFPENFTERVQ

SEQ ID NO: 115 - DNA, 59327 bp, Homo sapiens
ggcggtgcagctggagcgtcaggggagtcccgctcgccgcagccccagcgccgcgcgcgcccctccctcctcgcggacctggcggtgccggcgcccggagtggccctttaaaaggcagcttattgtccggagggggcgggcggggggcgccgaccgcggcctgaggcccggcccctcccctctccctccctctgtccccgcgtcgctcgctggctagctcgctggctcgctcgcccgtccggcgcacgctccgcctccgtcagttggctccgctgtcgggtgcgcggcgtggagcggcagccggtctggacgcgcggccggggctgggggctgggagcgcggcgcgcaagatctccccgcgcgagagcggcccctgccaccgggcgaggcctgcgccgcgatggcagagatgggcagtaaaggggtgacggcgggaaagatcgccagcaacgtgcagaagaagctcacccgcgcgcaggagaaggtgagcgagccggagccccagcagccgcggagtcccagccgccgcggagccccggccacctgtccccctatcctccgaccccggggcctggtccttcgccaggatctggtgctgtcacctctagaggagcgctttcgaggggcttcgaggtccccaggctgcgttccccggcgctctgggtgccctcttaggtttgcgtcctctgtctccccacacccggccggggcaggacagggccccgctttgcaccttcgtggctcggctgcacagcagtggccggccctgctccaggctcttctcaggcgcgcgctccaggctaccccgctttggaggccaagggccgggaggctgggaggccaggtggtgaccctcagctctccaggcccatgcaggcaacctaggctgggccggcgctcggggcgagagggagtatgtccctctgcccctggggacactattcccccggactcccaaggctgcttctcgaaccggcacccacagttccttccttcccactgcttctccactttcgttctccgtgggccgaaggagggattgggtttcctttcccgagaggtgcctgcggcctggaagctcccgcccagcccggccccaccgggagcccagggctacgcaccccgcaaggaggtgccctcgccccagcaggggcttagcgtttccggcggccggggagcgggtggcggcactggctttgggagcccacggccgggtggggagctggcctggaggaggcgcgtggaaggcgccacaggaaacccgacccctcctcgcggagagctggaatgggggatggagccggggcctcccagggtgcccagagcgtgcaggaaatgcagagattgaggggcgggggtctgcacccggtcagttgtctatcccaagccacctctggtttattgaattggatcacgccagctgctgacgccacttcccctgacgactccaactctgaaatctgagattgcagaatctgtgtttctgccagggtggccccccagtgccccgcggccaggcctgccccctctcccacccgctgcgcggccgccgggtggaggcgcagggacaggccggccttcccctgccaggcctggtggctgtttataaacaatgacttttgcttctgagacccgcgggctccctaaggatgcaaccacgtgattgctgggggatgggggagaggggggcgcctagagcttccccatacctccctcagagtcctactgctcatccctgtgtttcctggctaaggaggtgggtgggtgtgcattgaaggaagggccctcagccaagtccaggtttgcccagacccagctccccaaccccccaccccagggaaggaggaggaggaggaggaggaggaggaggaggagggattaaagccccaggaatagctggctgggggctgggaagacttcaggttgtggggtgggggggtggcagcacagatgcagccacccctgctccgggctgccatgactgggtaatccatctgtgtgcctggagcaggcagccctgggccagagcctgcttccttccctaaagggccagggagatgaatgggaagggaggttagctgagctgtgttccctgcccccttcccactggtgtcccaccccttcctggctccccaaggctcttggtgtgtctcctttgccctggttgtcttttctctgcagcagcatctttgatgtcattctcggggcagtaggcaagggctgtgtcccctccaaggaggtggtgatgtatcactgagctcctgagccaccatccctctctcttgagcccctgttctgtggccacgggcagttggctgacagttggtcagctaggcatgctggtcttggccaacagctgaccttgcccatgccgggcttcctgggactggagttgtttagtgttccagctgctctctgcctgccggagactagttagggaccctccccccatcagaaaccaaggcagcatgaccatcatgacaggcatccaggccaggtctctgaaagtagccttcccctccctttgggttgcaggccctgctcgcaggaagccccatgcctcaacccacagcagcctctgctgtgtgccttcctgtagagtctgtgccatcattggagggtcatcctcagtgtcttctgttggtgatcagtgccgcctctaactcccactgtcaatgaaactggaatcctagtctcttacaggcagccccaccactatacctaccttgccttggtgaaatcagtgggtaatagggcaattccagtttccctgtggctacaggaaggcgtttcctgagcaaggatggcaggagctgtgctgggaggctgggagagtcctggcgtcctggcgtaggaagaagggcccgtatcttgcatccacccttcacccccggccttcccacatccacttccagcccaaacaaacatccagactgtgagggtgacagtgtggtcaagggcagcctgcactcttgtagggtccccaagccagctcttttttgactgttgttacctgttgacccttctgcctccaccactggtctggctgatccctgagggcacggcagggcacatccaggtgtgtgcattgaggatgttacctggccccagtcggtgcttagtgaatgtttttgaacaagggatttgggcctgacgcaggctgatggtggattgatttgtgttgtttgttctctgccatcactcattcatcaaatcctgcctggacacaggcccagtgcctcctgggctgagtccccgatgctgtctcaggcagggtgcatgtgtctggcctgtctggagctttttcttgaaggtcccatggcctgtggccttggtgtgaggagggtatgagaataaattggaagggttgccagggcctccagcatggcaccattgctcctggccccctggccactgcccccggaatgcgtggggtgcactgtgtgtgctgggagcttgagcctgtgggcgccgtgaggtcatcttcccattgcgtttggcttgtcgaaccctctataaatgattgtgtccatttttgggcctcagaagagtggctaggcaaagccagtgtagggtggagcctgggtcagatgacggggaggattagaggttggcaggctgggcccctcgcgggatggggcgcctggggagaaggacagctgagggggtggggatctggcctgctggcccctgaaggcccacggcttgggagtcctcatggagccggcctgacggagctgggcctttctctgaccacgctgggctgacagtgagcacaggaggaaggctctggcagggtgggagtgtgcatgctgtccctccctcccggcaggtcctgagcatgctggaggggtgcaggctggatagtggggagggccagctgggcagagggagggcccagggttgtcagtgcccagcacagcgctgacatgccgagaagaggctcgctaaaggaaggtgcagtggtggcgattcctagagccttgatgcatggccatgaattgcactatgctcagctgcgtggtcaaggtctcctcacgcagtagccaccttagcctcctccggaggagccaggcctgtacaccaagcgttatatttgcagcaacctcagaagcagcaatgctacacctgagagtgggtgcatggtccctgtaatagaaaggacaatgggggcataggcaggcccagccacctgcccaagtcacccaggccctcagtgatggcactgggagcccacccagaggccctggtctcctcaccttggccactgactttgcaggggtcccgcccccttcccaggccctagcacaaagatgcccccctctacccacattcccatctctgtccatcttggggcccatctctgtccttctgtccttgaatgtctgaggttcttccctgccggctactgtcttgtctttttctctgtctctgtctgtacctccctgctctgggcctcttccctctgaacctgttcaggctcttcctgtatctctccagtctcagcttcccctggacccgagttacttatgtagatggttcatctcaccctgcagggaaggcttctgagctgggcatcttctgtgggtgggcccaggtgtgtgtgggttcttgggtgttcggtaaaggcgtgtgggcatgggaggttggaagcatggcttccagacttccccaatcccccaggggccctggatggcctgagtacagccttctggctcatgcagggaccaagccaggcacaggctacttgtccaggcacagcctacttgggaggctgcatggggcatggggaaggagaaggcattccaggaggtgcaggcatggtccaaggtgtggagagaggtgtgaggacattgaggatgccagctctctgaagagaaggggtgcctgggtggtagattccctccatatttcatgaagttgtgaaggccaggaagatctatggatcgcaaggattcttggagaagctgaggcttgaactctctgcgccctcttcaagatcaccacatcggggctcccttctcactggcatctgaccaggtccttgtccctggactcagcgtccagcccagctggtcccttacaagctgtgtgactgtccctgaggttctagaatccctgagtcctacccttggaggtaggccctctgtcctcatatctctgtaaggaacagcatgcacaggcgtgcacaggctctgggtttccctgacatgctgcggacccttcctgagccctgtttcttcatgtatcaaatagggaataagaacagttcctcttcacacatgtgttgtgggaagtaaagccccaggcaggtgcttggggcatagcaagtgctcattgaatgccagctctgtggcagagcggcaccttgagcccacatgtggcaccttcttcctgcatggccccgcttcctagcccctgtccccagagtgtccattacaggcctctatagacagctaatccctcctgagcctggggttgatcaggcttatgacgttcacagacccggggcagtgagtgtatgtgcatgcatgtgtgtgggtgcagtgtacaggggtggagggtttgggcttgggaatcagagagctttagagtgaatcttgactactcccaccataaactataagtttttttctgtctctgggcttaacttttcaccactggcatatgatgaagtttgtgtgttcattcctttattcatgcaacaaatattgagcaccaccatatactgggcactgttctagggagtggggacccaggagtcagcagaaccaagcccctgctctcctggagctgacattctcaccaggggagatggtgaagaaaccaccaagtatagtggcaggtgcttagaggggtggtgaggcagggactcacctgccctcaggactttctgcatgtgtcccgtgcgggaggagtgtgctaggttgaggattgagatgtggacgtgactgtgggagctcacacagcaagtggattgggtggagagagtcaggtgggcagctcccgtcccaggtgaggggcacccacgggaggatggcttccttttggatgccaccctggtttgttgtgttttcctaaagctgcctgtttggcaagcctccttttaggattaagagtgcagatgtgcagcctcgctgggtgtttgtgcagggcaggtgggcaggggtacctgcccaggatggaggatgggggaggcaggaggggctgctaaaggagaggaggagggtgtcaaagatggcctctgctgcccagggccacttgtaagattctcatgccaggcagcaactctgggtgcggtagaaagctctagacagctgagtttgagtctatccccccccccccccgcccccgcacattcctacccttgggcaagtctcactgaattcttggaatcccggtttcctcatctgaaacaggggtcatgatctctgccgctggggctgtggtgaagacgaaatcgaaatgtgctggagaggctgcccactcaggtggggctccaggttctgctcctgcggagaccactggagggactcagcctactgctgttcttgtgctgtggaagaggcccagcacccgggcttctgagaggctgccacctcctaaagaggccgcagggttgtggacctgccaagggctgacaggggtcagggctggggagccgaggagagaaaggcaggctcttcctgctacagggaagcccttgtcaaatattaacttaaacataatggcattgtttcctgcatactggctgcatgccatcatcactgtggacaggtgagagtattatacgtcccatccacaaaggaagaaactgaagctggagtggttgtgtgactccccagtgggccgtctgggcttctacctcccttgtggtcagtaggatcagtagtggggtctggcctggggcaaggccttggagacaagcaaatgagatggaggcgtccagcggactccctgcataaagccctgatggtgaaggggtgtcattgtgacagactttggtccccaagaccctcccaagacttggggcccctgtcggacccccagctccacctggggtctaggcttgcactttggagtgtgtggtagactctggggtgatgggaacacctggggtttctaggtgcaagtccagagatgggggttcatgcacgcaaatgaggacagacaggaccctgtgctgtgtgttttttcccaaatagtaaaagttgtctccagtttattccagtctaaaagaacactcttggccgggtgcggtggctcatgcctgtaatccccagcactttgggaggccgagacgggtggatcccctgaagtcagcagttctagaccacagctggccaacatggtgaaaccccgtctctactaaaaatacaaaaattagcctggcgtggtggcggcgcttgtaatcccagctactcgggaggctgaggcagtagaatcgcttgaacctgcaaggcggaggttgcagtgagctgagatcacaccactgcactccggcctgggcgacagagcgagactccgtctcaaaaaaaaaaggccaggcgcagtggctcacgcctgtaaccccagcactttgggaggccgaggcgggcggatcacgaggtcaagagatcgagaccatcctggccaacatggtgaacccccgtctctactaaaaatacaaaaattagctgggtgtagtggcatgcgcctgtaatcccagctacttgggaggctgaggcaggagaatcgcttgaacccgggaggcggcggttgcagtgagcccagatcgtgtcactgcactccagcctggtgacagagtgagactctgtctcaacaaataaataaataagtaaataaaaataaagtttacgtccctctaattttgtttctgttactgctacagtatttctttaatgagatgatggtcatactagttgttttttaatgttcctgggggggaaagaaccatgctgccgacactgcccccgctaccacacacacacacacacacacatgcaccctgggaagacttcctggggggaatcccatactctgggcactttgctttgcttcctgacccaggcaggcccatgtgtctctggtccctgtggtcaccaaggcatctcatcccctcagcttggctcacagtaggtgcatacttgttgcacatgtggctgcatggattctttaggcagtggggagacagcactgatggctggcagaggccctggaggctccctgggtttgagggtgcagggtgggagcgggagggatgctgtgtctgcaggatttaggttggggctaggctagtgggtgcagatcccaccctgccccggccaccctggagggacccaggatcgctcctcatcacactcccccgtgataaagcagccgtggtcagctgctcagggctgtggtggggcctaacctgagctggtggctgtaatgcttggtgcccacaaatggggttcttgtgattggcccaggcccagccgaggagtcctgcctgattttaggccagatgccaaatagggcttggcctcggtcctctgcaggggcctgtcctataagagaaagctttcaggtgacagcagtactgggcagtgctggctgggggttcagtgtgatttgctggacccagacatcactgtgagagctgctgcccttggacacattttgctggctttttgcaaagcctcttccctctgcttcccgggcctgcaccttcggcccccgttgtgacctagatcccaagtgcgacagcaggtggggtgggattggggtcacagcaacagcatggggcgtgggggtggggtggttgggccttggagcctggggccacagtggccttggggcactgaggactgtcctgtggtgcccctgggagtgggcattcatgactccatactatgcccagcccccactgctgcctccagtctgcagacatctcccctctgctgtgtgaaggccgcagtgtctggtggctgagcccggattgttacggggagtgagtgggtggctgcagcagccgccacaggactgggttgggggcgggggaaggatttatcactaccagggtctgtggagctcaggccttccgttccctgcaggcctccccatcctcagagcccctggggcatccccgctggctcctgaaatatggtccttgttttgtgggtcaacttcttactctgaatgaagtcccccgaggagcctgcagatcacctgggtagaggcagcgatggcttcgcatttacaccctaagtcattctgtcatctgtgacctgcccactgtgggtgcctgctctcaggagctcccagccttgcacacagcactcatcccaggactgtgggttggggagggcactggagcctgaggggctttccctcaggccccagcagtcagggaagcctcctcagaacctgagccaagttcagagggcaaaggaggcaggtggtagtgtggggagagatgcttggatggcagcgggaacagtgcttgtcagggcccattcagggcctgagtttgaggagatgggcagaggctgggcctgggctgtagcccggggcccttgggtgaggcgggccctgccctgggctcttcagcttccctccccacgtgttgcctgaacctttcttctgtctcctggtctggcctcagccaaggactgtatcttaattgtcctgggttgcgggtgaggggatgagcctggagtctccagaaggagtggcctgggccagattagaatccagccatgcccagggtctggggcagggcttgggcctggagtccacccctgttagggctggggacacaggggccaggtgacacctgtcgctggaagggcaggtggaaaacatcctgtacctgccctgtcccatgcatgcctgcttctccacctgctgcacagcccagggtgacaccaggagggctgacgctgctgggcctggaggggtgacgctgctgggcctggagggctgacgctgctgggcctggaggagtgacgctgctgggcctggaggggtgacgctcctgggcctggagggatgacactgctgggcctggagggctgacgctgctgggcctggagagctggcggctgggaggtctatcagtggatccgctcaccctttttagggcgcccctgtatgcacggccctgtgtggccaggccgttgactgggatggccataggggtccttttgttgcagagctgggtcagagctagggaggggcctcagaggagtggtcctgccagctgtggggacccctggctccaggacagacccccgagtggggagtgggcacggtaacgtgaataatgcctcagtctctgttgtgtggatggagatgggggcagtgtctggcagcgaggggtttccaccaggcctgtggctggagaagctttgttggaaccacagggctggcaggagtgggtgccaggagagcctttgccagcccagcccttttttccaacagctgctgctactttctttggacctttgctcagctcaccatctctctggggctgaggccaagatgcctgagtccagggcaagcaggggcccttctggcacagagaggcctgggtgggaaagaccccttgagggtctttggcctcctatccatttggcccatggcagctccccttttttctctggcctgaagtggtatgagctgtctaattatgtgtcaggggccagatgcaggtgatggggtggatggagctcggagctggaccctgggaccacaggcagatgggcaaagggaggggagacaccgaatgagagaaaggggaagaggaaagttaggacatagggaggaaggaattcatccccttggggctgctcccccgctgtgtggcgctgggcaagtcacttgcctatggcttgttggagggtctgggaggatgtgtgagggaagcacgcagctctgccctccctggtgggtgatgcaaacgctctttcccagggagcatctcatgacagcccacgggcgtcattctggctttcgtgttttgagtttgttgtctgtgcttatgacaggtttcttgaaagtgaacttcagtgagcttccctgccattctctccccaccacctgtagaggctgaaaaagctaaattgggagctgatggtctcaccttcccaggacagaagtcagctctcctttgacttagaccctgatagaatggggaggagagggcgaaagattgcaggtggggccgaggctggagggggccagatgaggggcacagggctgggggtggaggtgagggtctggcatcatttattcattcactcacttgctcactggaggaacctgctatgtagcggaagaccacaggctccaggtgggccaccaagcctcagtgtacccacctggggaccgggaagtgggagactcctctctcagcaaaacaaggtgaactcccgactcctgtaagtgagaatggcagcagctgagttcctgctgggtccggctgggtctggaaggttcaggggggcagagccattgcacctctgttgcattatgtaatttactaagaaccatcacacccgccgctttccatttgtttctctctgtgccctgtgaggtaggtgggaccaaaccatggccccatctggcagatgagaacagaggctggagaaactctgggattcccttcctcttgggcctcagacttggccccaagttggcctttcccaggtgctgccacccccatccctgagtccagggagtgggaaggaggtggtaagaagagcttggaagggactgttaaggtgcagatgtcttcattgtcttcaaatgaaaatcagtgtgggggctgcctttgttggggaacacctggcatatgtttgggggtgggagtggggcccctgggtggctccaggaggctggcacaccaaagggaaggtgaacccacagagccaggcccttcaccttgggatttccatactccgggatccaccagtgaccccgccagggaggcatggtgcaggggacctgggtaccgacaggaatccagggacctaggaggatcagatttgaatgaagctggcctgactgtgctcctgagaagcatacctcccacctcccacaaagaaagagttgcagggatcctgggggatgttagtggcttgggaggggactccaggacgaggaatgagctgactcttgttctaaactgagaaacagaatccacaattaattggatgcatttgctgaacctgggacaggacccaaatcttgttctttttctgaaatataaaccaagccaggagtttatttatttgtgtcccctctccctgcaaggactcagtgaagcagcctgtcctggaaggcagcctggctgagctggaatgtcaccgccttccccgagttgacccgcccaccctgttctcctggtctggtgaaccatgggcctggaggaggccccatggttgagggggtcaacctccccaattgagggggtcctttcctgagggcattcggggcagcaccacccgggggctggtgggcagggtctgttgatcctgggctgttctggcctggggccaacttcagaagcctccctgaggaatgggtgtgggctgcagggctgggcggggggagctgagtcagcactgtgggagccctgatcacagcaaggacagaacctgatgccagcgtccggctttgtgccactgcacttgcgggtcaccctgcctgctgcactgcgagagactagggaggccttccccatagtctgcagtcggctccgcgccactccagtgcttagactgtgtgcctgagccatgcggggagagacagagggaccggagctcccaggttgcactggcctcctggctagcaggcagcgggacccccccaggttcctgctcctgctctccctcctcatctccttttgacttccataaaacgggctaacagcaaaccctgtttgctggtctcaatcctgaagggggaggctagacccatcgtgcctgtgttcctggcttctggcacatagtaggcacacagtgccaagtgaattggcatgtgaggcttcggaggataaaagcctttgtataaggctttgcaaagcaccttacacaatgcagcaaggtggaaagaatatgattttcaagtctcagagccccaggttcaaatcctagctctgctcttcctcagtgctttgaccttggacaagttactccccctccaagtttcagtgtccccttttgtgaggtgggatagtatcctgtgtgggagggttgtcatgaggattaaacgggagaacaggtgtctccatttcacacacgaggaccctgaaggtcggggtgccggctcgtggaccagccctgctccagggcagggagcagggccttaggccagtggggggtgtctagctgcacccatgccctccgtgtgtatcctctagggccgtcctgtctgagtttaggcctggggcccccagcactggaggagtccagggagtccaggcctagctcaggatccagatggtagggcttgaggccttgggaaggaaggaaggggaggggattgtccagagagagcggcaggggcggaaacgtgtggtatcgttctcacccatcataagggccacagctgacaccgctctaacgaaagacaggtttccaagagcaaagcatcacatttctttaatcaatgttttacatgacacgggagccttcaacgatgaagatgcaaggaccagagagaactgtctgttttcagacataagttggtgaggaatggacagccgtgtagacatatgatgggacaacgggtgtgacctaatggtgatagtccgagggggaacccagcaaggcttgtcggctcggcttctttccggcctctctgtgttgtgtggcttcctcccacatacagcgcaggacccctgtggaatgagggtcttcaggggtgaagggagtgggagagagtgaactatctgggtttcatggctggctttggggaaaaggggttttggtctttatgcttcaccttgggaaagaaaaattccagttttgatgactcacctgggcagggaaaaagaggggagagagacagaagggcaggagaaggtcacagagagcttacctctgaggcctttcacatgccctttgttcagagtctgcagtgagccacagcaccacactttggggtgctgtgttctgagccccgacagggccttgtgggggccaggctccaggtgatactgtaagcccccacttccccttccgccctccctccctgacccctctctctgtggacagccctagcgtgggggtggctgggggctgacctggcatctgtgggggggcccccaggctgtgccccactcctttggctccctcctgggatttttttttttttttagagggattggcccctctgtctgtctgctcagccccttactgttgaactgtgctgctcttgatggagagagcccttggggaggaggggacagtgcaggaggagctcctcttcctttcgggcacagggggtgcaggcgtgggctgtggcttctgggacctctgtcctctctccttcatggggtccctgcctccccttcccaagtgcactgcactgtgttggcccttccccgggagctttggaggaggactggatgtgttagtgaaggaacctgggcacactctggggacctttctagatgatgactgggactgcagggtggatcctctggaaggctggtgacttgcccggggctgcgggtcagtgggaggcccttgctgccccctgcagcatgcccctgagctggtggctggcctcagggctgagcctggtggtgctagggactgcgggcaggtgtttggggcctttagtcagcagcactgcctcccacacggggcagccagctgagcagcggtcagcctctgtgggccctgttgctcctgttacctccctctaaggttagtgggacctggattatgcccagggagggatggcacctgctgaagtcacacagcccattagggtggggctgggctatgtccacttctgtcccactgtgtgctgacatccttaatcgggtggggaggggcagtgcatttgtcccccacatccatgtccctctagcccttcacatttatgtcattccactcctccttaccacacagcacaggacgggcagggttagggggaggaagcccggagcccctctgctcccctgaacattcattccacctgccagggcctggggcaggggcagggacagggggtagaggtgggtgtaggggtgtggtggagggtggtatgtggggtaggggccaggcggagagctgggccaagagcctggggaaggggcaaggctaggggcagggccaaaggtaggggccatggggtagggcaggggtagccacgtgactccctccgcatgttcttgtcccctctggctctccgttccattccccccacccaccagcccctattcttttgttgtttttctgagacagggtcttgctctgttacccaggctgagtgtaatggcacaatcatagcttgctgcagcctccaactcctgggctcaagcgattctcctgcttcagcctcccgggtatctgggaccacaggtgtatgccaccacacctggctaattaaaaaaaaaattttttttttgtagaaatggggtctccttacattgcccaggctggtcttgaactcctggcctcaagcaatcctcccaccttggcctcccaaagtgctgggattataggcatgaaccaccacgcccggtcagccaacccttattcttgatctgaatacctgttgatcaaacacctcgtccccttctggttccttcccaactttcctccagccttgatttcctacttctggggccaaatacagtggaatcagccttggactcgaagtaggtccattctcctcttctctgggactcagaacctgccagccttggcttttgtttctgcatcggcaaagatggggagcccctgtggctgagaacagcactcacacttgtgtggaggggcagggcatgctggacaggccagggtgaggcagggaagcccctagaacagcactgggtagaggaaggcctgagaatgccccggggctggggtgagggcagcctcctcagtactgtgctgcgtggggtgcctgttggtgcctcagtgggcacttctgggtgggcgctatctaaagctgactctgggcattcactcctttgaatagcagaaatgacaacaatactgtttgaagtaataccaatgatgtgtttgagataaacacatacctcccgtaggcaccatttactagttccagtgtcatggatatagaaaccgaggactttgattaaggaatgaatagcctggttgcatgtataggttgagcttctcagacaggaacagacgtgtaagaacctgaaggcatccagaagaacaagtcagctcctgtgcctggagtggagtcggggaaggctgcctggaggaggtgatgtgaagggccagcatagcctggcattgctagggaggcaaagtttcctaatgaagactgtgggagtgtgtggcgacccgtggctgttgccttcccacccagctcagaccttcacttggccccaaggcaggtgggtgctggccagaccttccccctcccctgccctggctgctggggagctgccaccgccccccacccacagctgtgccctggctggggctgggctggtgctctgctcctcccagcacaggctgttcccccactgagctcaggaagcaggtgatgagggtgggaggcgggtgggctggagaagcagattccaccgtgtgtttatggccagtgtcctggagctgggctgagaatagcacccgcacttgtgtggagggacagatgggcggagggctggggccaagggtggggtgcgtgcctgtggagacaggctgtcctcagcgagccccacccagcacaactgaagtggtggagggtcgccctgtgtcactgatgccccgcggccatgcccttgctgcctgcctgcgggggtggcactgggatgtggagtagtagcaaggcccatcagggctcctcatgtggccacagcgggttgcaccaggctggccttgctgcgatggccactgtcttcagctgtttggttgatttccatggggcctcttgtcggtttacccttttcccaaaggggcccagcgtaatggggtggcttgcagggtccttgcagagctgcaggcaaggaggctgcagaggggagcttgattggagagaggaaggggggtggttggtatatgctgttccaaggaactggccatgctgcagtggactgtgagccgcaggagcaggtgcactgggcggcaggtgcggggaaggcttatgtgagctgggggttgggggagtagggcgttggggactagggtgggaagactgcaggaactttcagccctgggtggggggagcaggggggaatccagtgctagcggctctgctgggccctcttacctacatgatcatacttcacctttaaacacccttgagggagttcttggctctaagtgatgagacccagcaggtcagggaggtgagcttacttgcccagggctgcacagcctgggcctgctcccagcaccttctgccccagcagtgtctcctaccagaaggggttcctggccagctgcccagactagatgccctgagctggtcatccagagtgggcagtgggagggactgaggggcaggtgggtggggccggggtgtgatagaaacctgacggtggggtgtgtccagtccaccccagggttcctggccattgtgtctgcaccttcctcctggacatctctgggcactgcaaactcactgtgacccccagctgttaccccaacacgtgtccccatctcaggtgatgaccaccccttccctctagtagctcagatcacagagtccccttgcctcccacctgggtcagtgcagtcagcttctgaacaggcaccctgccccactgcgctcctgaagtgtgtacacgcgccagcctgggagctttgcaggctgcaaaatcaagtcttggctcagagctttccagggttccacgttccatgctgggttttaagggccagagtcttccaggggcctctgtggtcctgggggccgaggccgcatgtgcagtggttaaagctcctcaccgatggacccaggcctggggttgggatcctgggcctggctgcgtgaccctggggagttgttaaggcagtgcctcagtttcctcacctgcaaagtgagaatataatagtatttccttcatgaggttatggaggggtccaccatgaggctatggaatcatgcccaagggctcagcatgaagcctggcacctggtgtttcagggcctcctggtcctccctgccccctgccactctcagccacgccggtcttgctgtcctgtggcatccctcccgtccacctcagggcctttgcactcactgagttctctgtccagtgagttctaccttcttcttccttcctggcctggtgtcttgctccttcatcaggtctctgctcagctgtcacttccctgagttccttcctaagagcagccgccctctcccctcacccccagcccttcagtgtctctctttttttttttttttaagagatacggtcttgctctgtcgccctggctggagtgcagtggtgcggtcctggatcactgcattttttgaactcctgaactcaaggcatcctcctgccctagcctccccagtagctaggactataggtgcacaccatcacactcagctaattaaaaactatttttggtaggggtaggatctcactatgttgcccaggctggtctggaactcctgaccttaggtgatttgcccccctcagcctcccaaagtgctgggattacaggtgtgagccaccgcacccgtccccctgctgcatttttgttcggaggctcacagcacctttcaacattgcctccctcctagagtgctggctcctccagggcagagaccttgcttggcttcccatagagcatggccaggcacactgccaccagggcacgttgctgagtcttcaaatgcctgttgtgaggtgatagtgcagaagaggaagccaccttcgtttttgggtgggcgttggcaggggaggctctgattctgtgcctgtcctgctcttggcacccctctcaaggaactgagttatgagaagatccctcctgcgtctggccagctcacccacagtgtgaccaccacagccaccaggccctacagccgagaggccacgtcccagagccggggtggggactcttcacagtggtgggtctggtggaaggttcctttcttccactaagtgctggctgggtggggaagaagctggagggtgaggcctgggcagctggctgggcgcttgatgatggtctgggtgggcgtagcccttctagaaactcctctgtttgctggtggacacctggttctgctgatggctaagaatagactcagcttgggggatggtcccgaggggaggggagccagtcatgatccagggggtcctccagccctcctggttggaaggtggtggggtggctgataaaatccaagggcttggtagcggtgggccgtgtgcggattctagctcattgcttactgacatgggactctcggtttcctcactgtgaaacgcctccctcccctgccaggatttggagcacatgtggtctttggatgagcggttcctgctctgccgtccgtcctgcactgcccttggctggtccagccccgccggccactgtgagagtgctcaccccagccccctcccagcctgactctggcccctgctgcctccactcacgctgtgtgctctgctcggggctccccaggccaccgcagcccaccctggcttcctctggggtccacgtggcaccaccctggctgcaggccataggcttatctacagaaccggctggaatttcaggcaccctgggagggatgagagagaggacggggagggggccttcctggcctggagtcaactggacactcgttctctggggcgggagccttcccttccagctgcagagatgagtgtggaggaggagaccctgcaacttccttcccctcccccttctttctcaggggcggggctgggctgccagctctgatgcagacaggacctccaggggccggccgggctgggagggctctctgtgttttcgtttttgaccatcaaagcattgtggtggggctgacgtagttggtcaagtttttattgtcagttaaggatgtaaaagagaaaacccaacaccactttttgctctcaccagtatttcacaaaggaaagggaaaatcaccaaaaagaggaaggagatcatcattttagagtgacggcctcccaagagaggccaggcagcttcctcagtcagcctttctgagcaggggaccacggaaaagtgtgatgagtctttgtggactggtgtcaggggacggagcatgggggcttgtcaaaaaggtggatcgccatgtgggggtgaggccaggcgcttcctgggggtcatggacttgttaaaaagacggatcactgtctggacgcggtggctcatgcctgtaatcctagcactttgggaggtcgaggcgggtggatcacgaggtcaggggttcgaaaccagcctggccagcatggtgaaaccccatctctactaaaaattcaaaaattagccaggcgtggtgacgtgcgcctgtagtcccagcgactctggaggctgaggcaggggaattgcttgaaccggggaggcagaggttgcggtgagccgagattgcaccactgcactccagcctgggcaacagagcgagattctgtcttaaaaaaaaaaaaaagaaaaaaagatggattaccatgtgggggcgaggccaggccttcctgggaggaatgtcttcccggttttgtatttcatcgtgaaaatctttgtcagctttgcgttctaatccacaagctgtctatgttggttatgtcacaaaagtgttttctttaccagttcgatctttggatcaaagcaagatggagtgtgaatcttcttcagcaagctccagacacacgcccgctccccccagtgtctgtgtgccccagtttgggagtcaaaagttgagtctgggctttggaactgatcaggtgtggcatcctggctctagagctcattagctgagtgaccgccctgaccctcgatttcttcatctgtaaaataggaccaacggtcatcacctcagggtggcctagggatatgaacccaacgggagggggttcaagggtggtgtgtcccccaaggtgagtccttggaggagagattccctggtggtcatgctttgcactgtgagctttgtggagcttacctagaggggcacatgtgggggcctcaactgggctccatagggaaggaatttgatggggagggagtcccctctgaagtgagagctgagctggcagcatctccctcgagggagggcaggttgacagatgcctgtccctagagccagcccctcctgccaccacctcatatccagcccaggggacatgggggccccaggtatgggggcacagaggagctagggaagggggctgaggcctggctcagctccccctttcggagcagccctgagggtgtgagctgagggggaggaccccattcccccagaggtgctgggcccttcctgctgggggtgcgtctggccaccctgggctcgctcttggtttccccatctctggttttctttcgggctccttcctcattatgggctctccccgggcctccctctgcctcttgcttgtctctgtggcttcttcgtggttcctccactttcctactgtgcccaggagggccatgaacaggtggctctgccagggagggtgtgtgtgagcgtgtgtgggcgtcatctcacactggaggtgcttgctgcatgtacatggccgagcttgtgctgctgtgtggggccctgagggctggggagcgttcttgcctccagatggaatgcacttatctttaaagtcattgtgcctttgagaagttggaaggcatagcctgaagggtggctagccgctaagaagtgtgctgtgtgttctgggcttgcttcctgggactcacttcccggtgcccctgggctctgctctccagcaggaacctgggccacttctcccctttgcagccacagctggggctgctgcaaggggcccagctgcccgtagctttcccaaggagtctgggaccctcattctagcccctctgtccttggctgcaggtctgggtgccctcccctcccaacctgagggtgaagcagcagctctggggtggggcggggcgggggatggagggagaacaaggcctcaatcgtcaccaggagactgctagcttctgggttaagcactgctgctctgaagacgcctctgtacgtgtgacttcactgggttctgaggaggaagagagtttccctgggctggatgagaccaggaagctgccccttgtgcagtcaccagcctggggcaggtgccacagcccacagtcagtgtggcctcctaaggaacactgcaatgggctcagagggcagctgctaggccatgggtctgtctcctttctcacttcttgaagcagacagacctgagtgatgatgcttgttcaccaccaccacaaagccacagaatctgagctcggtcgcttcttcgctgcagagccaaatccttcagtgccgcagcctttcctttcttatctctaaagcaggggtaataatctgcggctctgagcatgagggaacgctgaaatgcctaagagcaatgagcatgcctctccaccgaaggaaatcagggttccttggagaaatggctgatgccagggctggggcagggacagtgcaggctgagcctggagaatctgctagtgccagaaagtaaggaagcgcctggagatgaatgaggacgtgtccgaaacctcccactggtcgcacttgggatgtttgagcatcaaaatgaatcacgaacgcaaaacgaaggactcacgatatcctcaccaccctcctcgcaaaggcaagaccaggggaggctcgtgtttgtggaatgccgggtcacgtggaggagattgggtaacagcgggttccagccaagatgctattgcagtgcttctcagacttcactgcgcatacggtgcgccagggggacttgttaaagggaacactctggttcagcaggtctgcagttttttttctcctccaggctcttggaagactgtcatgcagctgcccacagacctcacactgaatagcaaagaatgatggatagtaaaggcactgtgcaaaaatttcaacaactttttgccttgccacagtgaccgtgattgccctgcagatgactaagagaaaagtgaccttcctttccaagagatctggcaaacacgactcagacccggcggtcaagcctaacacagctgtggtgcggtgggaaggctcagcctccctctgcaggactcttgccaaagcagcctttaacctgaacttcctcacaaggaaacaatcagatggatccagagtgtggggcattctccaagtgattggtttgcactcttaaaaagataccagtatcacgaaagaaaaaaaatggataacattgataaataggcatacggggaatattctggactaaaggaacaagagacccgacaatcagaagcaatatgtgaaccacagttggatcctagacccagacataaagggcatttggggggcacccaaggatatttgaatgcggaccgtgtggtagatggtattttaaaatacattttggatgtattgggggtgcttatggtatcatgggcattttggagcatgttcttgttcttaggaaatctgttggagtatttaggggtgaagtattgtggagcgaaggtcatcccagtgacccttctgctgcttaccttctgttggctgggcaaacatacaaatgcaggaacggtttatatatagagaaaagtgactgggcacggtggcttgtacctgcaatcccagcaccttgagggtgctgaggtgggaggatcacttgaggctaggagttccagacaaaactgggcaacatagcgaggccctgtctctacaaaaagtaaaaatactagctaggtgcagtggcctgtagtcccagctactcgggacgctgaggtgggcggatcgtttaagctcagaaagtctaggctactgtgagccatgattgcgccatgtactctagcttggacgacatagcaagaaaagagaaaagcaaaaaaaaagaaaaaaaaaaaaagaaaaaagcaaatgagtgtggccaagtggtaacagttgattggtgaatctgggtgaagggtagatgatagtccctgtagtatcctttccactttctttgaggtttatactttgaaaataaggaggtgagagggccacatgaaatgtggaggtgagtggtgggcttagaacctcttttcctccctctgctctctcgtcagggctgctgtggcctcctgcatggcacctagattgttggaggccaccgagactctccacccagaggtggggagcaggcttaggtggctccactgtcggagtggggatggggaggtgtgagcagcagccgggagaggggtcctgtgtgtctggttgcagggacagctcgcatttgagagatgggcttggaggaggggttgtgtgctggggaactaggtgactatgggatctgcgggactgtcctcagactggctccctctgcccctgggggtttaagactcccattgtacccctttcaccactgccaccccagcctgatgtgtcagacagcaggcagcatcttggggcaggagaggggaggcagagggccttgtaccccttcccctgcctgggcgcccaccatggcctgcccacgccaaccctggtctcggtgcagacttgtcctgcgatgtccctggtatccccagctgagtgcctgcaaggcctcagagcttgtgaccacggaggccttcagctggccatcctgccctctgtctcccctgcaggggcccctggagcatgagggcggaaagatccccgaggccagccctgtgtcatcatccacagctccccagcttggctgacccgagctgtgtgtgggagacgacggaggaggaggggcaaggaaagattgacagagggacagcccccgggagtcagtgagcgagcctggacccagaggtggggggcgggggtggggagaaggctcgcctttgtcctgttctaggggccctcctccctttcgcctcttggggtgtctccctcgggactgggcccagagaaagcctggccgggtgtctgacagtggccttccccctgcccgcctgcctgtcctctgtctgtgtctgcctgcctggggagcctcggtgtgagaacgccggggcacgagggtgtgcatcctgcctccgtggcccccgaccgcaggctctgctgggaggaaggggcgagacagggctcacttctcagcccgcccttcctgtgcaggcaggtggggaggagatgatgcggaaggtgagggccttatgcgttttctggggtctcagcagctgggtggtgggtgcctgggagggagatttgctggatgaggtcccccttccatgtgtgtgtgggggtggggtgttgggaactctgctgccactgcagggacgaggggtgccgctggctggtggaggagcccctagctttctgcctggccctggccaggaccagagtgactgggaacgcggccctcacccctccttccttaggcttccctcctgggcccctgggctggtccttctgatggccttgggaagtgcttatccctgccctgggccatgccattcagactgtgggtgtgtgtcccgcaagtgcagcaggcccactggtctctggggccgagggagggatcagagaccccaggaggggctgctggggcccagccgggtgagcccgaagacccggccctcctcactgtggcggctagagctcctggcccctcctgactggacggtgtcaggctgtgtcctgatttgtttgtgctcacctgccatctgtcacataaggacacttcccttctgaggaggcggccctggtgacttgaagtgcgtgcatggtgggtgggtgctgtacgtggtgagctgctcctggctcaaacaagacaggcctgggcacccttcctccttctgggttcggtggccgtgcactgcctgtgccccatgactcacgctgtgggtcagggccttgcctgccatgcgggggctgttggagggtggcaggactccctgtacccacagggagcggctgacgccagggccttctgccctctcactgggccatgacaaaggccttggcggagggctggggaggggcacccacccacgggatgctcccactgagcccctgtggacccgggtgccggaggcatggcgtcaactcagtgaaccacccagcctttctagggaggagccttgggagggtttccttccacagccgaggcccagcgaggctgaaccctgtggatgattgcaggaggaggttctggagctggccacgggttcacactttgtcattcctgccacctgccccccctccctgccctgccctggggtgtcccctccaaggcacttcagctccactcacatctggccttgggttgaggacatggtgagaggaagctctgataggaggtgattgggtgtggcactgataaagctcctgggactgttggctctgtggctgcctctgccgcctgggcctctgtgtgtctcgtccgccgccaagttttcaaaggctcccctttgtttatcacagagtgagtgtgcgtgataagtgtgtgatgagtgtaggtggaactgattgtctaaggggccctcacccagtaaccctggacagagtgcaaatcctggcctgtgccgccagaccctcctcctcacccaactcctgctcatccttcaaaacccagcacaactgtcctgcccagctttccttagtcgctgctgggccagcccctcctggacacctggagtcccctgtgtccctcagtggtctgcctgtgagctcggcacaggggaggccccactaaccaagtgtggaacggatggggtgggagatctgtgtcccagggctcacggccttgtcccagctcctgttctggggcagggggtgcccagattgtttttccctgtggtagccacaccaggagctccttgaggatggggaccccaggccacttgcctgcgttccctcatggatgaaatgggggtaggtgcagtgaggatggcatgtggccaaggccagcctcgcccatgggtcttccctgggcctcggccatgctgtggccttgttattcctcccatttccaaggcgggggcactggagcactgagagcttcagcagcctgaggtctcgcagagtggggagactggctcagcctcaggcttgctgtcacccctcagggctgagggctttctgtacattacccttccattttgtctgggaggagcctgaggctgagaggtgggttgttttgtttagggtcatgtctctgccctcaaagcccacagctcagatgagcagcagccgctgagaatatcttgtgtgtctgtcctgtgcttagccctgtgtgggtgttggggacacagagatgactggaacagtgtccctgacctcaagctgttccttcagggtgagggtgtgaggcacacaggcacatcacatagcagtgaggaaagctctaagtggtacagagtgttttgaggaaaggagagatcagggacagttcacagtgatgtcacctgagtgaggttttgaaggatgcataggagtttgccatgtgcaggtagagtgtgcgcgtctgtgacttctgtctcacatcttgggatgccgtcagcctggacccggtgtgagggctggcggtgtcagtcaggcccatcccccacctgtgtgaaggctgctctgaaggccttttagggatttgccatttcttgaatatcatgggccaggtactgctctgcactttatagacatgatctttgtaatccttgaggagggtgccagtgttcacttcattttgtagattgaggctcagagagtagctgtcccttttcccaagggtcttctcactgctgcgtggagtctcacctgggctggtgtctcgttctcaaggctggaagatctccccagttctccagctgtctgtgcagagcacacagcagtgtttgggaactgggtcgagtgtgtgtctgtctctgtacacctcaggagccctggtggccagtgtgggtggggaagactggggaccttttgctggctgagtgtgtctgtcttcctggggagagggagggcagggcgtggaaggggcatccttcctggtgctcttgccttgggagctgggcagtccctgccctgtttctgagagcttctggctctctctggtggctctggtagacttctgggagttcttttctatgtggtggtctattcctctctttggagggggtggggctgtggggtgggtgcctgagcagaggggctgagtcacctacccaagctctttgcagagccgggtgaggaacctccccagctcagcccactttctggggggtcccttctggatgtggctgccagggaggggcagcagtggggagcctgcaagttgtgcagtgtacattttcttgctcatgtgggggttttgttttggtttttctctcatccctgtgtcagcccttggcatccagctgcagttgcccaaggggctgtgtcccgaccgctgtagcacaacatcatcggtggctgcctcccggtgcccacctgccccctgctgccactctcactttcccactccatcctctgtgacctctagtcaccttgagcaattcaaaactccccagtaagatgctccatctttctggtctccttacctttgttgcaacctctcccctctgtctgagctgccacccactccaggaagtctcactgactgcccaggctagaagagatctctacccccagggtcccacagccttaagtgttcccccatgtcaggacagagacccacatctgattcctctctgctgtaccggccaaggtgcccaaggccaggcacagagcaagtgcttggtgagagatggccaagagcagctggccttgccaaggcttctgggcctggctggggggggaagtgcagcagggcagcacaggacctgcaagggccggcagggtgggaagggtcctggctgtgtcctggtaccaggcatccgttggtccaggaccgtggcctgggccctgggccccaaagctgatgttcctggcagcatgggctggctccgggtcttggaagggagggatgtctgcagacctactggcctcagcagatgctgggctggccctttgctcctggggctccccaccgctcctgggcccacctttttctccctttgctttccactcccatcccctacccccgtttccttctcattcttgtgaggtcttgcccactgcctgggagaggcctctgctgagacatcagtgttggcctttctgccgccctgatggaggtgcctctttggctgcagacgggtgtgtcccgccgccaccctggtcttcccctctgctctcctgcaaacccatctggcactcctcatcccttttctgtgccccagctctttgtctttttcttctcctgctctttcctaccgtgccccaccaccgctccttgcctctgtattttgtctccctgctcccacctctctctccgtcatgtggagctctgggattggaggagcagggcccagagagggaagtctgggagagcgtgatggtcagcatatgttctcagggtcctggccagcgccctcctttcctagagctttcccctctcctggtgtggctcctcttctctgcccttgcccacccatccttcatctccccctgccactcatcgtggggggttgagggggagtccacctctgagactcatggttgggagcagagctgtgagctcatgtgtgtgcccttgtgtgttttgtgtgtgtgtgtgtgtgtgtgggctgtgcagagcagagtgcctggggcaggtcacatctaaaaacccagtcagatcagaagcagactctgcgtggcccccggcagctcctggccaccgctcgctgccctccttgttccgggatggctcctgccggttcagggcctgctctgctgttgcctgtggcattcatgggcctgggcccagggaatagagtcatgcggagaagtgaggctgctcctgcttggcccctcccctgcgtggctcacttttcagcttccagggtgggggcggagcacccaggggtgcagtgtgagatcagctaggagggtgcccgatccttcttgccatctttgaagcctccctcctcctggctgtggtcactacgtcaagcctgtcctaagctccatttttggcctattgtcgagccctgggtagagggtggggaggcctgaagacctgatggacccagccatgccctgggattgcagccctgggtgggcaccctgggctgggtgatgttggctagagacttcccagcccctggtctgtgctgttggtgactgagcactcttggtttgaccactctcctttccaaggtaacactctccccttctctcttggcttcggcaggttctccagaagctggggaaggcagatgagaccaaggatgagcagtttgagcagtgcgtccagaatttcaacaagcagctggtgagtgtgggtggcccttggccttagggagtttgtgaaaattcggctgccaggtgaaaaatggcacgagctgaatttgtggagtacgagagcttggaggagggtaatcagtgtgggctgacaagatcatgtaagacttcctagaggagggagcactggcaatgcatgctgggaaggaagagggatggggtatgtatgctttaggttcttggtaggagacatagaaacggtagttgggggagggggagggggagggtgggataggagcaggcaatagattgtggccagacttggggaaactttgcatgtcaggggcaagtgggagctatagaagcttcttgccaggagagtggcatctgcagcggttagcatgggggcggagcaggctgggtttgatttgggcatctgctgagcatggtgtgtgcctggctgtgtggcaggctcaaggctgggctgtggggaggcatccgcagccatctccaattggcctgggagcatttgagagagggctgagggcagctgggagggctggggagcagctgggagggcctgggagtagctgggagaggactgggagcagctgcgagggccgggagtagctgggagagggccgggagcatttgggagagggctggggagcagctgggagagctgggagcattctgggacaggaccaggagcaactgggagggctgggagcattctgggagagggcggttgggggcagctgggagggctgggagcattctgggagagggccagggaacaactgggagcattctgggagagggccggggagcattctgggagagggcggtggggggggcagctgggagggccgggagcattctgggagagggtggtggggggcagctgggagggctgggagcattctgggagagggccggggagcattctgggagagggctgggagcagctgggagggctgggagcattctgggagagggctgggagcagaggggagaggccccagggccaagttggccttggcttgccagaggggctcagcctgacaggcttccctggacagggattggggagcccccttagctgattgtcctttaggccagttatgggaggagtttcaaggcccaggtagaccctgtggcagggatatctactgcctctgtggctctgggcaattccttcccagagcttcttgggcctcagtttcctcacctgcagaatagaggcttgaacaagaaacctggtcttaggttctgattccatctctgggaagccccagggcatgtccctactcagctggcttcatcaggctgtgggttgctctgaaggacctttagggagttgctgtggccatgggccagagctgctgtgtttgacagagatctatgcaatccttgagatggggctgatattctcattttgcagatgaggcacttgaggctcagagaagttaagcacatcttccaaggctatgtagctggtgtgggtgttggggattgaaatccaggctctgtggcctttggttcactatcgagtttcctctctggagctgatcccttgtcctgagggcagctggctaggctggggagacaggttaggggtggaggtggtgggggccccttagaacaggctgagctggccgggcactgtagctcacgcctgtaatcccagcactttggggggccaaggcaggcagatcatgaggtcaggagtttgagaccagcctggccaatatggtgaaaccccgcctctactaaaaatacaaaaattagccaggcgtggtggtgtgtgcctgtagtcctagctactcgggaggctggggcagaagaatctcttgaacctgggaggcagaggttgcggtgggccgagatcatgccactggactccagcctgggctacagagcaagactccggtctcaaaacaaacaaacaaacaaaaaacaggctgagctttggcagagtgagggaagcacagttgggagctgagactctgtgtggcctggccccagggctgaaaccacagtgttgctgtctccactgtccctcagagtcatcctctctgggtctctgactctgggcaaacagtcactcactgctccttggacagaggggttgggcagagagtccagggctaaagatagccagtgctgcgggctgccaggtggctgctgggctgtgggtgtggagcagtcctgagctgggcctctgtctgcccccgggctcaggtttggtggggtggctggcttttcaggggccagggctggtagttggggtggtggttttaaggtcttgttcaaggctggggctaaggcagccagttctggatttgattggtgtgtggggatggcagggtgtggggaccaggaaggaatggggtgaaggtcactgttgttgggggagtgaattcaggaggctgcagtgggcttgggggccctgggaaaggagagagagaatggggcgtgggaagcctggaggtggagctttttcttgcctctgattctgtgagccccaagcctagtgggcccagcactacaagggacaaggatggcaggtgatttagtctttaaagaagtgaacctcccaccccttcttatggggtggggggccctaggagagggtgtagatcagcctgctgtcacctgctctccaaggacccaggtgcacagcccctcctgggcccacctggcgctggtcacagtagcatcgctgccttctgcccctgctctgagagcccatgggggcctgcttgcccctcccccagagtactgcacacctggcacaggcccttctggaagccatcctgggtctccagggcatcccagctcttcttcctagggtccgtctgtagctttccaggctgcagggctgtcattgctgtttgtctgtcactgaggtggggcaagtctgattccttcttgtccccatggcccacccaaggttttgctcaaaatgggcatccctgactattgagtgaaggtcgccccccgaattgatggctgaggggtgccagagggggtccacgtaggagggccgtccctgccccctagacccactgggagcacagggacttgggtgctcaggccacctgtggggactgatgtccagggaggtgcagcgagggcttggggatgctggctgagcccagccgcgctggagctgctccaggaccttcctgactcccccaagtcctgtagctgggacacaggctgaggtgggcagtggctcccgaatcttatcttcccccagctgggctctgtgaactctgggacctccagagaattctttctcagatccctgtttaggggctgagggagccacttggaagcaaacacacactgctctgtactggcctggacgctgccctgcggagggtagctggctggggcctccgtcgggggagggctgtgtctaccctggggactgatgaggagcttaggaagccagctgcagtgggcacagggaggcagtgctctggccggccccttgcacatctgcgtgccacgtgccggcgcacagcccagcgttgtttgggaaacacaaggagccctggtacggcctgaagcccgggggagcacaacgacccaccccatggggacccctgctgtgggggggaggtggggacggcgtgagaggtgtggctgggatggtggaggcctggcagggagagaagctggatctggaagattctgtgacatcagaggacacgatagcatcccatcatgaacacactttaatcctcgtctcgaccaacaaagcctttaattgtgaagacttagggtggctgtgtcaggagtgaggtggacccttcctcattccccggccccgcggggtctccatccgaccccctgatggaattccagggaggtctcagtgtccgtggagcagtcttctgtttcttcactcagtctcacatcggtgggccttggacttggatgtttgtaaagatgatgattagccagtgttatacaccctactctatgggggattaaaggaattttagagatttttttttttttcacacatgctctctttaaattatacatcttatgtgctgctctgaagctccccctgtggatgtctctactgtcacacggaagcattcatcataataggcagatctgtgggttctcagggccgcatcactacccattacccacaaaacaccctgcgggctgcgtgcccaggcttggagggtctcatgggctctccgagtctctgtgtgactgggccggtcgctgaccctctgtccgcttctttgctgtcaggtgggacagtggtgttgagaagactgcctggaaggtgctggcccctagggcaccagggcaggaagagcagccccggctaaggacagggagaggcctgtagtggggagacagaagagggtttcagggtgctgggggtgagcctgtggatgtggccgggtccctgctggccttcacctggaggtggacctgaatggatggggcccaccttccggctcttgcgcaagcatgaagctggccagactggagcgctgcaggcatgctgggtctcctgggaccatggccagctgcccctccttcagggcaggaggcgactggaacatgggtgtccctgaggcttgggctggcagcaggcaggggaggccaggagggtgcccttctactacgaaggtcagcctcagccactgccgctctcccgagtcccctctctgccttgtgttcctgtccttagcatgaaggccatctcctgaggcctgccttcaagctccagggcctggcctagctcactggatctgaggagtgccaggcagggattattcgccttccactgaaagacgaggagactgaggttcagagaggctcactagcttacttagggctgtgtggctagtaagggacacagctgggtctgcatggcctcaaagcccgtgtgcagcccactctttgcacgtggcttctggaaacttctgcagctcactgagcatggtctcagacctcagtgctggcctcacctattgttcacccctcctggaacctggagttctccactcagctttcctggctctggttttgatgtcccagagggacttgaggcctggcccatgcttctactgtctctgctggtcctgctgtctcaggaagcccctggaggacactctccctgctcagggagcttcaccacccagcccactgtcccctcagccttttccctctacatcctatgtccctgctgtcagctgggccagtgatcctggccatgaccaccgcattctgcacccctgctgtagtgccgtctcttccgcaggtcttctgtccctatacaggctcgcaccgggccctcttttcctagtacgaggcagtgggagctctctgtccttgggcaccacctgagcttgtggagcagggggcctggtggtcaccacacctgccttgcccatactcctgtgctcattggtcacttgtctgcaggtgtctgagggcaggtctgtgagtgccggggctgctgcacactggtgctgtgctgtttgtgtgtcattcagccgtacctccagcacgtcatctcggaggggggtctttgtcttcctgccttccttcctgggctgagaatggcatctggaagatggcaggtgcccacaagcatgggcaagggtgcctatggacgcagggcttctgaggcaggggtggtgaccgtagctgctgtcctgttgggaggtcagctgatcagtggctgctgtcaggagagcagcctggttcattcacgtgagggtggcaggaaggagagggtcagggactgggtgtgccaccagtccctgacctggtccttgtccttctctttgcagacggagggcacccggctgcagaaggatctccggacctacctggcctccgtcaaaggtaggaggcaggcagagcgcacctggcccgtgtagagctggtgggtgcagagctggggagggtgggacaagcgctatcagtgggaggcccacatacttcctttctgccccacagccatgcacgaggcttccaagaagctgaatgagtgtctgcaggaggtgtatgagcccgattggcccggcagggatgaggcaaacaagatcgcagaggtgagcatgggacaggtgggcctgcccttctcagagggccctctggtctcagctcctgtcccactctgccgtgccctctgggacaagcctctctggttctcgggcattcgcgtgctgtgtgccctggggcaagctgccctccctctctgagggcctttctcctgacacgccctcacaccaaggtgggtcagatggtgggtcgtggtcgtccttatttgtgtgttatggctcacaactcacaaagcctccctggctgaccccagtcctcagcgtatctgatcctcacagtcaccccaatagggcaggaacatttgcccccatcttacagatggggaaactgaggctctgagaagccactgagctgtgaagagatggggctggggctggtccctgcgaggtgagcgctggggcgggtgtggcccagccctcctggtggcactgtcgtgctcttgcctgtctcagaacaacgacctgctgtggatggattaccaccagaagctggtggaccaggcgctgctgaccatggacacgtacctgggccagttccccgacatcaaggtgagagacccacttgcagatctgccctgctctggcctggagggaactggagagaggacagggcctaggacgtgcggctcaggccaggaggaggctgtcctggaggcaggaagcgcctggcccggtgtttcacccctccggggttgctccctctgccaccagcccacggccccccattcctttcctgtccctttgggtctcagggctatgggaggaagcctcacggcacgtgtgtgtgtgtgtgtgtgtgtgtgtgtgtgtgttgctgcggagtggctggctatatgattgtggaaggtgtagaagggtgagtagggcctacacatgtgtgtgcctgcaggtcccctgtgtttacaccatgggtgcttggaagggtatgtgtgcatgtcacctgttgtctgggtctacatgtgtgggtgtgtgcgtgtggttgtgtgcattcgcaaagcctgctgtctctgccaggcctgggttggtgctcggagctggcagtgtctctggtatccaccgaggcgagtggtccccggtaacgtgcacatggaagcctgggttgaccattgggttggacgagatccccttggtgggcaggatgggggtgtcatgctcatgctagcctcaggggtccccagtgcagatgcctcaagctccctgagtctgatgttggtggctgtggagatgagaagccaggggccaggccaaggaaaagacttggctgacacgtcaccagctggtggacacggacacatgggctcatgtgcaaggaagtggtttcacacagtggggctggacggccaggagggggtgagctctctgccacgaggagggttccagcaacaagggctcaagggttcctgtggagctggggtctcctgcccgccctgcgggtccctccaggatccactggacctggagtctcagcaggggtgccaggccccgcttagtgccctcctctgtctgccccagtcacgcattgccaagcgggggcgcaagctggtggactacgacagtgcccggcaccactacgagtcccttcaaactgccaaaaagaaggatgaagccaaaattgccaaggtaagggctggaggcgggtcggggcagcgtctgcagggggctgagagagggcgggtgtctaggaccccgagggtggaggcttcctcctgcctggccccaggtggctgaactgggggtggggacgatacagggcccaggccggtgagtgagaggcccttgtgggtgcctgggtgaggtccaccctaggcccattcctgccccccgtgccaccctggcccctcagccctgatccaggccacctgccagcctgagaatgggcctcctgggtttccctggaacggcgccgccctgcctggcgagccgggtggaattcgtcacgcgatcccaggcgacctgtccctggctggagcgagccagtaggtgcagagctggccccactcatcctttggtgaggggctggggtggccccgtcctccgggcagggccgtgcttgctgggccccctgtgctgctaaccacgctcaccttttgcctctgcagttggagttcaccccctttccttaccccccgggctccccctaattctctcggcctcaagggcccatatctgcttggggtggcccccgcgcgtggggcgtgtggacctgcatttaatctgtgtgtctctgtttctctctccccacctccctggtctctccaccttcctttgccttgacctccccaccccagcctgtctcgctgcttgagaaagccgccccccagtggtgccaaggcaaactgcaggctcatctcgtagctcaaactaacctgctccgaaatcaggtgacactggcttctaaccttgcacgtgctggcgccttccggtctgtcgtcctgtcctctcgccctgcggtggaatgcagggctggcatctgagcccagctggggcagggtttttcaaaggcctctgctgggagagctctgcttcagaggagacctgaagtcaaatgtaggggtcaaagaaccggctgaggggctctgtgtgacctgggtgggggcatagctatgcccgctccgtggctgcatctgtggtcattcctggagactcctctgaaatcctagtggtccaggaatgcctttgagccattgtcctctgtgagggctcctctggggagggaggcgacatcatcaggcccctgtactgccatgcctgtccttcaagccacatgacaactctgagatcatcttgaatttactgagcagagaaagctgcccagagaggcacatcacagcctcctcccagggccccagagccggttaggggcagggttggggctctcctgactgaagcccctgcgtcattttcctcggacttgtggtccccgtggtgactctggaggagttactgggaggaccctccagtctggatgggatgctgagacgtggaggggaagcatgggtccttggcctttggggattcatggagggcaagtgaccagcaccacagtgttcctggggggcttcccggaggaggcttttttacaaaactcctgggccatctcaccatcctggccatagaggctatggtcttctcagccccctgccctccaaatgggttacagtgtggccagggaccactggatgcagtgccctgtgagaggtgggtcatgtggttttctcgccaatgaaactgaggcacatttcaggtcagtgtagtcacagcctggatgtggccctcacacttctccatattcccgagaggctggcgataggggcccggccccggaggttgggtttctctctgggcagctgccccattttttcggagcctcctcttgatttcatcatcttcattgagtgcctgtgacgtggagagctctgggtgggcttggcatggcttgctgtccaatttctttttctattttttttttttttttgaacgggtttctctccgttcccctggctggagtgcagtggtgtgatcatgactcactgcagccttgacttccccaactcaagcaatccttctgcctcagcctcccgagtagctgggaccacaggcacgcattgccgtgcctggctaatctttacgttttttgtagagactgtgcctcattatgttgcccaggctggtcttgaactcctggggctgagcgatccacctgcctcggcctcccaaagtgctgggattacaggcctgagccactgctcctggcctggctgtccagtttctcacctgatctgctgcctgatttattttaggccaaggctgactttggagacactgagtgttgacagcctcatcctgaggtcagggtgcccatggggaaccaggggctgggggtgatgcctagggggacttcagtaggcctgagacttcatctgcctctggaggtagaggaggaaccaggggctggagtgggtatgccctgccagtcagttcagcacttgggctagaagggaatgggactactgacggagggcccgggtttctgaataattttccctgaaacaggtgaaacatttttttgtggatgggagaacctcttaggaggctatggggcctgcccactgcttttgggctcctgggacaggtgtggttgggattatgctgggagggcctgcctccacgcccaccctgggggagcagcgagagggtgaggcaggtgatcacacctttgggtgctgggctgtgggtgtttcacattttggccaaactagctgtcccatttgggtcccatctttatttgagcacatcctccttgtccccagcccactcatacctggctggaggctggagagcctttggagtggcctgtgggcagctggctggctgtgagatggcacagctgggactccggggctgccctgcttgggaacttgactttggggagatagtgcatcctctctaggctgcaccagggggctggccggctccatgcagaccctgggctagttctgagctgctctccacacctgcctcagcgtcctgaatgctgtcctcgggaccccgggcccatgtgactctgctcttccccactgttagcttcagtggagctggggtgggggcactctctcctcatggcagacagccctcaccttactccctgccccttccacatgcttcctaaagagccagaatatgaggaatgtcacccaaagggaatacaagacacgggtcctgacttccaggaactcaagcggaactgtccccgctcttgctctcggcagcgttgctgagcggtgagagcacggctgggtgcagatgttcccacagacaagctgcggtgctgtcttcactgctgtccccaccgttgccatctggggagttgtgggggtggtggctgcatcctcatggagagggggtcctagtgggtacaggagccgggtggtccaggcaggttcttacggaatgtgggactttagacccactgttggcagttgagggcagggggtatgtgtgatggtgctcagctcacaacagtacccctaggactcactcattttatgagttccatagaaccatggttggcagcccccctgccaggtaatgggacacccaggggagtagggcagggatggcccagccatagcctggagacggaggaggggcagtattcccctcctggtgtggggtgcccagggtccctggatccaagagaggtgtgcatgttggaatagacattcttccccaccccccgctccccattctgcctttaaatttttattagattctgaaaagccaggcaaggagcccacgcccactctagcgagtagctggaggtaacctttcagaagccatggtggcccctcctccagtcccaacccaagtcactgggcctaggggctgacctgggctagtcctggtgtctgaggctggatgggacagctggctgggcttggggcaatcgtgtgctttgtggttaagtggccttccggccatctggctgcctttgccagaaggcggcccagcctgggccccagccccggcctgagaacgtgaggctgctggcgggaagtttccctaggcggggcctgacactttcctgggctgtgactcagaccccgaatccctgagtcactctcgccggcagtgtcctcccgcagtgagccagcacagccccttccctgggcgggctgggcaccgggcagggtctgtgactcacctgctgcccgcagtcccttccccagcactctgtggccgtgtgatggggcctgagcaccactgcctggtgggtgtgagtgcctggaggatgcagggcctgccctggggaaggtgtgggctaggagtgggaccaggcacagcccagctgcctggctgcctcctccctggccctgcaccctcctctagggtccccctgacattcctagaggtgcctgagtggctgcctctggtctccctctggtggggacaggtcccaggagagggctttgtgggaaggaccatccctgggaggtgaagtgaaggctggtggctgaggctgccaggagctggccctcagaaatggggagggagcactcaggggcgggggcaattgggggcagcgacagatgctgccctgagagccagaaggcagtggcagggctggcacctagcctgaggaggttcattgtggaagtgggcagggtccccacttggctgggtctggggtctgcctctgtgcatgtcccgtgtccagctcgccaagccccaggcttgcccctcttgttgtgccctactccacgctcactgccctcccggccacgtgggcctctctttggcaacggctgctcagccctccctttcccagatgtcctcagggtcctggagggctgcagggggaggtcgccagcatgggtgtccacatccagttcagcctctgtcttgcccggagccctggtcccagcgcactggccaagaggggtgggcaggaggtgggaggactggccatggggctgggctggctgggacgcccaacagaggggaatgacccgtgctgccccccaggccgaggaggagctcatcaaagcccagaaggtgtttgaggagatgaatgtggatctgcaggaggagctgccgtccctgtggaacaggtgaggcccagcacggtgcccagcctgcgtggggcagtgtccagtctgcgtgctgcggtgcccagtctgcgtgctgtggtgcccagcctgcgtgctgcggtgtccagtctgcgtgctgcggtgcccagcctgtgtgctgcagtgtccagcctgagtgctgcggtgcctgggccctctctggtttgtgcctctgatgagcgtgtgtggtcgctcgtgggtgggtatttctgagttgctgtcctgacctgcctgttcacctggcccccatccttccgcccttctgtagccgcgtaggtttctacgtcaacacgttccagagcatcgcgggcctggaggaaaacttccacaaggagatgagcaaggtaggccatggggacccctctgaggggccacaccccaccctggccgagggtcagagtcagagtcgtgggaggggcagcctgaactcctccttccctgccaggttcagcacacaccggtgaccacagggctccctcccggccctgtggaacagcccccttcaggagtgcctgggcccaggagggcagcagggcatgctggggaggctttgagagtgtcctgggtccttgcctgggtagaccacctgagaatgtagaccaggccctctcaaactgtgaatgtgttctctagcaaccttggcccagggagtgcagtgttagacaatggtggcagtttctcaatttgtaggaaaaaattactagcattttctcaattttaatttttctcccatgcttttgagacatttaaataggcctgtttcgtctgcgtgaatccactgtgcgacagggtctggtctgattagcgtacctttctctcttgtgttattttcattttaacctatctggcaactaaaacgcaaagctgttgaactttgcagttggagagacccagggctggcacccccgcccccagtggtgggtctgactttgtctcttgggcccagatggatgaagtgatgatggtggattccaggcccagggtcggaggaggaaaagcagcttggggcctcccctgactcacacttctaagtacggtttcctgccttttagactttctctttccttcttaacttttcctttttcccttcgaagattggagacaacttacgaaaagtttaaaaaatagagaaaggtgtttcagagaaggaacatttatataaaattagtctgtaaaaatatatgccacagaacatagttgtttataaataggatgaagattcggctctgagctccctagtggccaaatcaaagagaggaatattctcagtaatgagaatcaccgtgtgtgaggaataaacctccgctcgtgcctgtgctttcagtgaaatatctggcagttgtagtgtggtctgaaagcatcttggcaaaatgaccttaacaattaagattaatggtctgccaaaacaagttttaagagaaaaatgtaaaaacagtgcaagctctatgtggcattttaggatatccctataagtaggaggggaaaagatggcttccagagacagcaggcattagtgatatagcccacttgccccgttttgttgcccccttggtttttcggggtttggtgtgctagttccttgctctcacagatggggaaagaggagcttgttcctggcaggggctgggggtggtggggagaagcagaggtgtttggggaaggtggggccgtttggtggccttggaggccccccacctcctcactgtctctcctgcagctcaaccagaacctcaatgatgtgctggtcggcctggagaagcaacacgggagcaacaccttcacggtcaaggcccagcccaggtgcgtgcggggagagccctggcgcccctgactgtgtgcacggcaggggcagggctccttcctgtgaccctgttggtgccctccctggtcccccatgggtttggccttgggggtctagggaccttcctgtcttggcctctctgtgctcagggaggcaggtgagggcaggtctctgtctcgaatgtccctgcccctctggctgtgttcgtcgaggaaggagcactctggggagtccgcgggtccctgagccggctgaccccctcattgtggagcacgagcatccagggttggggtgggcagcctgctcagctttggggactggggggtgtgaacaggactgaaagactccggggtgtgcagtcctctcagagcagggagatagcaccgcccttccctctcctgctcctggaaaagctcatgtccctggatggcagcattctgctcaaccacacgagcatcctcttcctgtcctcagcctcagcccctccgggaatcccagctgcaaggaggcctctgtttcctgaggggaaaccatgagggaggagggaaatgccttgctttcctggctgtggatcagaggaagcagcgagcctgggacttcccctcccttctggccatgtgtgcatgtgtgtgtgtgagggggactgtgtgtgacaggtgtaagtgtgtgcatacccacacacatatcacagcagaacgcagagaacaccgatggactctgtaaaacagggcgactgtctgcttcttggggtattgcctgggatgatgagggtatcgggtggtggtgattgccccctccttccctgaacataaaatagttgtggctgagagaggggccatggtgacctgaggctgggagtggggaggttaggacggtggcgttgtggtggtggttgggggggtgggtaggggggtgggggttgtggaataaaggccaaaaggtgaattcaaggtcgggcagggagggacagctgcctggcctgtaggcacaggtgggaacactgggatggatcagcagggggtaagtggggccgtcctggccagaaccatggctcccctcaggaaggaggtggagggaagagagaggggcagtagaggcccaggagtctcccttccagcagagaggcctcttgtgcactctgtgctcgcctgggggccttttctggcactctgggcacacctggagctcctggggactgggaccacaggcagggtgactctccactgccccgagcctcctgcccctcaccaggccctgttagcatcacctcgggcacctggccacagcaggggccagtcagggcaccccgggatagcacgcccaggccctgtgcaaggcctctggcacttaggagaggcttttgcccctttgtcctctgagcagaagggttggcaaagagggaaggggacaggccagttctgcacctggcctttctccagaatgaaggcctccacctcccgtccgtccccacagaaagaaaagtaaactgttttcgcggctgcgcagaaagaagaacaggtaccggcagtgagtgctgcggaggggcgcagaggcccgcgccctggctggccctgtgcatgcgccttgcgccctgctcccaggtgccactaacccgtaatctggctctgtgtgcagtgctgcccggcagggctgtcgtgtgcgtgttgggtgggaaggcggaggcggcgcggggcgggctggcctctgagcatctggctgcatttagcacgttcctctgggcgccccacacttgtctagccctggtggtgcccgggccaccagcgcacttagcaatggaggacgtggctgggaaggaggcctggggagggccagggaggtgacactgcagcactgtggggttttttgttttttaaacaattctatgtgtataccatatacttatacatatattctttaaggagaatacattcccataaaacacaaattccagaaggaaagatggtgtcagcgacatctcttacgctgttccactgtttgccctcaggtgactcggtcactggttcctgctggatgcttctagatctgcactgtccagcacaggagccagttaccccatggggctattgagcacttgaaactggccagtgtgaccgggcagcggaacttttcatttgaattacacgtaaatttcattgctttgagtttgcattgccgcctgtggctagtggcaaccgtactgggcagcacttttctaggcgtctctgtgcaggttctggtagagaattttctccctgcaccttcgcccctgtgcctggggtgcacagcatcacaccacctccgccttgggttctggcactgaacgccatggctcaggacctgtcccctccatcgccagctgcccactcctctgtgatgaggacgcctctcttagtttgtccaggccctgcttgtggcctccagcagccgagaggacaggagagccaaggtctagagacatgtaccagggtgctgtgatggacaggcagggagggcagcaggctggggagcagaccccagaacagaggggctgctgcgtgtggtgtgggagactcactgtgcctctaggatgtctggctttctcctgctgtggatcttgggctgtcagcatgggccctggtggaccccatggagcctgtggggtggttggtctggtctctgcgacagatggttccaagggacctgcctgcactcctggggaccatagacctccagcctggagtcccaccttgtgctgttcctgtttctgaggcaggcttcccacttccagccccccaagcccaggtcccttggctccccccaccctcctgctctctctcacatacacacacacacacacacacacagtttcacacctccatatgcacacacctcttcacacagacgtcaatacatttgcccctccgtctcctgtgccttggccccccaacactgggctccctttcttgtcctcccccacagtgacaacgcgcctgcaaaagggaacaagagcccttcgcctccagatggctcccctgccgccacccccgagatcagagtcaaccacgagccagagccggccggcggggccacgcccggggccaccctccccaagtccccatctcaggtaggagtgatgtcttggtagcaggtcccctgccctccctccttctcctccggctttgctgttgtcctccatcctcccactcctctgtcccctttctggcctgggcagctatggacccgatgctttgcccagtgggggttgggcctggacctgggtctcctttcccccatccagcctggcatgcttccgggaggcatctgtgacttgctcgctcctccccagcccccacccccactgcagcgccctccccttccctctccctggtcttttgtctgcttgactctttctccatcttcttttcctccctagcagaggctctgggccctcagcccacagagcatccagatctccagagtgggctgcctgtccctcttcctggcctctctctcttaaaggggcctgagggaggagcccaagccaggtggccatgcaggacctttaaagggacagagagaggaagggctcagaggagggtgtggggtggctaagggggcaggtcctgggcttctggactgtccttgtctccaccccgcctgcccccagcgggccctccaggtgtctgcagggccctaggtgctggctggccaggtgggggtgttctcatagccggggatcctgcagctccccgttttctgctgccgccctgctctgctgctgactaggatagcagggctaaggacatggtgggagcctgtcccaaacagcacttcccccggcctggacatggtgccagtgccttctgtgtattcgttcactgagtccccacaacacccctgtgaagcaggcgctgtcatcacctgatgcatgaggaagcccagcgtcatgggtgtgtgacctgcctgaggtcccccacctggtgggcaggggtgtggcctctgccccatcctggtgccacgctggcttcctctgggatacactcgtctgagctgggctccctgtgggcagccctgtgccctgggaggtggagagaggggcctgcgggaagggagaggtgggcagggggaggctggggcccggctgtctctcaacgactgtttgcttccccagtcttctcaccaggccagtgggagccagcccctcccacagttggccagtgggcagcctggggcctcttctcttcttcgctctccttcctcctctcccctcacttctctatctcttctctctccacacagcgtttctggaccgcctgcctcagtgtccctctcgggggtggcctggggtcttggtgtctatgttggggggctgggagggcagtgactcttcatttgctgcgtcctgctcagtggcctgggtgggactgtggcctgaggtgtgactaaccgtggctttgtctctgtctgtctcccccaaaccccgtgctctgctgtgccttcccgcgcggcccctcacccgccgccgacccacagctccggaaaggcccaccagtccctccgcctcccaaacacaccccgtccaaggaagtcaagcaggagcagatcctcagcctgtttgaggacacgtttgtccctgagatcagcgtgaccaccccctcccaggtcagccgcggccgccgcggcccagctctcctctcttcctgccctctcagggcgtgcatggccttcatcctctatgcttctgtctcaagagccaggaatctggccagagagagtgtcagtttccctctctcaccctttgttccctccatccatcatcctccatcatcctccatcacccatctctgagcatgtactaaggccagatgcagggccacagaggggaaggtgccgcctctcccggcgcagcagttacatcagcagcgccctcgcgacgcagtgggtgctatggcagaggggatcggggagtgtggaggacgtgtggctgtcagggaaggcttccagggccagggagagttggaaggtcctggaatggctgaagcacctggacttcagctcccacagctgctgtcagcccctcgagggcgggggcagcggccaggctgcagggcagaactgccgtgtgcacactccctaagaggcgtggaatgcccagatacagcagggagccacccaggggggcttgggtctctcccgacgggcccttggctcagcaaggagccacgcagagggtcttgggtctctcccagtgggctcttggctcagccgtggaggtgcctctggggagcctggcccacagccccaggtcttacgtccttcatggtggaggtcgggctggagtacctgtgctggaagcgcatcttgccagtgctggagtgggctgacgtgttgtcagatttgcccagaggtggccggccttccccgcactccccgagagctgactgcctcctcaagtccagccctcaaggcctcagccttcctcctgtgggtaggccaggacccttcccacacagagcctcgcctgtagggaaggctgtccagtccaggctgtggtggcctccagcaaacaccttcacacagctcagacgcctagtggggataggttggagggtgtgagtgtggggagtggccgctgggaactgcgaacagtggtcgctgctaggaagggttggggatggtgggcctcaagcccctatgcaaagactaggactagaactaaggaactgaggctgcaggtgtctgggtgggtgacgccctagttcaggggcctggcaggcgcgggagcccctctctgtgggatagtggcagagggcgatgtaggaagagcagtgtgggggcagggctgaggacctccagggctgcttgctgctggcctccccggctcgagcatgcctccgccctggtgatgcccagtgtgtgtgcaggcgagggagacgggatggcatggacactggcaaatactgagcagagaacggtgccagccacttcctataccccattgtttggttttcaatcaccctctgggaggacatcatgcccccatttaacaggtgaggaaaggaacccagggcctgtgccgcgggcccacgccagagcaaggtgtgccaggccaggaggtggtgcagagaccacccgcacccaggctctgagcgcgcctatccctccataccatacctgcctccctggccaccgcgtgtgccatctccaggcaactggtcttcccggtctggtctggggtcggggagccatgacctttgggtggggcatggggcaggggtgggcttgcctttgtccatgacacgggtgcccacgggcttcccggctgtggggtggtgagtagcctgtgtccctgcatggagggacagtcccgggcctgcatggcgaggtgccacctgccggggcagcacagcgaagggatggtcagctctctggcggatgaccctcccctcagcacatgacggatattgctgcctgggttggctgacttttctgagacaggagggaggggtgttgctggggcagggtgggggccactggggagagatgctggccgcccgctggtgggaggcacctcgaggctgtgcaccggcgtcctcagggctccttcagagacggccggttatggggcagagcagtgacctccctgccctgggttccccagacagggctggacctaaaggaaagtcagctgctgggattggcccagggcagggcttggggcctagggcccctggttctaggaagtgagtccacttggcctgagctgtctgacaccttggcttggccatgtggactgctccacgccttgtcccctgagctgcaggacagctgggtcctcttaggactgaggaccttgggtctctcccaatgggccctcggctcagctatggaggtgcctctggggagcccggcccacagccccaggtctcacatccttcatggtggaggccgggtgggagggcgcccctgtcagtgtccggtgcctgtcaagagtgtgtagagccgggaagccgctggcctgggctgcggggctggagttcttccagcactgcctgagggccccggaggggagcaccccggccacgtccctctccttttaaacctgggcaaagttctctctggcccccaaagggaagccccaggtacaagatggagaccgcagccgagccagtccctgctcctcagaaggcagcttgtgccctgggcatggatgctgccccagggctcaccggagtcattgtctccgcctgtgccgggggctctaaggaagccccttcctcccatgctagtctggcccagcttatggggaggcttgtccctgtgtggccagggccaccgtgtcccatccctggggccatgcctgtcacatgcctattcctgggctcactggaaggagatcttggcgaggggctgctgggaggggtcaggggcctgcagttttaacccaagtgccccgggtggttctgaagcccccgaatgttgaagaccccactttgaagcttggcctgttgggctttgtggctggctccactctttctccgtccctggagctgacggctggtggtgtcgccagagagtgacctccctgtctggggtggaggaaaagccagtgtgaagtctctgcctttggaactttcccagtcgggagcactgagggtggctgtggcatggtgttactctcgccactggggggtagcaagatcagcagaactcttggcgcagggagcggagaggaggttcgggcattggtggggaggggcccaccagtctgtggatggtggcggaagagagctggggcctggtgctggccctgcggggtggcggccacgggcggacctatgactgggagtttgaggcgggcactggggtcgtcctcctggtgtgggcgggagcctgtgccggggcgcgtggctttgggcagtgctcccgtgtgtgaggtggatgagttggtgcctgggctgtgtgccagcgtgtgtgcgtgtatgtgcgcttgctctgcatgcgtggtgtgtgtatgtgtgtgtgtccacgcgtgtgcctgtgcctgcagtgtctgcctggggtgagggctcccagcttaacactaactgcttcctcctctgctgctgctgctgctgccaagtttgaggccccggggcctttctcggagcaggccagtctgctggacctggactttgaccccctcccgcccgtgacgagccctgtgaaggcacccacgccctctggtcaggttggttgtgcccaccactgcccatgggcccaccagcttccaggtgcccaaccctgggctcatgttgcctattggccacgtgaccccagctaggcctgggtcactgcccttcccctggcacctcagccttcagccctcatcacctcctggttgtagggcaggaagcagcccctgatcagctgggagaactctcagtagggggttactgaacacttcctggcaactttgtgctcatcgcttggggcagaagcatcctggcttggggtcttgaagctccctgagaggtgtcgggagctcggccacctgcaaatcttggagtctacctggctccgagccactcctgtgcctgctgggctggatggcctggggcgagcgggggtagggtccctggggactgcttgccgccctgtctctaacctctgtgctaactgtccttctcgccctcactgctgcgctcagtcaattccatgggacctctgggaggtaagctgcacgtctgctctttgtccagcccctgggggagccactcttccgtatgtgtccaggcccacatgctcctagcctgttcacaggtgcatgcaccccacacaccccccacacgcaggacacacaggcacgtgctcacgcacagggagctggtgaagccacccgcctccagccattctgctgcttctccctctggcaggcccttggaaaaggggatcttcggtttagcttgagacaggggtcccctgagatctggtcctgttttcacagcctgtgagtgtttgcctccagacagaagtgggccggtcacccaggatggacgagtgtcctcagggtgtggggcaggagggcctcagggtagaaggttcttgccttctctgagctttttggcagtggggagctgtttgcgaggaaggggagaggggaggaatggatggtttgagagagtcagggaagacagggtgtggctgagtgccttctgagagcagggcctgcaggcaggtgcaaggccatctcacacagcaccatgtcactgtcacctgatagctcaggacacagaggctcagggaaggctcagtacttgcccaagaactggtcatggtagagccagaattccaacagggtctcctgggctctgtccctgagaccccctgatacaggcagagatgctgggaggggcaggcgggtgtgcaggcgcccttggggcatgcgctggcagcccaggctcctgggagctctggaggctccaccgcaggatttccctctggaggaagccagaaagagccagcctggtgcgagctggtagggccattttgacaagtggatttcggtaggtgctgagcttgggcagcacagtcacacctgcctgtccctttgacagtggtaggagagaggatgtgggaggcgggtggctggccgggctccgctggtacccaccctgcccccaccaaccccagccgctggtgacattttctcttgtcttgtgatcctgcccattgcctttccaccccggcctccccgccccctccctgttctctcctcgtggcctgttaccagcccacagagagtccagccggcagcctgccttccggggagcccagcgctgccgagggcacctttgctgtgtcctggcccagccagacggccgagccggggcctgcccaagtaagtgcccacctccagcccctgtctggcttgtccccagtctctaggggtgcagcatggaaggagagccccgaggaggggttgcaggagggaccaggccaccatggatgtgagggtgaggacagggtcctgagctaggctgccccagcacgggcttgtcaccaaggctgccagggatgagtgagcgcagctgggcgcatcagcccctcctgcttgcccaccccagcccagcctcccagcgcaggaggagcatttagagcacctactggtttatgccaggcactttccagaatcttctcatttaatcttcgtcatcacctttacagccagacacttcctccttttacagatgaggagatgggggctaggagggttgagtaacttggttccagcactcagaagtggccaagtctgagtgtcggcccaggtcagcccagctctggggttcctgcagggcctgccgtggtgcccgtgctgcggtgcccgtgctgcggtgcccattctgtgccacacccttcttggatttgggctgcgcacaggctgcaccgcaccacctgcgctgggttgtgctcaggctgggacagatgtgtgttgctgtcccctgccatggactatctataggtgcagcaagatcctgccacctgccgggtcaagcagggtgggcgggtggtggctgtggctgggcgaggtcttggtgccgagagagcagggcctgtgaggcggggttgggggtggcactctggggcttgcactgggcttcttcacagcattgtcactcacatccctgggcctgccagcgcctactcttcagctgcttccccggcccagggcccagcttgtccagcagaggctccctggattcttcgaggcactgggcagctctagaccctgctgccagccaggcgatgcccccggccctgtcgcttgggtgctgccctcctgtggcctgtttcctgtgtcctggctgtgtcctgtcctgtgtctgaccccaagccggcatttatgttgcagccagcagaggcctcggaggtggcgggtgggacccaacctgcggctggagcccaggagccaggggagacggcggcaagtgaagcagcctccgtaagacagcagggacaaagccctgccttttcctccctgccgcccgcctgcctgtccggggctcccctgtggcccctgctggtgctggtccaggcctggctcctgttgaggaagctggaggcgggccggtctggcaccaggcgcagacacctttctcccctccccgcccctcttctcctcggtggccctggctgtccttggaccacctccctgctcagctgacccgtacctctgccaccagagctctcttcctgctgtcgtggtggagaccttcccagcaactgtgaatggcaccgtggagggcggcagtggggccgggcgcttggacctgcccccaggtttcatgttcaaggtgagcccacagcctctgactgctgcagtccctcggtgccctggtgggcagatgagaaccctgagcctcaggagactctgtggtttgcccaaagttgtgcaggcgctactaggtcactcccagccagcaaggtggcatctgagccccatactgtcctgctgcttttgagcactcctggtctccatactgccacctgcacctcccacacgcaaggcccgtgctctgtgcagggctggaggtgggacggaaggtctgacttgcgatccgcatcctctgcaggtacaggcccagcacgactacacggccactgacacagacgagctgcagctcaaggctggtgatgtggtgctggtgatccccttccagaaccctgaagagcaggtgagggctgggtggggccgccagagcgcagggggaccacaggcatcctggctgcggctggcaccgccgtggcggagacaggccagcagggggcagcagaggcccgcgagcaccagggctcccgcgccaactgctcctccccgccctccacgtcgggctttttcctctctccctctcctctcccttcccttggcccctctcctgttaggcctctctctctccctgtccccatacccgcttcttcctgtagcctctgctttcttctccccacgtcccccctttgctcaggcgctctcagctctgcctctgtctctccccttctcctctcctggcagctgtgcctgaggcctgcctccctcctgggacaggatgcttgacccctcctgccccgcccacaaggtgcccaccctgcagccagccggagcactggttgggctcatgaagccccgtgtgccgtccctcgaggcgggccctgccctgtgcacgcagggccatgggcttcccagctgtgtccccggctgaggctcacccacgatgccttccagacccttctcctcctgctgtggcttcatgttaatctcctggaagtgagggctcctgttgagcctgggtgggtgctaagtgtgtccctcctaggtctgggaccctcctggatctgggtcagttgcccctcccagggggccttggactcttggcaggagcctccccgctgtgtagagccagctttgcttgtggggggtcggtggtgccatgtgggcatctggcttcctccacggctcagcccctgagcacctcgggctgtgcacagagggcctggccggcttcttcctgcttccagagaacatgtttagccatcaacgcttctgtgtgaataggttatcagagcggctgagggtgacagtgggtctgcctgggtcttggatgaggccgaccctactgggggtcctgggctgggatgtaggggtaccaggtacttattgaggtccggggcaggaggcctgagtgatgaggaccttgtgggcctggcactgatttggccctttctcctaagcccccaggtcttcatggacctcctagtgggccagccctggctgggtaggatttcaagcagactgctacccagagcccacagtgagaattggcctggggctgctggagggggctcagatagggcatgagtagggtctgtgaccaggctgacaatgacacagagggaaataacaaagacccaggtaggccccaggcacagcccagctgcaggggcagcctcggcccagccactggcaggagtggatggccatacggctccccgtgacccacctggggccaggggcctgtcagcactcccagagaaggccctgcgggtgtcaggattgaagcaaagggcaagtcgaagttggagggactggtgggatggccccaagtccctctagaacttgtaacttgttgtcactcccaaaactttctggggttgtttgagaagcctggaatcctggaagggctgatgtgcacatcatgcatgcagtgggactcatcaaaaccagccacgaatggttagatccacctgcggacgacaggctggctcctgtggtgcctctgggcaggagcctcagccagcagcatcagggagtgctgcctggaggaggtgttctcaaggtgggcttggcaggctgaggcaccaacagcaggaggaggggccgtcttcccagcaggttggagtgggatgcgtgccctgtggggtggagccccttgctcatccctgtgcgacctggtgctctgcccctcaggatgaaggctggctcatgggcgtgaaggagagcgactggaaccagcacaaggagctggagaagtgccgtggcgtcttccccgagaacttcactgagagggtcccatgacggcggggcccaggcagcctccgggcgtgtgaagaacacctcctcccgaaaaatgtgtggttcttttttttgttttgttttcgtttttcatcttttgaagagcaaagggaaatcaagaggagacccccaggcagaggggcgttctcccaaagattaggtcgttttccaaagagccgcgtcccggcaagtccggcggaattcaccagtgttcctgaagctgctgtgtcctctagttgagtttctggcgcccctgcctgtgcccgcatgtgtgcctggccgcagggcggggctgggggctgccgagccaccatgcttgcctgaagcttcggccgcgccacccgggcaagggtcctcttttcctggcagctgctgtgggtggggcccagacaccagcctagcctggctctgccccgcagacggtctgtgtgctgtttgaaaataaatcttagtgttcaaaacaaaatgaaacaaaaaaaaaatgataaaaactctcagaaaac

SEQ ID NO: 116 - DNA, 2051 bp, Homo sapiens
ggcggtgcagctggagcgtcaggggagtcccgctcgccgcagccccagcgccgcgcgcgcccctccctcctcgcggacctggcggtgccggcgcccggagtggccctttaaaaggcagcttattgtccggagggggcgggcggggggcgccgaccgcggcctgaggcccggcccctcccctctccctccctctgtccccgcgtcgctcgctggctagctcgctggctcgctcgcccgtccggcgcacgctccgcctccgtcagttggctccgctgtcgggtgcgcggcgtggagcggcagccggtctggacgcgcggccggggctgggggctgggagcgcggcgcgcaagatctccccgcgcgagagcggcccctgccaccgggcgaggcctgcgccgcgatggcagagatgggcagtaaaggggtgacggcgggaaagatcgccagcaacgtgcagaagaagctcacccgcgcgcaggagaaggttctccagaagctggggaaggcagatgagaccaaggatgagcagtttgagcagtgcgtccagaatttcaacaagcagctgacggagggcacccggctgcagaaggatctccggacctacctggcctccgtcaaagccatgcacgaggcttccaagaagctgaatgagtgtctgcaggaggtgtatgagcccgattggcccggcagggatgaggcaaacaagatcgcagagaacaacgacctgctgtggatggattaccaccagaagctggtggaccaggcgctgctgaccatggacacgtacctgggccagttccccgacatcaagtcacgcattgccaagcgggggcgcaagctggtggactacgacagtgcccggcaccactacgagtcccttcaaactgccaaaaagaaggatgaagccaaaattgccaaggccgaggaggagctcatcaaagcccagaaggtgtttgaggagatgaatgtggatctgcaggaggagctgccgtccctgtggaacagccgcgtaggtttctacgtcaacacgttccagagcatcgcgggcctggaggaaaacttccacaaggagatgagcaagctcaaccagaacctcaatgatgtgctggtcggcctggagaagcaacacgggagcaacaccttcacggtcaaggcccagcccagtgacaacgcgcctgcaaaagggaacaagagcccttcgcctccagatggctcccctgccgccacccccgagatcagagtcaaccacgagccagagccggccggcggggccacgcccggggccaccctccccaagtccccatctcagagctctcttcctgctgtcgtggtggagaccttcccagcaactgtgaatggcaccgtggagggcggcagtggggccgggcgcttggacctgcccccaggtttcatgttcaaggtacaggcccagcacgactacacggccactgacacagacgagctgcagctcaaggctggtgatgtggtgctggtgatccccttccagaaccctgaagagcaggatgaaggctggctcatgggcgtgaaggagagcgactggaaccagcacaaggagctggagaagtgccgtggcgtcttccccgagaacttcactgagagggtcccatgacggcggggcccaggcagcctccgggcgtgtgaagaacacctcctcccgaaaaatgtgtggttcttttttttgttttgttttcgtttttcatcttttgaagagcaaagggaaatcaagaggagacccccaggcagaggggcgttctcccaaagattaggtcgttttccaaagagccgcgtcccggcaagtccggcggaattcaccagtgttcctgaagctgctgtgtcctctagttgagttttgggggctgccgagccaccatgcttgcctgaagcttcggccgcgccacccgggcaagggtcctcttttcctggcagctgctgtgggtggggcccagacaccagcctagcctggctctgccccgcagacggtctgtgtgctgtttgaaaataaatcttagtgttcaaaacaaaatgaaaca

SEQ ID NO: 117 - protein, 407 aa, Homo sapiens
MAEMGSKGVTAGKINVQKKLTRAQEKVLQKLGKADETKDEQFEQCVQNFNKQLTEGTRLQKDLRTYLASVKAMHEASKKLNECLQEVYEPDWPGRDEANKIAENNDLLWMDYHQKLVDQALLTMDTYLGQFPDIKSRIAKRGRKLVDYDSARHHYESLQTAKKKDEAKIAKAEEELIKAQKVFEEMNVDLQEELPSLWNSRVGFYVNTFQSIAGLEENFHKEMSKLNQNLNDVLVGLEKQHGSNTFTVKAQPSDNAPAKGNKSPSPPDGSPAATPEIRVNHEPEPAGGATPGATLPKSPSQSSLPAVVVETFPATVNGTVEGGSGAGRLDLPPGFMFKVQAQHDYTATDTDELQLKAGDVVLVIPFQNPEEQDEGWLMGVKESDWNQHKELEKCRGVFPENFTERVP

SEQ ID NO: 118 - DNA, 2096 bp, Homo sapiens
ggcggtgcagctggagcgtcaggggagtcccgctcgccgcagccccagcgccgcgcgcgcccctccctcctcgcggacctggcggtgccggcgcccggagtggccctttaaaaggcagcttattgtccggagggggcgggcggggggcgccgaccgcggcctgaggcccggcccctcccctctccctccctctgtccccgcgtcgctcgctggctagctcgctggctcgctcgcccgtccggcgcacgctccgcctccgtcagttggctccgctgtcgggtgcgcggcgtggagcggcagccggtctggacgcgcggccggggctgggggctgggagcgcggcgcgcaagatctccccgcgcgagagcggcccctgccaccgggcgaggcctgcgccgcgatggcagagatgggcagtaaaggggtgacggcgggaaagatcgccagcaacgtgcagaagaagctcacccgcgcgcaggagaaggttctccagaagctggggaaggcagatgagaccaaggatgagcagtttgagcagtgcgtccagaatttcaacaagcagctgacggagggcacccggctgcagaaggatctccggacctacctggcctccgtcaaagccatgcacgaggcttccaagaagctgaatgagtgtctgcaggaggtgtatgagcccgattggcccggcagggatgaggcaaacaagatcgcagagaacaacgacctgctgtggatggattaccaccagaagctggtggaccaggcgctgctgaccatggacacgtacctgggccagttccccgacatcaagtcacgcattgccaagcgggggcgcaagctggtggactacgacagtgcccggcaccactacgagtcccttcaaactgccaaaaagaaggatgaagccaaaattgccaaggccgaggaggagctcatcaaagcccagaaggtgtttgaggagatgaatgtggatctgcaggaggagctgccgtccctgtggaacagccgcgtaggtttctacgtcaacacgttccagagcatcgcgggcctggaggaaaacttccacaaggagatgagcaagctcaaccagaacctcaatgatgtgctggtcggcctggagaagcaacacgggagcaacaccttcacggtcaaggcccagcccagaaagaaaagtaaactgttttcgcggctgcgcagaaagaagaacagtgacaacgcgcctgcaaaagggaacaagagcccttcgcctccagatggctcccctgccgccacccccgagatcagagtcaaccacgagccagagccggccggcggggccacgcccggggccaccctccccaagtccccatctcagagctctcttcctgctgtcgtggtggagaccttcccagcaactgtgaatggcaccgtggagggcggcagtggggccgggcgcttggacctgcccccaggtttcatgttcaaggtacaggcccagcacgactacacggccactgacacagacgagctgcagctcaaggctggtgatgtggtgctggtgatccccttccagaaccctgaagagcaggatgaaggctggctcatgggcgtgaaggagagcgactggaaccagcacaaggagctggagaagtgccgtggcgtcttccccgagaacttcactgagagggtcccatgacggcggggcccaggcagcctccgggcgtgtgaagaacacctcctcccgaaaaatgtgtggttcttttttttgttttgttttcgtttttcatcttttgaagagcaaagggaaatcaagaggagacccccaggcagaggggcgttctcccaaagattaggtcgttttccaaagagccgcgtcccggcaagtccggcggaattcaccagtgttcctgaagctgctgtgtcctctagttgagttttgggggctgccgagccaccatgcttgcctgaagcttcggccgcgccacccgggcaagggtcctcttttcctggcagctgctgtgggtggggcccagacaccagcctagcctggctctgccccgcagacggtctgtgtgctgtttgaaaataaatcttagtgttcaaaacaaaatgaaaca

SEQ ID NO: 119 - protein, 422 aa, Homo sapiens
MAEMGSKGVTAGKINVQKKLTRAQEKVLQKLGKADETKDEQFEQCVQNFNKQLTEGTRLQKDLRTYLASVKAMHEASKKLNECLQEVYEPDWPGRDEANKIAENNDLLWMDYHQKLVDQALLTMDTYLGQFPDIKSRIAKRGRKLVDYDSARHHYESLQTAKKKDEAKIAKAEEELIKAQKVFEEMNVDLQEELPSLWNSRVGFYVNTFQSIAGLEENFHKEMSKLNQNLNDVLVGLEKQHGSNTFTVKAQPRKKSKLFSRLRRKKNSDNAPAKGNKSPSPPDGSPAATPEIRVNHEPEPAGGATPGATLPKSPSQSSLPAVVVETFPATVNGTVEGGSGAGRLDLPPGFMFKVQAQHDYTATDTDELQLKAGDVVLVIPFQNPEEQDEGWLMGVKESDWNQHKELEKCRGVFPENFTERVP

SEQ ID NO: 120 - DNA, 2186 bp, Homo sapiens
ggcggtgcagctggagcgtcaggggagtcccgctcgccgcagccccagcgccgcgcgcgcccctccctcctcgcggacctggcggtgccggcgcccggagtggccctttaaaaggcagcttattgtccggagggggcgggcggggggcgccgaccgcggcctgaggcccggcccctcccctctccctccctctgtccccgcgtcgctcgctggctagctcgctggctcgctcgcccgtccggcgcacgctccgcctccgtcagttggctccgctgtcgggtgcgcggcgtggagcggcagccggtctggacgcgcggccggggctgggggctgggagcgcggcgcgcaagatctccccgcgcgagagcggcccctgccaccgggcgaggcctgcgccgcgatggcagagatgggcagtaaaggggtgacggcgggaaagatcgccagcaacgtgcagaagaagctcacccgcgcgcaggagaaggttctccagaagctggggaaggcagatgagaccaaggatgagcagtttgagcagtgcgtccagaatttcaacaagcagctgacggagggcacccggctgcagaaggatctccggacctacctggcctccgtcaaagccatgcacgaggcttccaagaagctgaatgagtgtctgcaggaggtgtatgagcccgattggcccggcagggatgaggcaaacaagatcgcagagaacaacgacctgctgtggatggattaccaccagaagctggtggaccaggcgctgctgaccatggacacgtacctgggccagttccccgacatcaagtcacgcattgccaagcgggggcgcaagctggtggactacgacagtgcccggcaccactacgagtcccttcaaactgccaaaaagaaggatgaagccaaaattgccaaggccgaggaggagctcatcaaagcccagaaggtgtttgaggagatgaatgtggatctgcaggaggagctgccgtccctgtggaacagccgcgtaggtttctacgtcaacacgttccagagcatcgcgggcctggaggaaaacttccacaaggagatgagcaagctcaaccagaacctcaatgatgtgctggtcggcctggagaagcaacacgggagcaacaccttcacggtcaaggcccagcccagaaagaaaagtaaactgttttcgcggctgcgcagaaagaagaacagtgacaacgcgcctgcaaaagggaacaagagcccttcgcctccagatggctcccctgccgccacccccgagatcagagtcaaccacgagccagagccggccggcggggccacgcccggggccaccctccccaagtccccatctcagccagcagaggcctcggaggtggcgggtgggacccaacctgcggctggagcccaggagccaggggagacggcggcaagtgaagcagcctccagctctcttcctgctgtcgtggtggagaccttcccagcaactgtgaatggcaccgtggagggcggcagtggggccgggcgcttggacctgcccccaggtttcatgttcaaggtacaggcccagcacgactacacggccactgacacagacgagctgcagctcaaggctggtgatgtggtgctggtgatccccttccagaaccctgaagagcaggatgaaggctggctcatgggcgtgaaggagagcgactggaaccagcacaaggagctggagaagtgccgtggcgtcttccccgagaacttcactgagagggtcccatgacggcggggcccaggcagcctccgggcgtgtgaagaacacctcctcccgaaaaatgtgtggttcttttttttgttttgttttcgtttttcatcttttgaagagcaaagggaaatcaagaggagacccccaggcagaggggcgttctcccaaagattaggtcgttttccaaagagccgcgtcccggcaagtccggcggaattcaccagtgttcctgaagctgctgtgtcctctagttgagttttgggggctgccgagccaccatgcttgcctgaagcttcggccgcgccacccgggcaagggtcctcttttcctggcagctgctgtgggtggggcccagacaccagcctagcctggctctgccccgcagacggtctgtgtgctgtttgaaaataaatcttagtgttcaaaacaaaatgaaaca

SEQ ID NO: 121 - protein, 452 aa, Homo sapiens
MAEMGSKGVTAGKINVQKKLTRAQEKVLQKLGKADETKDEQFEQCVQNFNKQLTEGTRLQKDLRTYLASVKAMHEASKKLNECLQEVYEPDWPGRDEANKIAENNDLLWMDYHQKLVDQALLTMDTYLGQFPDIKSRIAKRGRKLVDYDSARHHYESLQTAKKKDEAKIAKAEEELIKAQKVFEEMNVDLQEELPSLWNSRVGFYVNTFQSIAGLEENFHKEMSKLNQNLNDVLVGLEKQHGSNTFTVKAQPRKKSKLFSRLRRKKNSDNAPAKGNKSPSPPDGSPAATPEIRVNHEPEPAGGATPGATLPKSPSQPAEASEVAGGTQPAAGAQEPGETAASEAASSSLPAVVVETFPATVNGTVEGGSGAGRLDLPPGFMFKVQAQHDYTATDTDELQLKAGDVVLVIPFQNPEEQDEGWLMGVKESDWNQHKELEKCRGVFPENFTERVP

SEQ ID NO: 122 - DNA, 2141 bp, Homo sapiens
ggcggtgcagctggagcgtcaggggagtcccgctcgccgcagccccagcgccgcgcgcgcccctccctcctcgcggacctggcggtgccggcgcccggagtggccctttaaaaggcagcttattgtccggagggggcgggcggggggcgccgaccgcggcctgaggcccggcccctcccctctccctccctctgtccccgcgtcgctcgctggctagctcgctggctcgctcgcccgtccggcgcacgctccgcctccgtcagttggctccgctgtcgggtgcgcggcgtggagcggcagccggtctggacgcgcggccggggctgggggctgggagcgcggcgcgcaagatctccccgcgcgagagcggcccctgccaccgggcgaggcctgcgccgcgatggcagagatgggcagtaaaggggtgacggcgggaaagatcgccagcaacgtgcagaagaagctcacccgcgcgcaggagaaggttctccagaagctggggaaggcagatgagaccaaggatgagcagtttgagcagtgcgtccagaatttcaacaagcagctgacggagggcacccggctgcagaaggatctccggacctacctggcctccgtcaaagccatgcacgaggcttccaagaagctgaatgagtgtctgcaggaggtgtatgagcccgattggcccggcagggatgaggcaaacaagatcgcagagaacaacgacctgctgtggatggattaccaccagaagctggtggaccaggcgctgctgaccatggacacgtacctgggccagttccccgacatcaagtcacgcattgccaagcgggggcgcaagctggtggactacgacagtgcccggcaccactacgagtcccttcaaactgccaaaaagaaggatgaagccaaaattgccaaggccgaggaggagctcatcaaagcccagaaggtgtttgaggagatgaatgtggatctgcaggaggagctgccgtccctgtggaacagccgcgtaggtttctacgtcaacacgttccagagcatcgcgggcctggaggaaaacttccacaaggagatgagcaagctcaaccagaacctcaatgatgtgctggtcggcctggagaagcaacacgggagcaacaccttcacggtcaaggcccagcccagtgacaacgcgcctgcaaaagggaacaagagcccttcgcctccagatggctcccctgccgccacccccgagatcagagtcaaccacgagccagagccggccggcggggccacgcccggggccaccctccccaagtccccatctcagccagcagaggcctcggaggtggcgggtgggacccaacctgcggctggagcccaggagccaggggagacggcggcaagtgaagcagcctccagctctcttcctgctgtcgtggtggagaccttcccagcaactgtgaatggcaccgtggagggcggcagtggggccgggcgcttggacctgcccccaggtttcatgttcaaggtacaggcccagcacgactacacggccactgacacagacgagctgcagctcaaggctggtgatgtggtgctggtgatccccttccagaaccctgaagagcaggatgaaggctggctcatgggcgtgaaggagagcgactggaaccagcacaaggagctggagaagtgccgtggcgtcttccccgagaacttcactgagagggtcccatgacggcggggcccaggcagcctccgggcgtgtgaagaacacctcctcccgaaaaatgtgtggttcttttttttgttttgttttcgtttttcatcttttgaagagcaaagggaaatcaagaggagacccccaggcagaggggcgttctcccaaagattaggtcgttttccaaagagccgcgtcccggcaagtccggcggaattcaccagtgttcctgaagctgctgtgtcctctagttgagttttgggggctgccgagccaccatgcttgcctgaagcttcggccgcgccacccgggcaagggtcctcttttcctggcagctgctgtgggtggggcccagacaccagcctagcctggctctgccccgcagacggtctgtgtgctgtttgaaaataaatcttagtgttcaaaacaaaatgaaaca

SEQ ID NO: 123 - protein, 437 aa, Homo sapiens
MAEMGSKGVTAGKINVQKKLTRAQEKVLQKLGKADETKDEQFEQCVQNFNKQLTEGTRLQKDLRTYLASVKAMHEASKKLNECLQEVYEPDWPGRDEANKIAENNDLLWMDYHQKLVDQALLTMDTYLGQFPDIKSRIAKRGRKLVDYDSARHHYESLQTAKKKDEAKIAKAEEELIKAQKVFEEMNVDLQEELPSLWNSRVGFYVNTFQSIAGLEENFHKEMSKLNQNLNDVLVGLEKQHGSNTFTVKAQPSDNAPAKGNKSPSPPDGSPAATPEIRVNHEPEPAGGATPGATLPKSPSQPAEASEVAGGTQPAAGAQEPGETAASEAASSSLPAVVVETFPATVNGTVEGGSGAGRLDLPPGFMFKVQAQHDYTATDTDELQLKAGDVVLVIPFQNPEEQDEGWLMGVKESDWNQHKELEKCRGVFPENFTERVP

SEQ ID NO: 124 - DNA, 2315 bp, Homo sapiens
ggcggtgcagctggagcgtcaggggagtcccgctcgccgcagccccagcgccgcgcgcgcccctccctcctcgcggacctggcggtgccggcgcccggagtggccctttaaaaggcagcttattgtccggagggggcgggcggggggcgccgaccgcggcctgaggcccggcccctcccctctccctccctctgtccccgcgtcgctcgctggctagctcgctggctcgctcgcccgtccggcgcacgctccgcctccgtcagttggctccgctgtcgggtgcgcggcgtggagcggcagccggtctggacgcgcggccggggctgggggctgggagcgcggcgcgcaagatctccccgcgcgagagcggcccctgccaccgggcgaggcctgcgccgcgatggcagagatgggcagtaaaggggtgacggcgggaaagatcgccagcaacgtgcagaagaagctcacccgcgcgcaggagaaggttctccagaagctggggaaggcagatgagaccaaggatgagcagtttgagcagtgcgtccagaatttcaacaagcagctgacggagggcacccggctgcagaaggatctccggacctacctggcctccgtcaaagccatgcacgaggcttccaagaagctgaatgagtgtctgcaggaggtgtatgagcccgattggcccggcagggatgaggcaaacaagatcgcagagaacaacgacctgctgtggatggattaccaccagaagctggtggaccaggcgctgctgaccatggacacgtacctgggccagttccccgacatcaagtcacgcattgccaagcgggggcgcaagctggtggactacgacagtgcccggcaccactacgagtcccttcaaactgccaaaaagaaggatgaagccaaaattgccaaggccgaggaggagctcatcaaagcccagaaggtgtttgaggagatgaatgtggatctgcaggaggagctgccgtccctgtggaacagccgcgtaggtttctacgtcaacacgttccagagcatcgcgggcctggaggaaaacttccacaaggagatgagcaagctcaaccagaacctcaatgatgtgctggtcggcctggagaagcaacacgggagcaacaccttcacggtcaaggcccagcccagaaagaaaagtaaactgttttcgcggctgcgcagaaagaagaacagtgacaacgcgcctgcaaaagggaacaagagcccttcgcctccagatggctcccctgccgccacccccgagatcagagtcaaccacgagccagagccggccggcggggccacgcccggggccaccctccccaagtccccatctcagctccggaaaggcccaccagtccctccgcctcccaaacacaccccgtccaaggaagtcaagcaggagcagatcctcagcctgtttgaggacacgtttgtccctgagatcagcgtgaccaccccctcccagccagcagaggcctcggaggtggcgggtgggacccaacctgcggctggagcccaggagccaggggagacggcggcaagtgaagcagcctccagctctcttcctgctgtcgtggtggagaccttcccagcaactgtgaatggcaccgtggagggcggcagtggggccgggcgcttggacctgcccccaggtttcatgttcaaggtacaggcccagcacgactacacggccactgacacagacgagctgcagctcaaggctggtgatgtggtgctggtgatccccttccagaaccctgaagagcaggatgaaggctggctcatgggcgtgaaggagagcgactggaaccagcacaaggagctggagaagtgccgtggcgtcttccccgagaacttcactgagagggtcccatgacggcggggcccaggcagcctccgggcgtgtgaagaacacctcctcccgaaaaatgtgtggttcttttttttgttttgttttcgtttttcatcttttgaagagcaaagggaaatcaagaggagacccccaggcagaggggcgttctcccaaagattaggtcgttttccaaagagccgcgtcccggcaagtccggcggaattcaccagtgttcctgaagctgctgtgtcctctagttgagttttgggggctgccgagccaccatgcttgcctgaagcttcggccgcgccacccgggcaagggtcctcttttcctggcagctgctgtgggtggggcccagacaccagcctagcctggctctgccccgcagacggtctgtgtgctgtttgaaaataaatcttagtgttcaaaacaaaatgaaaca

SEQ ID NO: 125 - protein, 495 aa, Homo sapiens
MAEMGSKGVTAGKINVQKKLTRAQEKVLQKLGKADETKDEQFEQCVQNFNKQLTEGTRLQKDLRTYLASVKAMHEASKKLNECLQEVYEPDWPGRDEANKIAENNDLLWMDYHQKLVDQALLTMDTYLGQFPDIKSRIAKRGRKLVDYDSARHHYESLQTAKKKDEAKIAKAEEELIKAQKVFEEMNVDLQEELPSLWNSRVGFYVNTFQSIAGLEENFHKEMSKLNQNLNDVLVGLEKQHGSNTFTVKAQPRKKSKLFSRLRRKKNSDNAPAKGNKSPSPPDGSPAATPEIRVNHEPEPAGGATPGATLPKSPSQLRKGPPVPPPPKHTPSKEVKQEQILSLFEDTFVPEISVTTPSQPAEASEVAGGTQPAAGAQEPGETAASEAASSSLPAVVVETFPATVNGTVEGGSGAGRLDLPPGFMFKVQAQHDYTATDTDELQLKAGDVVLVIPFQNPEEQDEGWLMGVKESDWNQHKELEKCRGVFPENFTERVP

SEQ ID NO: 126 - DNA, 2378 bp, Homo sapiens
ggcggtgcagctggagcgtcaggggagtcccgctcgccgcagccccagcgccgcgcgcgcccctccctcctcgcggacctggcggtgccggcgcccggagtggccctttaaaaggcagcttattgtccggagggggcgggcggggggcgccgaccgcggcctgaggcccggcccctcccctctccctccctctgtccccgcgtcgctcgctggctagctcgctggctcgctcgcccgtccggcgcacgctccgcctccgtcagttggctccgctgtcgggtgcgcggcgtggagcggcagccggtctggacgcgcggccggggctgggggctgggagcgcggcgcgcaagatctccccgcgcgagagcggcccctgccaccgggcgaggcctgcgccgcgatggcagagatgggcagtaaaggggtgacggcgggaaagatcgccagcaacgtgcagaagaagctcacccgcgcgcaggagaaggttctccagaagctggggaaggcagatgagaccaaggatgagcagtttgagcagtgcgtccagaatttcaacaagcagctgacggagggcacccggctgcagaaggatctccggacctacctggcctccgtcaaagccatgcacgaggcttccaagaagctgaatgagtgtctgcaggaggtgtatgagcccgattggcccggcagggatgaggcaaacaagatcgcagagaacaacgacctgctgtggatggattaccaccagaagctggtggaccaggcgctgctgaccatggacacgtacctgggccagttccccgacatcaagtcacgcattgccaagcgggggcgcaagctggtggactacgacagtgcccggcaccactacgagtcccttcaaactgccaaaaagaaggatgaagccaaaattgccaaggccgaggaggagctcatcaaagcccagaaggtgtttgaggagatgaatgtggatctgcaggaggagctgccgtccctgtggaacagccgcgtaggtttctacgtcaacacgttccagagcatcgcgggcctggaggaaaacttccacaaggagatgagcaagctcaaccagaacctcaatgatgtgctggtcggcctggagaagcaacacgggagcaacaccttcacggtcaaggcccagcccagtgacaacgcgcctgcaaaagggaacaagagcccttcgcctccagatggctcccctgccgccacccccgagatcagagtcaaccacgagccagagccggccggcggggccacgcccggggccaccctccccaagtccccatctcagctccggaaaggcccaccagtccctccgcctcccaaacacaccccgtccaaggaagtcaagcaggagcagatcctcagcctgtttgaggacacgtttgtccctgagatcagcgtgaccaccccctcccagcccacagagagtccagccggcagcctgccttccggggagcccagcgctgccgagggcacctttgctgtgtcctggcccagccagacggccgagccggggcctgcccaaccagcagaggcctcggaggtggcgggtgggacccaacctgcggctggagcccaggagccaggggagacggcggcaagtgaagcagcctccagctctcttcctgctgtcgtggtggagaccttcccagcaactgtgaatggcaccgtggagggcggcagtggggccgggcgcttggacctgcccccaggtttcatgttcaaggtacaggcccagcacgactacacggccactgacacagacgagctgcagctcaaggctggtgatgtggtgctggtgatccccttccagaaccctgaagagcaggatgaaggctggctcatgggcgtgaaggagagcgactggaaccagcacaaggagctggagaagtgccgtggcgtcttccccgagaacttcactgagagggtcccatgacggcggggcccaggcagcctccgggcgtgtgaagaacacctcctcccgaaaaatgtgtggttcttttttttgttttgttttcgtttttcatcttttgaagagcaaagggaaatcaagaggagacccccaggcagaggggcgttctcccaaagattaggtcgttttccaaagagccgcgtcccggcaagtccggcggaattcaccagtgttcctgaagctgctgtgtcctctagttgagttttgggggctgccgagccaccatgcttgcctgaagcttcggccgcgccacccgggcaagggtcctcttttcctggcagctgctgtgggtggggcccagacaccagcctagcctggctctgccccgcagacggtctgtgtgctgtttgaaaataaatcttagtgttcaaaacaaaatgaaaca

SEQ ID NO: 127 - protein, 516 aa, Homo sapiens
MAEMGSKGVTAGKINVQKKLTRAQEKVLQKLGKADETKDEQFEQCVQNFNKQLTEGTRLQKDLRTYLASVKAMHEASKKLNECLQEVYEPDWPGRDEANKIAENNDLLWMDYHQKLVDQALLTMDTYLGQFPDIKSRIAKRGRKLVDYDSARHHYESLQTAKKKDEAKIAKAEEELIKAQKVFEEMNVDLQEELPSLWNSRVGFYVNTFQSIAGLEENFHKEMSKLNQNLNDVLVGLEKQHGSNTFTVKAQPSDNAPAKGNKSPSPPDGSPAATPEIRVNHEPEPAGGATPGATLPKSPSQLRKGPPVPPPPKHTPSKEVKQEQILSLFEDTFVPEISVTTPSQPTESPAGSLPSGEPSAAEGTFAVSWPSQTAEPGPAQPAEASEVAGGTQPAAGAQEPGETAASEAASSSLPAVVVETFPATVNGTVEGGSGAGRLDLPPGFMFKVQAQHDYTATDTDELQLKAGDVVLVIPFQNPEEQDEGWLMGVKESDWNQHKELEKCRGVFPENFTERVP

SEQ ID NO: 128 - DNA, 2603 bp, Homo sapiens
ggcggtgcagctggagcgtcaggggagtcccgctcgccgcagccccagcgccgcgcgcgcccctccctcctcgcggacctggcggtgccggcgcccggagtggccctttaaaaggcagcttattgtccggagggggcgggcggggggcgccgaccgcggcctgaggcccggcccctcccctctccctccctctgtccccgcgtcgctcgctggctagctcgctggctcgctcgcccgtccggcgcacgctccgcctccgtcagttggctccgctgtcgggtgcgcggcgtggagcggcagccggtctggacgcgcggccggggctgggggctgggagcgcggcgcgcaagatctccccgcgcgagagcggcccctgccaccgggcgaggcctgcgccgcgatggcagagatgggcagtaaaggggtgacggcgggaaagatcgccagcaacgtgcagaagaagctcacccgcgcgcaggagaaggttctccagaagctggggaaggcagatgagaccaaggatgagcagtttgagcagtgcgtccagaatttcaacaagcagctgacggagggcacccggctgcagaaggatctccggacctacctggcctccgtcaaagccatgcacgaggcttccaagaagctgaatgagtgtctgcaggaggtgtatgagcccgattggcccggcagggatgaggcaaacaagatcgcagagaacaacgacctgctgtggatggattaccaccagaagctggtggaccaggcgctgctgaccatggacacgtacctgggccagttccccgacatcaagtcacgcattgccaagcgggggcgcaagctggtggactacgacagtgcccggcaccactacgagtcccttcaaactgccaaaaagaaggatgaagccaaaattgccaagcctgtctcgctgcttgagaaagccgccccccagtggtgccaaggcaaactgcaggctcatctcgtagctcaaactaacctgctccgaaatcaggccgaggaggagctcatcaaagcccagaaggtgtttgaggagatgaatgtggatctgcaggaggagctgccgtccctgtggaacagccgcgtaggtttctacgtcaacacgttccagagcatcgcgggcctggaggaaaacttccacaaggagatgagcaagctcaaccagaacctcaatgatgtgctggtcggcctggagaagcaacacgggagcaacaccttcacggtcaaggcccagcccagtgacaacgcgcctgcaaaagggaacaagagcccttcgcctccagatggctcccctgccgccacccccgagatcagagtcaaccacgagccagagccggccggcggggccacgcccggggccaccctccccaagtccccatctcagctccggaaaggcccaccagtccctccgcctcccaaacacaccccgtccaaggaagtcaagcaggagcagatcctcagcctgtttgaggacacgtttgtccctgagatcagcgtgaccaccccctcccagtttgaggccccggggcctttctcggagcaggccagtctgctggacctggactttgaccccctcccgcccgtgacgagccctgtgaaggcacccacgccctctggtcagtcaattccatgggacctctgggagcccacagagagtccagccggcagcctgccttccggggagcccagcgctgccgagggcacctttgctgtgtcctggcccagccagacggccgagccggggcctgcccaaccagcagaggcctcggaggtggcgggtgggacccaacctgcggctggagcccaggagccaggggagacggcggcaagtgaagcagcctccagctctcttcctgctgtcgtggtggagaccttcccagcaactgtgaatggcaccgtggagggcggcagtggggccgggcgcttggacctgcccccaggtttcatgttcaaggtacaggcccagcacgactacacggccactgacacagacgagctgcagctcaaggctggtgatgtggtgctggtgatccccttccagaaccctgaagagcaggatgaaggctggctcatgggcgtgaaggagagcgactggaaccagcacaaggagctggagaagtgccgtggcgtcttccccgagaacttcactgagagggtcccatgacggcggggcccaggcagcctccgggcgtgtgaagaacacctcctcccgaaaaatgtgtggttcttttttttgttttgttttcgtttttcatcttttgaagagcaaagggaaatcaagaggagacccccaggcagaggggcgttctcccaaagattaggtcgttttccaaagagccgcgtcccggcaagtccggcggaattcaccagtgttcctgaagctgctgtgtcctctagttgagttttgggggctgccgagccaccatgcttgcctgaagcttcggccgcgccacccgggcaagggtcctcttttcctggcagctgctgtgggtggggcccagacaccagcctagcctggctctgccccgcagacggtctgtgtgctgtttgaaaataaatcttagtgttcaaaacaaaatgaaaca

SEQ ID NO: 129 - protein, 591 aa, Homo sapiens
MAEMGSKGVTAGKINVQKKLTRAQEKVLQKLGKADETKDEQFEQCVQNFNKQLTEGTRLQKDLRTYLASVKAMHEASKKLNECLQEVYEPDWPGRDEANKIAENNDLLWMDYHQKLVDQALLTMDTYLGQFPDIKSRIAKRGRKLVDYDSARHHYESLQTAKKKDEAKIAKPVSLLEKAAPQWCQGKLQAHLVAQTNLLRNQAEEELIKAQKVFEEMNVDLQEELPSLWNSRVGFYVNTFQSIAGLEENFHKEMSKLNQNLNDVLVGLEKQHGSNTFTVKAQPSDNAPAKGNKSPSPPDGSPAATPEIRVNHEPEPAGGATPGATLPKSPSQLRKGPPVPPPPKHTPSKEVKQEQILSLFEDTFVPEISVTTPSQFEAPGPFSEQASLLDLDFDPLPPVTSPVKAPTPSGQSIPWDLWEPTESPAGSLPSGEPSAAEGTFAVSWPSQTAEPGPAQPAEASEVAGGTQPAAGAQEPGETAASEAASSSLPAVVVETFPATVNGTVEGGSGAGRLDLPPGFMFKVQAQHDYTATDTDELQLKAGDVVLVIPFQNPEEQDEGWLMGVKESDWNQHKELEKCRGVFPENFTERVP

SEQ ID NO: 130 - DNA, 2342 bp, Homo sapiens
ggcggtgcagctggagcgtcaggggagtcccgctcgccgcagccccagcgccgcgcgcgcccctccctcctcgcggacctggcggtgccggcgcccggagtggccctttaaaaggcagcttattgtccggagggggcgggcggggggcgccgaccgcggcctgaggcccggcccctcccctctccctccctctgtccccgcgtcgctcgctggctagctcgctggctcgctcgcccgtccggcgcacgctccgcctccgtcagttggctccgctgtcgggtgcgcggcgtggagcggcagccggtctggacgcgcggccggggctgggggctgggagcgcggcgcgcaagatctccccgcgcgagagcggcccctgccaccgggcgaggcctgcgccgcgatggcagagatgggcagtaaaggggtgacggcgggaaagatcgccagcaacgtgcagaagaagctcacccgcgcgcaggagaaggttctccagaagctggggaaggcagatgagaccaaggatgagcagtttgagcagtgcgtccagaatttcaacaagcagctgacggagggcacccggctgcagaaggatctccggacctacctggcctccgtcaaagccatgcacgaggcttccaagaagctgaatgagtgtctgcaggaggtgtatgagcccgattggcccggcagggatgaggcaaacaagatcgcagagaacaacgacctgctgtggatggattaccaccagaagctggtggaccaggcgctgctgaccatggacacgtacctgggccagttccccgacatcaagtcacgcattgccaagcgggggcgcaagctggtggactacgacagtgcccggcaccactacgagtcccttcaaactgccaaaaagaaggatgaagccaaaattgccaagcctgtctcgctgcttgagaaagccgccccccagtggtgccaaggcaaactgcaggctcatctcgtagctcaaactaacctgctccgaaatcaggccgaggaggagctcatcaaagcccagaaggtgtttgaggagatgaatgtggatctgcaggaggagctgccgtccctgtggaacagccgcgtaggtttctacgtcaacacgttccagagcatcgcgggcctggaggaaaacttccacaaggagatgagcaagctcaaccagaacctcaatgatgtgctggtcggcctggagaagcaacacgggagcaacaccttcacggtcaaggcccagcccagtgacaacgcgcctgcaaaagggaacaagagcccttcgcctccagatggctcccctgccgccacccccgagatcagagtcaaccacgagccagagccggccggcggggccacgcccggggccaccctccccaagtccccatctcagcccacagagagtccagccggcagcctgccttccggggagcccagcgctgccgagggcacctttgctgtgtcctggcccagccagacggccgagccggggcctgcccaaccagcagaggcctcggaggtggcgggtgggacccaacctgcggctggagcccaggagccaggggagacggcggcaagtgaagcagcctccagctctcttcctgctgtcgtggtggagaccttcccagcaactgtgaatggcaccgtggagggcggcagtggggccgggcgcttggacctgcccccaggtttcatgttcaaggtacaggcccagcacgactacacggccactgacacagacgagctgcagctcaaggctggtgatgtggtgctggtgatccccttccagaaccctgaagagcaggatgaaggctggctcatgggcgtgaaggagagcgactggaaccagcacaaggagctggagaagtgccgtggcgtcttccccgagaacttcactgagagggtcccatgacggcggggcccaggcagcctccgggcgtgtgaagaacacctcctcccgaaaaatgtgtggttcttttttttgttttgttttcgtttttcatcttttgaagagcaaagggaaatcaagaggagacccccaggcagaggggcgttctcccaaagattaggtcgttttccaaagagccgcgtcccggcaagtccggcggaattcaccagtgttcctgaagctgctgtgtcctctagttgagttttgggggctgccgagccaccatgcttgcctgaagcttcggccgcgccacccgggcaagggtcctcttttcctggcagctgctgtgggtggggcccagacaccagcctagcctggctctgccccgcagacggtctgtgtgctgtttgaaaataaatcttagtgttcaaaacaaaatgaaaca

SEQ ID NO: 131 - protein, 504 aa, Homo sapiens
MAEMGSKGVTAGKINVQKKLTRAQEKVLQKLGKADETKDEQFEQCVQNFNKQLTEGTRLQKDLRTYLASVKAMHEASKKLNECLQEVYEPDWPGRDEANKIAENNDLLWMDYHQKLVDQALLTMDTYLGQFPDIKSRIAKRGRKLVDYDSARHHYESLQTAKKKDEAKIAKPVSLLEKAAPQWCQGKLQAHLVAQTNLLRNQAEEELIKAQKVFEEMNVDLQEELPSLWNSRVGFYVNTFQSIAGLEENFHKEMSKLNQNLNDVLVGLEKQHGSNTFTVKAQPSDNAPAKGNKSPSPPDGSPAATPEIRVNHEPEPAGGATPGATLPKSPSQPTESPAGSLPSGEPSAAEGTFAVSWPSQTAEPGPAQPAEASEVAGGTQPAAGAQEPGETAASEAASSSLPAVVVETFPATVNGTVEGGSGAGRLDLPPGFMFKVQAQHDYTATDTDELQLKAGDVVLVIPFQNPEEQDEGWLMGVKESDWNQHKELEKCRGVFPENFTERVP

SEQ ID NO: 132 - DNA, 2474 bp, Homo sapiens
ggcggtgcagctggagcgtcaggggagtcccgctcgccgcagccccagcgccgcgcgcgcccctccctcctcgcggacctggcggtgccggcgcccggagtggccctttaaaaggcagcttattgtccggagggggcgggcggggggcgccgaccgcggcctgaggcccggcccctcccctctccctccctctgtccccgcgtcgctcgctggctagctcgctggctcgctcgcccgtccggcgcacgctccgcctccgtcagttggctccgctgtcgggtgcgcggcgtggagcggcagccggtctggacgcgcggccggggctgggggctgggagcgcggcgcgcaagatctccccgcgcgagagcggcccctgccaccgggcgaggcctgcgccgcgatggcagagatgggcagtaaaggggtgacggcgggaaagatcgccagcaacgtgcagaagaagctcacccgcgcgcaggagaaggttctccagaagctggggaaggcagatgagaccaaggatgagcagtttgagcagtgcgtccagaatttcaacaagcagctgacggagggcacccggctgcagaaggatctccggacctacctggcctccgtcaaagccatgcacgaggcttccaagaagctgaatgagtgtctgcaggaggtgtatgagcccgattggcccggcagggatgaggcaaacaagatcgcagagaacaacgacctgctgtggatggattaccaccagaagctggtggaccaggcgctgctgaccatggacacgtacctgggccagttccccgacatcaagtcacgcattgccaagcgggggcgcaagctggtggactacgacagtgcccggcaccactacgagtcccttcaaactgccaaaaagaaggatgaagccaaaattgccaagcctgtctcgctgcttgagaaagccgccccccagtggtgccaaggcaaactgcaggctcatctcgtagctcaaactaacctgctccgaaatcaggccgaggaggagctcatcaaagcccagaaggtgtttgaggagatgaatgtggatctgcaggaggagctgccgtccctgtggaacagccgcgtaggtttctacgtcaacacgttccagagcatcgcgggcctggaggaaaacttccacaaggagatgagcaagctcaaccagaacctcaatgatgtgctggtcggcctggagaagcaacacgggagcaacaccttcacggtcaaggcccagcccagtgacaacgcgcctgcaaaagggaacaagagcccttcgcctccagatggctcccctgccgccacccccgagatcagagtcaaccacgagccagagccggccggcggggccacgcccggggccaccctccccaagtccccatctcagtttgaggccccggggcctttctcggagcaggccagtctgctggacctggactttgaccccctcccgcccgtgacgagccctgtgaaggcacccacgccctctggtcagtcaattccatgggacctctgggagcccacagagagtccagccggcagcctgccttccggggagcccagcgctgccgagggcacctttgctgtgtcctggcccagccagacggccgagccggggcctgcccaaccagcagaggcctcggaggtggcgggtgggacccaacctgcggctggagcccaggagccaggggagacggcggcaagtgaagcagcctccagctctcttcctgctgtcgtggtggagaccttcccagcaactgtgaatggcaccgtggagggcggcagtggggccgggcgcttggacctgcccccaggtttcatgttcaaggtacaggcccagcacgactacacggccactgacacagacgagctgcagctcaaggctggtgatgtggtgctggtgatccccttccagaaccctgaagagcaggatgaaggctggctcatgggcgtgaaggagagcgactggaaccagcacaaggagctggagaagtgccgtggcgtcttccccgagaacttcactgagagggtcccatgacggcggggcccaggcagcctccgggcgtgtgaagaacacctcctcccgaaaaatgtgtggttcttttttttgttttgttttcgtttttcatcttttgaagagcaaagggaaatcaagaggagacccccaggcagaggggcgttctcccaaagattaggtcgttttccaaagagccgcgtcccggcaagtccggcggaattcaccagtgttcctgaagctgctgtgtcctctagttgagttttgggggctgccgagccaccatgcttgcctgaagcttcggccgcgccacccgggcaagggtcctcttttcctggcagctgctgtgggtggggcccagacaccagcctagcctggctctgccccgcagacggtctgtgtgctgtttgaaaataaatcttagtgttcaaaacaaaatgaaaca

SEQ ID NO: 133 - protein, 548 aa, Homo sapiens
MAEMGSKGVTAGKINVQKKLTRAQEKVLQKLGKADETKDEQFEQCVQNFNKQLTEGTRLQKDLRTYLASVKAMHEASKKLNECLQEVYEPDWPGRDEANKIAENNDLLWMDYHQKLVDQALLTMDTYLGQFPDIKSRIAKRGRKLVDYDSARHHYESLQTAKKKDEAKIAKPVSLLEKAAPQWCQGKLQAHLVAQTNLLRNQAEEELIKAQKVFEEMNVDLQEELPSLWNSRVGFYVNTFQSIAGLEENFHKEMSKLNQNLNDVLVGLEKQHGSNTFTVKAQPSDNAPAKGNKSPSPPDGSPAATPEIRVNHEPEPAGGATPGATLPKSPSQFEAPGPFSEQASLLDLDFDPLPPVTSPVKAPTPSGQSIPWDLWEPTESPAGSLPSGEPSAAEGTFAVSWPSQTAEPGPAQPAEASEVAGGTQPAAGAQEPGETAASEAASSSLPAVVVETFPATVNGTVEGGSGAGRLDLPPGFMFKVQAQHDYTATDTDELQLKAGDVVLVIPFQNPEEQDEGWLMGVKESDWNQHKELEKCRGVFPENFTERVP

SEQ ID NO: 134 - DNA, 2265 bp, Homo sapiens
ggcggtgcagctggagcgtcaggggagtcccgctcgccgcagccccagcgccgcgcgcgcccctccctcctcgcggacctggcggtgccggcgcccggagtggccctttaaaaggcagcttattgtccggagggggcgggcggggggcgccgaccgcggcctgaggcccggcccctcccctctccctccctctgtccccgcgtcgctcgctggctagctcgctggctcgctcgcccgtccggcgcacgctccgcctccgtcagttggctccgctgtcgggtgcgcggcgtggagcggcagccggtctggacgcgcggccggggctgggggctgggagcgcggcgcgcaagatctccccgcgcgagagcggcccctgccaccgggcgaggcctgcgccgcgatggcagagatgggcagtaaaggggtgacggcgggaaagatcgccagcaacgtgcagaagaagctcacccgcgcgcaggagaaggttctccagaagctggggaaggcagatgagaccaaggatgagcagtttgagcagtgcgtccagaatttcaacaagcagctgacggagggcacccggctgcagaaggatctccggacctacctggcctccgtcaaagccatgcacgaggcttccaagaagctgaatgagtgtctgcaggaggtgtatgagcccgattggcccggcagggatgaggcaaacaagatcgcagagaacaacgacctgctgtggatggattaccaccagaagctggtggaccaggcgctgctgaccatggacacgtacctgggccagttccccgacatcaagtcacgcattgccaagcgggggcgcaagctggtggactacgacagtgcccggcaccactacgagtcccttcaaactgccaaaaagaaggatgaagccaaaattgccaaggccgaggaggagctcatcaaagcccagaaggtgtttgaggagatgaatgtggatctgcaggaggagctgccgtccctgtggaacagccgcgtaggtttctacgtcaacacgttccagagcatcgcgggcctggaggaaaacttccacaaggagatgagcaagctcaaccagaacctcaatgatgtgctggtcggcctggagaagcaacacgggagcaacaccttcacggtcaaggcccagcccagaaagaaaagtaaactgttttcgcggctgcgcagaaagaagaacagtgacaacgcgcctgcaaaagggaacaagagcccttcgcctccagatggctcccctgccgccacccccgagatcagagtcaaccacgagccagagccggccggcggggccacgcccggggccaccctccccaagtccccatctcagccagcagaggcctcggaggtggcgggtgggacccaacctgcggctggagcccaggagccaggggagacggcggcaagtgaagcagcctccagctctcttcctgctgtcgtggtggagaccttcccagcaactgtgaatggcaccgtggagggcggcagtggggccgggcgcttggacctgcccccaggtttcatgttcaaggtacaggcccagcacgactacacggccactgacacagacgagctgcagctcaaggctggtgatgtggtgctggtgatccccttccagaaccctgaagagcaggatgaaggctggctcatgggcgtgaaggagagcgactggaaccagcacaaggagctggagaagtgccgtggcgtcttccccgagaacttcactgagagggtcccatgacggcggggcccaggcagcctccgggcgtgtgaagaacacctcctcccgaaaaatgtgtggttcttttttttgttttgttttcgtttttcatcttttgaagagcaaagggaaatcaagaggagacccccaggcagaggggcgttctcccaaagattaggtcgttttccaaagagccgcgtcccggcaagtccggcggaattcaccagtgttcctgaagctgctgtgtcctctagttgagtttctggcgcccctgcctgtgcccgcatgtgtgcctggccgcagggcggggctgggggctgccgagccaccatgcttgcctgaagcttcggccgcgccacccgggcaagggtcctcttttcctggcagctgctgtgggtggggcccagacaccagcctagcctggctctgccccgcagacggtctgtgtgctgtttgaaaataaatcttagtgttcaaaacaaaatgaaacaaaaaaaaaatgataaaaactctcagaaaac

SEQ ID NO: 135 - protein, 452 aa, Homo sapiens; identical to SEQ ID NO: 121

SEQ ID NO: 136 - DNA, 2249 bp, Homo sapiens
ggcggtgcagctggagcgtcaggggagtcccgctcgccgcagccccagcgccgcgcgcgcccctccctcctcgcggacctggcggtgccggcgcccggagtggccctttaaaaggcagcttattgtccggagggggcgggcggggggcgccgaccgcggcctgaggcccggcccctcccctctccctccctctgtccccgcgtcgctcgctggctagctcgctggctcgctcgcccgtccggcgcacgctccgcctccgtcagttggctccgctgtcgggtgcgcggcgtggagcggcagccggtctggacgcgcggccggggctgggggctgggagcgcggcgcgcaagatctccccgcgcgagagcggcccctgccaccgggcgaggcctgcgccgcgatggcagagatgggcagtaaaggggtgacggcgggaaagatcgccagcaacgtgcagaagaagctcacccgcgcgcaggagaaggttctccagaagctggggaaggcagatgagaccaaggatgagcagtttgagcagtgcgtccagaatttcaacaagcagctgacggagggcacccggctgcagaaggatctccggacctacctggcctccgtcaaagccatgcacgaggcttccaagaagctgaatgagtgtctgcaggaggtgtatgagcccgattggcccggcagggatgaggcaaacaagatcgcagagaacaacgacctgctgtggatggattaccaccagaagctggtggaccaggcgctgctgaccatggacacgtacctgggccagttccccgacatcaagtcacgcattgccaagcgggggcgcaagctggtggactacgacagtgcccggcaccactacgagtcccttcaaactgccaaaaagaaggatgaagccaaaattgccaaggccgaggaggagctcatcaaagcccagaaggtgtttgaggagatgaatgtggatctgcaggaggagctgccgtccctgtggaacagccgcgtaggtttctacgtcaacacgttccagagcatcgcgggcctggaggaaaacttccacaaggagatgagcaagctcaaccagaacctcaatgatgtgctggtcggcctggagaagcaacacgggagcaacaccttcacggtcaaggcccagcccagtgacaacgcgcctgcaaaagggaacaagagcccttcgcctccagatggctcccctgccgccacccccgagatcagagtcaaccacgagccagagccggccggcggggccacgcccggggccaccctccccaagtccccatctcagcccacagagagtccagccggcagcctgccttccggggagcccagcgctgccgagggcacctttgctgtgtcctggcccagccagacggccgagccggggcctgcccaaccagcagaggcctcggaggtggcgggtgggacccaacctgcggctggagcccaggagccaggggagacggcggcaagtgaagcagcctccagctctcttcctgctgtcgtggtggagaccttcccagcaactgtgaatggcaccgtggagggcggcagtggggccgggcgcttggacctgcccccaggtttcatgttcaaggtacaggcccagcacgactacacggccactgacacagacgagctgcagctcaaggctggtgatgtggtgctggtgatccccttccagaaccctgaagagcaggatgaaggctggctcatgggcgtgaaggagagcgactggaaccagcacaaggagctggagaagtgccgtggcgtcttccccgagaacttcactgagagggtcccatgacggcggggcccaggcagcctccgggcgtgtgaagaacacctcctcccgaaaaatgtgtggttcttttttttgttttgttttcgtttttcatcttttgaagagcaaagggaaatcaagaggagacccccaggcagaggggcgttctcccaaagattaggtcgttttccaaagagccgcgtcccggcaagtccggcggaattcaccagtgttcctgaagctgctgtgtcctctagttgagttttgggggctgccgagccaccatgcttgcctgaagcttcggccgcgccacccgggcaagggtcctcttttcctggcagctgctgtgggtggggcccagacaccagcctagcctggctctgccccgcagacggtctgtgtgctgtttgaaaataaatcttagtgttcaaaacaaaatgaaaca

SEQ ID NO: 137 - protein, 473 aa, Homo sapiens
MAEMGSKGVTAGKINVQKKLTRAQEKVLQKLGKADETKDEQFEQCVQNFNKQLTEGTRLQKDLRTYLASVKAMHEASKKLNECLQEVYEPDWPGRDEANKIAENNDLLWMDYHQKLVDQALLTMDTYLGQFPDIKSRIAKRGRKLVDYDSARHHYESLQTAKKKDEAKIAKAEEELIKAQKVFEEMNVDLQEELPSLWNSRVGFYVNTFQSIAGLEENFHKEMSKLNQNLNDVLVGLEKQHGSNTFTVKAQPSDNAPAKGNKSPSPPDGSPAATPEIRVNHEPEPAGGATPGATLPKSPSQPTESPAGSLPSGEPSAAEGTFAVSWPSQTAEPGPAQPAEASEVAGGTQPAAGAQEPGETAASEAASSSLPAVVVETFPATVNGTVEGGSGAGRLDLPPGFMFKVQAQHDYTATDTDELQLKAGDVVLVIPFQNPEEQDEGWLMGVKESDWNQHKELEKCRGVFPENFTERVP

SEQ ID NO: 138 - DNA, 2270 bp, Homo sapiens
ggcggtgcagctggagcgtcaggggagtcccgctcgccgcagccccagcgccgcgcgcgcccctccctcctcgcggacctggcggtgccggcgcccggagtggccctttaaaaggcagcttattgtccggagggggcgggcggggggcgccgaccgcggcctgaggcccggcccctcccctctccctccctctgtccccgcgtcgctcgctggctagctcgctggctcgctcgcccgtccggcgcacgctccgcctccgtcagttggctccgctgtcgggtgcgcggcgtggagcggcagccggtctggacgcgcggccggggctgggggctgggagcgcggcgcgcaagatctccccgcgcgagagcggcccctgccaccgggcgaggcctgcgccgcgatggcagagatgggcagtaaaggggtgacggcgggaaagatcgccagcaacgtgcagaagaagctcacccgcgcgcaggagaaggttctccagaagctggggaaggcagatgagaccaaggatgagcagtttgagcagtgcgtccagaatttcaacaagcagctgacggagggcacccggctgcagaaggatctccggacctacctggcctccgtcaaagccatgcacgaggcttccaagaagctgaatgagtgtctgcaggaggtgtatgagcccgattggcccggcagggatgaggcaaacaagatcgcagagaacaacgacctgctgtggatggattaccaccagaagctggtggaccaggcgctgctgaccatggacacgtacctgggccagttccccgacatcaagtcacgcattgccaagcgggggcgcaagctggtggactacgacagtgcccggcaccactacgagtcccttcaaactgccaaaaagaaggatgaagccaaaattgccaaggccgaggaggagctcatcaaagcccagaaggtgtttgaggagatgaatgtggatctgcaggaggagctgccgtccctgtggaacagccgcgtaggtttctacgtcaacacgttccagagcatcgcgggcctggaggaaaacttccacaaggagatgagcaagctcaaccagaacctcaatgatgtgctggtcggcctggagaagcaacacgggagcaacaccttcacggtcaaggcccagcccagtgacaacgcgcctgcaaaagggaacaagagcccttcgcctccagatggctcccctgccgccacccccgagatcagagtcaaccacgagccagagccggccggcggggccacgcccggggccaccctccccaagtccccatctcagctccggaaaggcccaccagtccctccgcctcccaaacacaccccgtccaaggaagtcaagcaggagcagatcctcagcctgtttgaggacacgtttgtccctgagatcagcgtgaccaccccctcccagccagcagaggcctcggaggtggcgggtgggacccaacctgcggctggagcccaggagccaggggagacggcggcaagtgaagcagcctccagctctcttcctgctgtcgtggtggagaccttcccagcaactgtgaatggcaccgtggagggcggcagtggggccgggcgcttggacctgcccccaggtttcatgttcaaggtacaggcccagcacgactacacggccactgacacagacgagctgcagctcaaggctggtgatgtggtgctggtgatccccttccagaaccctgaagagcaggatgaaggctggctcatgggcgtgaaggagagcgactggaaccagcacaaggagctggagaagtgccgtggcgtcttccccgagaacttcactgagagggtcccatgacggcggggcccaggcagcctccgggcgtgtgaagaacacctcctcccgaaaaatgtgtggttcttttttttgttttgttttcgtttttcatcttttgaagagcaaagggaaatcaagaggagacccccaggcagaggggcgttctcccaaagattaggtcgttttccaaagagccgcgtcccggcaagtccggcggaattcaccagtgttcctgaagctgctgtgtcctctagttgagttttgggggctgccgagccaccatgcttgcctgaagcttcggccgcgccacccgggcaagggtcctcttttcctggcagctgctgtgggtggggcccagacaccagcctagcctggctctgccccgcagacggtctgtgtgctgtttgaaaataaatcttagtgttcaaaacaaaatgaaaca

SEQ ID NO: 139 - protein, 480 aa, Homo sapiens
MAEMGSKGVTAGKINVQKKLTRAQEKVLQKLGKADETKDEQFEQCVQNFNKQLTEGTRLQKDLRTYLASVKAMHEASKKLNECLQEVYEPDWPGRDEANKIAENNDLLWMDYHQKLVDQALLTMDTYLGQFPDIKSRIAKRGRKLVDYDSARHHYESLQTAKKKDEAKIAKAEEELIKAQKVFEEMNVDLQEELPSLWNSRVGFYVNTFQSIAGLEENFHKEMSKLNQNLNDVLVGLEKQHGSNTFTVKAQPSDNAPAKGNKSPSPPDGSPAATPEIRVNHEPEPAGGATPGATLPKSPSQLRKGPPVPPPPKHTPSKEVKQEQILSLFEDTFVPEISVTTPSQPAEASEVAGGTQPAAGAQEPGETAASEAASSSLPAVVVETFPATVNGTVEGGSGAGRLDLPPGFMFKVQAQHDYTATDTDELQLKAGDVVLVIPFQNPEEQDEGWLMGVKESDWNQHKELEKCRGVFPENFTERVP

SEQ ID NO: 140 - DNA, 2682 bp, Homo sapiens
ggcggtgcagctggagcgtcaggggagtcccgctcgccgcagccccagcgccgcgcgcgcccctccctcctcgcggacctggcggtgccggcgcccggagtggccctttaaaaggcagcttattgtccggagggggcgggcggggggcgccgaccgcggcctgaggcccggcccctcccctctccctccctctgtccccgcgtcgctcgctggctagctcgctggctcgctcgcccgtccggcgcacgctccgcctccgtcagttggctccgctgtcgggtgcgcggcgtggagcggcagccggtctggacgcgcggccggggctgggggctgggagcgcggcgcgcaagatctccccgcgcgagagcggcccctgccaccgggcgaggcctgcgccgcgatggcagagatgggcagtaaaggggtgacggcgggaaagatcgccagcaacgtgcagaagaagctcacccgcgcgcaggagaaggttctccagaagctggggaaggcagatgagaccaaggatgagcagtttgagcagtgcgtccagaatttcaacaagcagctgacggagggcacccggctgcagaaggatctccggacctacctggcctccgtcaaagccatgcacgaggcttccaagaagctgaatgagtgtctgcaggaggtgtatgagcccgattggcccggcagggatgaggcaaacaagatcgcagagaacaacgacctgctgtggatggattaccaccagaagctggtggaccaggcgctgctgaccatggacacgtacctgggccagttccccgacatcaagtcacgcattgccaagcgggggcgcaagctggtggactacgacagtgcccggcaccactacgagtcccttcaaactgccaaaaagaaggatgaagccaaaattgccaagcctgtctcgctgcttgagaaagccgccccccagtggtgccaaggcaaactgcaggctcatctcgtagctcaaactaacctgctccgaaatcaggccgaggaggagctcatcaaagcccagaaggtgtttgaggagatgaatgtggatctgcaggaggagctgccgtccctgtggaacagccgcgtaggtttctacgtcaacacgttccagagcatcgcgggcctggaggaaaacttccacaaggagatgagcaagctcaaccagaacctcaatgatgtgctggtcggcctggagaagcaacacgggagcaacaccttcacggtcaaggcccagcccagtgacaacgcgcctgcaaaagggaacaagagcccttcgcctccagatggctcccctgccgccacccccgagatcagagtcaaccacgagccagagccggccggcggggccacgcccggggccaccctccccaagtccccatctcagctccggaaaggcccaccagtccctccgcctcccaaacacaccccgtccaaggaagtcaagcaggagcagatcctcagcctgtttgaggacacgtttgtccctgagatcagcgtgaccaccccctcccagtttgaggccccggggcctttctcggagcaggccagtctgctggacctggactttgaccccctcccgcccgtgacgagccctgtgaaggcacccacgccctctggtcagtcaattccatgggacctctgggagcccacagagagtccagccggcagcctgccttccggggagcccagcgctgccgagggcacctttgctgtgtcctggcccagccagacggccgagccggggcctgcccaaccagcagaggcctcggaggtggcgggtgggacccaacctgcggctggagcccaggagccaggggagacggcggcaagtgaagcagcctccagctctcttcctgctgtcgtggtggagaccttcccagcaactgtgaatggcaccgtggagggcggcagtggggccgggcgcttggacctgcccccaggtttcatgttcaaggtacaggcccagcacgactacacggccactgacacagacgagctgcagctcaaggctggtgatgtggtgctggtgatccccttccagaaccctgaagagcaggatgaaggctggctcatgggcgtgaaggagagcgactggaaccagcacaaggagctggagaagtgccgtggcgtcttccccgagaacttcactgagagggtcccatgacggcggggcccaggcagcctccgggcgtgtgaagaacacctcctcccgaaaaatgtgtggttcttttttttgttttgttttcgtttttcatcttttgaagagcaaagggaaatcaagaggagacccccaggcagaggggcgttctcccaaagattaggtcgttttccaaagagccgcgtcccggcaagtccggcggaattcaccagtgttcctgaagctgctgtgtcctctagttgagtttctggcgcccctgcctgtgcccgcatgtgtgcctggccgcagggcggggctgggggctgccgagccaccatgcttgcctgaagcttcggccgcgccacccgggcaagggtcctcttttcctggcagctgctgtgggtggggcccagacaccagcctagcctggctctgccccgcagacggtctgtgtgctgtttgaaaataaatcttagtgttcaaaacaaaatgaaacaaaaaaaaaatgataaaaactctcagaaaac

SEQ ID NO: 141 - protein, 591 aa, Homo sapiens; identical to SEQ ID NO: 129

SEQ ID NO: 142 - DNA, 47084 bp, Mus musculus
  misc_feature (1)...(47084): n = A,T,C or G
acaaagtgctgcgggcgggagactcgcgtccgccgcgcacagccgtctgcgtctcccggctgccctggcctcttcccgcgcgcgtctgcgagtgtgcgtgtacactcacaaagggcgtctggcgggcgatcgcggccctcccgcttcgctctttgtgcggtagccccgccgccaccgccagcccaggtccgctcgatcctcaccggcctgtggtttgtaccttcggtcccgccgcccgccatggcgaccgcgacccccgtgcagcagcagcgggcgggcagccgcgccagcgcccccgccacgccgctcagccccacgcgcctgtcgcgcctgcaggagaaagaggagctgcgggagctcaacgaccgcctggctgtgtacatcgataaggtgcgcagcctggagacggagaacagcgcgctgcagctgcaggtgaccgagcgcgaggaggtgcgcggccgcgagctcaccggcctcaaggctctctacgagaccgagctggccgacgcacgccgcgctctggacgacacggcccgcgagcgcgccaagcttcagatcgagctgggcaagttcaaggccgagcacgaccagctgctgctcaagtgagtaccggctcgattgtcacgccgagaggcttcgggacgccatggggcgctgtgcgcccgggagggaccgcacaggccaggtgcctcggccttccgaaggggactgggcccctatgtcttgaaagcagagtggggaatctagcgatttagaactgaacaggggtgccttggaaggtggtcgagttgtagtgacggtggggtcgtggcgatcatttctaggtgactggatctgggacttgacctcggaccccagatttcccccatctgcaggccccgggtacggggagctgatgctcttgcgcgcgctcgagtgcgcgcccgtgtttccggctggtgggagacaaagcatctggtgggtttgctcggccggggcggctgggctgggtggactcgccaacggcccgaagaatgaatgagttctaggcgggcggaggaaggggagggaccggcccagagcgtccacggctcccgggggtgggtcttgctttggcgcgctcagtcttggccctgtgacatttttgcctgcgatctgcgccggtcttccccgtgcgggaagggcggggactgagctgcacgcctttggcccagggctagttgggtttcctctctggggagtttcctttacactagaatgtcctctggtggcgtcccggtccttgggtgttctgtgcaccagattccttaaactgggctttcgtaggccatgactgtcgtcctttgggtccctgatcgttcaccctgcaggcggtagcgctctcttcttcgatttagccttcctataaagtagtcctttaactagaaaccgtgctaaggaccccgcatacctgcggtctgtggtacagtcagcaggccacggaaggtcaaagggtttgagtatgagatgtgttgacttggggagagcttgtaatcctaatgggagctgagttttcagcccagggtacgcctttgctgtccttttccttgattttctgatgggtaatatgtgtaactcggtgtgtgcaacaagttctggtgtcacgcttttagagagttgctaagtttcagtttgggattcagtcttcgccacagccagcatattttgggggttggtatctgattcagactgccctgggtttctttccgtatatccgaaccctatttccctgtctccctttcttaggattgtgtatannnnnnnnnnnnnnnnnnnntctcttcttcgatttagccttcctataaagtagtcctttaactagaaaccgtgctaaggaccccgcatacctgcggtctgtggtacagtcagcaggccacggaaggtcaaagggtttgagtatgagatgtgttgacttggggagagcttgtaatcctaatgggagctgagttttcagcccagggtacgcctttgctgtccttttccttgattttctgatgggtaatatgtgtaactcggtgtgtgcaacaagttctggtgtcacgcttttagagagttgctaagtttcagtttgggattcagtcttcgccacagccagcatattttgggggttggtatctgattcagactgccctgggtttctttccgtatatccgaaccctatttccctgtctccctttcttaggattgtgtatactaccttgtcagatatttaaagatcggtaagagtgtctgtttcccttttgcttttgagacaagaagtcactttcttcaccaagttgtctgaacctcttgacctaaagttgatactcccgcagcaaccaggaatcacaggcttgcccacccatttttaaagtatatgggtgttttgccccatatatgtctgcaccacgtgtattcctggtgcccacagctgccagaagagggcgtagaatcctctagaactagagctatagacgtgagccaccacgtgggtgctgggaatggaccctgggcgcactgggagagcattccgtgctgaggagctctctccagccctgtttgtgttttgagacagtctgtctcactaggtagcactggctagcttggcgctctccgtagaccatgctggtcagtccccaaatcagagatccaactgcctctgcctcctaactggaattgaggctcgtgctggagccaaggcccagttgtctgtccttgcgtgtataaccttccatttctgtttctggattcagcaacatttggggtcatcttttgaagtgacagttcactgatactggcatctctggcatctcttccactttttttttttttttttttttggtttttcgagactgggtttctctgtatagccctggctgtcctggaactcactttgcagaccagattggcttcgaactcagaaatctgcctgcctctgcctcccgagtgcacgcccggctccacttttttttaaagacaggatctcaacaatgtagtcctggctggcctggaactcccagatatctgtctgcttttttttttttttttttttttttttttttatatttatttatttatttatttatttattatatgtaaatactgtagctgtcttcagacactccagaagagggagtcagatctcattacagatggttgtgagccaccatgtggttgctgggatttgaactccggaccttcaaaagagcagtcgggtgctcttacccactgagccatctcaccagccctctgtctgctttttatagtgctgggattataggtgcaccttaccctcaggtggtggcagccactgaggtgctggcctttaatctctgcatttgggaggcaannnnnnnnnnnnnnnnnnnngtaatatgtgtaactcggtgtgtgcaacaagttctggtgtcacgcttttagagagttgctaagtttcagtttgggattcagtcttcgccacagccagcatattttgggggttggtatctgattcagactgccctgggtttctttccgtatatccgaaccctatttccctgtctccctttcttaggattgtgtatactaccttgtcagatatttaaagatcggtaagagtgtcagtttcccttttgcttttgagacaagaagtcactttcttcaccaagttgtctgcacctcttgacctaaagttgatactcccgcagcaaccaggaatcacaggcttgcccacccatttttaaagtatatgggtgttttgccccgttatatgtctgcaccacgtgtattcctggtgcccacagctgccagaagagggcgtagaatcctctagaactagagctatagacatgagccaccacgtgggtgctgggaatggaccctgggcgagcatttagtgctgaggagctctctccagccctgtttgtgttttgagacagtctcactttgtagcattggctagcttggcgctctccctagaccatgctggtcacttcccaaatcagagatccaactgcctctgcctcctaactggaattaaggctcgtgctggagccaaggcccagttgtctgtccttgcgtgtataaccttccatttctgtttctggattcagcaacatttggggtcatcttttgaagtgacagttcactgatactggcatctcttccacttttttttttttttttttttggtttttcgagactgggtttctctgtgtagccctggctgtcctggaactcactttgtagaccagattggcttcgaactcagaaatctgcctgcctctgcctcccgagtgcacgcccggctccacttttttttttaaagacaggatctcaacaatgtagtcctggctggcctggaactcccagatatctgtctgctttttatagtgctgggattataggtgcaccttaccctcaggtggtggcagccactgaggtgctggcctttaatctctgcatttgggaggcaaaaagggaggcagatttctgagttccaagatagcctggtctacagagtgagttccaggacagtcagggctacacagagaaaccctgttaaaggcatgcctcacctttttttctcttactgcatttctttaaatcttaggtgcctttgcttgtaaaacctggccatcattatgtgtatttgtagaaagaaaacaaaaggaaaacaaaattagggccagcccttgtcttggacccattggcaatttccgagacattaaaatgttacacagatcaagcgtctggtatgggccagttactgcttcacggttgaggtcacagattaaataaataaataaacaaaccaatgtcctagttttagggtgaggtaggggaaaccgtatagcaagcaaacaaaaactgtcttttgtgtggtctgaggcactttgatgctagggctctgatctttctagaagctaaaccattaatggttttctacacagcagcaatactgccacctggctgacagtagctgtagtcgtaaacgttatggatcaatcacctcttagcttaaataggattaaaaactgaaaaagatgacacaggattattgatgaattgcagagcatatggtatagtttgggtgataaaacagtgtaagggaataaaggtgagcagcaggggaggagcactgtcaggtgtgtgggaagcatgacacttgaggctcctgaagagaccaactgccatcgtgagcttatcatcttctagatttctgttgtcgtgtgtacttgaagtgtcaggatcaggtggattcccttttttttttgagacagggttctctgttaacagtgctggttggtctggaacttccatttgtagacacagaacctcctgcctctgcctctgcctcccaagttctgggattaaaggcgtgtaccaccacaattttctcaaaatttctcaaaacatgccagtgtttatttggatcctggcatgtctttgacatttatgttcctaaattgttcatttttcttgctgattgaaaaaacaaattaccttcataactgcaaaccttcaaaggtatttaatcatcagtctgttataaaaatctttcttactttgaactctgctcttttttttttttctttttttaatagacaaggtctcattctatctgcctgtcctgatacagagcctgcccctgactcctgagggctggaattaaaggtgtatgtcaccacatctgtttttaaggtgtcttgtatgctgattaaattggattgtgttccagttttgtctagatcatatattttcctttggttttgttgagaactctgttggataacatcttttcagtaacttaagtggaaaggacagcaggaaattgtctgggtagctgggaataactgtctcatatttgattaatagttggttgggcaaggttattttaacattttgtcttggtccaagagagtgccattttgtccctctgtcttctagcatttattgctgtctgtctgtctgtcattctctctctttctctcactcttctttctttctctctttctctccctctctccttttttaggttttttgatacagagtttctctgtgtagccctggctgtcctggaactcactctgtagaccaggctggtctcgaactcagaaatctgcctgcctctgcctcctaagtgctgggactaaaggcgtgcgccacccctgctgggtgatatacggtctctttgacagctctttgtgctttctcttgctgtgatatggcactgaccagaaacaacttggggagaggaggatttatttctcctccaggtttaattccatcatggggggaagcgagtcaggaactcaggaactccgtcaggagcggaggaacactgttggagagtcccgcttcccaggtaggtctgtcttaggtttgtgtcaagttgacagaagctagccggcacagtctcctctggtccatcctagaaaacttttggaaattttgttgcaggtttctgaagttgctgactgatggtgtgagatacagtttcctgagcccctgcccttcaatctcaggccttttgattctaggcttggttttctagtgatgtggtttttttgggaaataggtcaccttagcctttcctcactccattttttctcttgtctttccccagacctttttgcacacaccagatactataaagttaaggacaggcctttttaatttttactggaaaattacctcaaattcttttcagattagataatgaccttaatttgattgtaatttatatagccttggctggtctggagttcactgtgcagaacaggctgcctggccttgaatttacagagtctgcctctcaaatgcttggatcgcaggtttgcaccatcacacccaccctgttcatcagtttgggatttgtgggtaggagttgtggatgtgcattctctggatagtacgtgaaggtcagaggtcagatctgtgggctcagtgtttcctacccacctttccaccagttctgaagatccactgggggttgccaggcttgccaccaagctccatctcgacagcccagcagtcactttcctgtttgaaataggttgccactatgtcatgtcaactggcctcagacagagatcgactggcctgggcctcccaaacactggggttaaaggcttgtgccactacgccggtgcataccatctttattagtgtccggtgagagggctagtgactatcccatcatcttttaaataagttacttttgaatgataaaggaagtataatttggaaaatgaaaaggaaggattgttttattgttggtttgagtccatatggcccttggacttgtttaaaaatctgtacgttttttactttgagccaatgtttatggagtaattactattgaggcagactatattatggaaacagttgtagtatagtttttttttttcctgtttttaatcatcttttagagccaggcagtggtggttcatgctattgattctagaacttcacaggcagaggcaggtgaatctctgagtttgagaccagcctggtctacagaaagagttacaggacagccagagctaaacagagaaaccctgccttgaaaccccacctttttggctccttagtgttccttagacgagagaatttgctggtcctggtgttgtgggcacctgtaatgcctacacttgggaagctgagactggaagcgttaatggttgaggtcagcctgagttacagagactgtcttagggtttctatgctgtaaagaaacaccatgaccgccgggcgtggtggcgcacgcctttaatcccagcacttgggaggcagaggcaggtggatttctgagttcgaggccagcatggtctaaaaaatgagttccaggacagccagggctacacagagaaaccctgtctcgaaaaaccaaccaaccaaccaaacaaacaaacaaaaagaccccccaaaaaacataacaagaaccaagaaacaccatgaccacagcgactcttaaaaaggaaagcagttagttggggctggcttacagttcaaaggtttagtctactgtcaccgtggtggcacaggcagctgtggtgctgaaggagctcagagtcaacatctggatcagcaggcagcagggagagagtgaccctgggcctggttgggcttctgaaactccaaagcacacacttcgtccaacaaagccacccctactttctctaaagaaaaagacttcccctcccaatagtgctactccctatgagcctatgggggcattttcattcaaaccaccatagagaccttatctcaaaaagactccaaatcatcaaacaagcaaaaacaaaaacaaaacaaaaaaacccccgacacctcaccaaaccaaactcagaagcattcatgctggactctgctaactgcttacatcctgttgaaacctgggacctcaggcaggcttcttttgaattcagcacaactcggacaagtctttaacacatgagcctttggctgaacctttcaaactgatgggaaagtccaggaaacaggccagaggagctagactgtcgagccccttcctctcaatgcttgcaaaggaaggcaggaagtaagctacctgctggaattgtttgtgcaggtgcagcacagtgcaagccgtttttcctctctgaagtcgctggtttggtgtgtttgttggtttgtttagctactacctctgataagcctaagttaaaggtttgcagcatgcacacatgatctgagcctcagctgctagccggtgacagaatagaggatagataacctcattgtttctaggatccaaagatagctaccaatcagttttcttttagtgtacttgcatgacaaaggtattgggaacttaaatatttttaggattgatgaagccaccagcaagtaaaaggacttactgctcaagtctggtgacccaagttcagttctggaaactgagttggagaggtccaactcctgagacctgtcttctggcttctacacagactggcacatgagcatctgtgagcacacacacatgataaagatagaaattatacaaaacggaaaagagacaacaaacacttaggtagaaaataaaaagtacctgtctgtcccttagaagtaagagctcagagatggtaaggtggctcacactaattagtaatctttgtgcttcagctgagaggcaggaggatcacttgagttcagagatggccggcctgggttgcagagtgagaacttgtcccaggaagacagaacccagccagtgatatggctccgcaggtgaaggcgctcagttcctgtctggtccccagggcccatggcaggagaggccgactccagctgtcctctgattttacctccctcttccttctacctcataaaacatgctaaaatggagaaaatgttaaagtgctgaggaattgtgtttgtcattaataaaaaaggagtttatgatataggcaggtagtttttgttacacagtcttttattgccattttagattgcagtaagtgtgttcagtgccatgagttagcacattttacagatatgataggaacctacctgtactggccctgtggactgccgtgatcaaagaaaaaaaacttcactgacagaaagctagccagtttctcaggccagagagtgctacaaacattcaggagcctctggcacaccgtatcaggttactagtaaataaatgttgcataatttgctagctaagcattagccactgggtaaaggcagggcagttttacacggatatttggtcctagcagcagcagcaaagtttctggaagctgactgtagctcttggccttcttacgctattgtttatggtgcctccgtctacactggagtcagagtctaatcgtgttagcatttgtgattgagcctcagtcctaggctctcctcgtctaacctgcttgctccatcctttaagcgtgttctgtttgtgttgtttttcgcttcctttggatctgttggtagagttagaagcagggggcttctgcagtgagacgaggcatctgccctgatcagctcattctgtggataaaggcatctggaggagggcttgggtttcctgccgtgctggacagaaagctggcagttaacttccctctgttctgttctggttgttcctgaactagaagctttactgatcccatccgttctgtgagctgtggtaaccctgcgctggcggatgaggggtgaggctctggggtcactcagatgaatgaatggtggagatgctgtggtgattgctctgtctaacagtgctctggccttttacatactgtctcattccgtcatagcagtgccgatctaaatggcttttggatttcctgacagacaggaagcagtctcacagagcaaaatatttggactagaaatcttacacaggacagatgactttcagggtggtagggtgctgtgtttggcagtggtaccaactgtggttttcttggtgctgatagtgttcaaggaggtaattttggattttgtcaggagggtgcagtaatttagagggtgtttgaaatactgagggtgtcacttgctggtaagtaggtgaagatggggctggagaggtggctcagtggttgttaagagggcgtttttgctcctttagaggactcagcgcccctctcagtaccaacgctggtggcgtacaaccaggcaatggtagctcatgatccaggaaacccaacagctagccttcataggcactctcactcacacacacagacgcacacgcaattaagaacaaaatacatctattaaataccttaaaattaaaaatattttcatatgtatgggtgttttgcctgcattaatgtatctgtgcaccacataccagaagaggatgccggctctccaagacctagaggtatagactgttggagctgccacgtgggtctggggattgacccggggtcctttagaagagcagccagtgctcttaaccactgagccattgctcgattcccaaataaaataaatatattgttttcttaagaaatgggtgagagtaaattgtaaatttttgaatctttcgtacaaagctgccttcctactcaatgagttagtaatttagaagaaatcaatacctctctcaacctttaatgcccatggctgaactgtgcttccattttgtgttcagcactcaccggaacagacgcggtgttaagtcttgggttgcagcaggtgctggggacagagtaggacactgtccccgatatgttgcttacagtctggaatgggagccagagagctagtgttaaagtgtggtgatgtcaggcagcaagtgctggggcagccgctcactggagcgctaaaggagtgcactgtcacccaaggctccttaggagtcaggagagaactggaaagaccccctcgggaccggggaggcactgatgtggaaactaggtattggctggtaaaggggaatctcccttctcaatgggaacaattagtatgcagctcccctgagaaccagaaatccatgtaactagagtgcgtaactgggaagctgaggattgcatgttagtcctgaggagtgacacagatcttgctgtatcatagacataaacagacaagaacagcagtaggccattggaaggaatgaaagcaaccctaggccagcagtttttaggaaggagaggaggtgggtgtgagaccctgtgtgggcgtgcacgaggagccagggctgacgcagggtggccgggaaggctcttttgaaggaccctgctctgggcagtcatgagttagtgctgtatggacttggaggtggagatgtctgttggcagtgtagaaggtgggaaagactccgtgcacgtgatctctaatagtcagagaaaaggagttagttaggttggagaagcctagaaagtgttgtcttagtgcctgcgagatggtttgtattgcagggagagcctggtgttagtgaggtgcagtggatggagtaaaggacacaggtcatggtttaagccacaagaatgttgacggtgaagggaggacgtctttacctttgctgtgctggcccttgaggcagagctctgtatacaatgggacagctgggcaactgttgtgtaggtgtgtgtgtgtgtttgtgtgtgtgtgtgtgtgtgtatgtatgtgtatgtgtgtactcatgtctgcatgagtagagaccaaagaaaaagccttgaggtggcctgcgccatcactctgttccttattcctttgagacactgactgaacctggctaggcagtggctagcaatgcgcagtgatccctcacgctgtccgccccacctccacagcactgtggttacaggcgtgtgcggcaggtgtgtgctgctgtctgaactctgcacactaagcactctcaccctcagccgtgggccatggctccagccctcaggagactttgcatgtgtgtctctgcctggtactttcagaagccagaagagggtgttaggttcttcaggttgtagatagttgtgaactgctgtgtgtggttgctggcgctgatcgtgagtcctggaagaagcagtaagcatacttgaaatgaatggtctagagcaaattaggacatgttgctgacctctgaaaggcttttctctctgtggactgacctatagtgtgtctcctctggagtttgagtctgtcttctcagatacatatttgcctttctcagcccctttacttgcagcaagcagggctactcattttgggttttctttgggtttcttcacctttggtagtttttgctcacctcagttcaatgttgatcagcttagggacaccttccctgactgctgactcagacttttgtgacaggacacgtgtgactgtccaggtgtgcatgagtacagttcagggcttgtgatgggacgaccgccttcattcctgtctttatagcctagagtaaagggcgttacggactggctgccgaacattctgctgttcccagcatcccttctgtccttagatgttggcaggtccacttagatcattagacttaggtatttaaaatagtccttgtgctgtgttggaaatgcaacatgttagtccatgtgactagtagatagagaaatgattttattatatattagtaagtacatagttggttctctacacccaaatgaattcaactgaaaatactgaaaatacacaaaaatcgcatttatactaaacatgtaaggactcctgtactaatttaccaaatatagcaggacagctgtttcatgagatttgcattgtcctagtgttacagctaatctagaggtgatttaaagtatagaagaggatatgttatatgtgttatatataaaacctatataaacctatataatatacacccatatgtatctataacctagtactttgtagaaggaagttactggttttggtcatccgtgtaaaaggggtcctagaaccaatcctttattaataccaaggagagagatgctctgtggttcagtttcgtcttagtattttcctagttttaatgtgatttgttgggattggcttgtttcttactggacaatttgtgctcccttcagtgaccttagcagctctgaccgtgcccagcatggtgtactctttgagtgtgtcagaggaggcccttctcatgggaatagagttcacaagattaagattcttctgggtattttgtatattatatgcattttaatagcaggaaagttgattagtttttctcatgagaagcacgtggctcaggttcacacagtattgaaagtgatcagtaacccggagtggagtgaactcgtcatggggaacttgagcctattgtgagatctgattgtttggttttaggaaagcagatgtgtttattttgagaacctggtctttgtctctagttagccttgaactcggagcaggtctacagggtcagtgatcatgggcctggaggttattttataggcactttcaagtcttaagctccatgtttactttatctgtgagtctggactatgtgttgataatcaagccaagtagattctgagctctgattcagagtaagtccccagaacgtttgctgtgtgagtgagtgaatatgcctgtgtgtggagggcagctgcctccatgcagctgttgagagccaccttatggtggattagaacaggaccagaggctgctaggacagactggctccattctctaggcagaatgcccctgatcccggcggtttcacgctgccttgctaccttctaaaaccagcattcagcaggcagaggggacttctgagttcaaggccagtcagggctacagagagaaaccctgcaaaacaacaatgaaaagtacttgtttgtgatgattaggaataatggtttttggggtttttttttgtttgtttgttttgttttgttttgtttttcaagacagggtttctctgtgtagccctggctgtcctggaactcactttgtagaccagtctggcctcgaactcagaaatccgcctgcctctgcctctgcctcccgagtgcaggggtcaaaggcatgcgccaccacgcccagctaagaataatggttttatagagaatgatttgtattgtggctaccaaatgaaagttaaatgtttaccttttatcccgcagaattgatctgagtgccaatggtcctataatgatcttatttctcactagcaaacttagcaattttattgaacacaaaatttttgactttgtccacgttaattcagtacagtattataataatcttaggcagatttcatgtacatttagtttttagatatttacatggggctggagagatggctcagcagttaagaacacactgcctgctcttccaaaggttctgagttcaattcccagcacccacactctcacagccgtctacaatggggtctgatgccctcatctggcatgcaggtatacatgcagatagagcactcatacattaaataaagaaaagtaaatcttaaaaaagttaacattacactttttttcagaggttgttctgccgacccagacatctataatgcagttctctcactgcttacccgtttgtagttgttttcgagatggggtttcatgtgcagctgtggcagtacctggacttgcttcctgcagtcggctgacccgtggcagtctgctgagtctgcttgagcccatcccgactttaagataaggttactagtttaagctggtcttgagcttgccaccctcctgcctcattctcttggacatataattaatgttatatgtgtgtgtgtgtgtttgtttgcatgcatgtagaagccagaggtttcagcatcctaactcagaacttgtccctgattgagactgggtctcactgggatctgaagcttgctaagtaggctaggctagctgactagtgagccccacagatcttgtccccagtacaagttagaagtaactcattagctccttaatataatttttatacattatccttttggatgtgaaaaatcaaataactaacacaaaagtacttaggaaagtaaaaattaagacacttgtgtaaaaggatccgaacccaagcatttttctagatcttcgtctacacacacacacacacacacacacacacacacacacgagattctctaccctcggtggtctaagtgtgggcttataggtgagggccactcatccctgtgcttattatgatttaagtatttgttcctagattttggcctgttgattttgtttcatacaaaatcttagttctccttttaattggcctgtctaatttttttcaattgtttattgttatggttgggtatggctaagcttacttgtgatcccagcatttaagagatggaggcagaaggatgagttcaatgccagatatatggtgtgtgtgtgtgtgtgtgtgtgtgtgtgtgtgtatgtgtatctccatatatatggttaaaagcttgactgtactcaaagtataaagtgtcaagcaatcaatatataaggctgggtgatggtggcgcgtgctttaatcccagcacttaggaggcagaggcagaggcaggtgaatctcttaaattcgagggcggcatggtctacagagcgagttccaggacagccatggctacacagagaaacctgtctttgaaaaaagcaaaaacaaaaaccaaaacataaatacatacatatgtgcatgcatacagtcaagaaaccatagaggaacatgtttcctgacatgataggcttacacaatagttcattttcagatggctattgtcagatactaagtattcaatgatttttccgaagatcttcattgaaattttcttttgtggatggtctcacctattagttctggccagcctggaattcatttgctatcttagacttgactggcttctgtctcccaaatgctaggattaaagatgtgtgccaccatgcccagctccactgaacatttatttcgagtaagggcgtggagccagtggtgatacaccctgtttcataaaccctgtttcagagcccagcacatctggcgctaaagccagggtgtaaatggtgatctgaaaccaagtcaaggctaaactgctcatcgcacgccctgagcgcacccacacgtacagaggtcactgcattgctgtagaggtagcagtctgtagagtagcaattggctcctccctgtatagtggccttatggtagcatgcatccatgttttctgtgataacactgtggcccgagaaggaggagtggagccatgtgtgaacacagaaaagggaagcacatggagtttggaaagtactgagtgaccacttgtacttagtgtttttactctttcaggccctggggagtgggtgtgtccctggcagtggtagttgtgttaggaaaggacaactacaccctgtcacagagtctgctatagaatgtgaatggacaattgccagctgattatttctttaacaggttagatgtatttaattgcttaatgtttctggtaacactcaagctttctttttttttttttttttaagatttatttatttattatatataagttacgctgtagctgtcttcagacactccaggagatggagtcagatattgttacagatggttgtgagccaccatgtggttgctgggaattgaactcaggacctttggaagagcagtcggtgctcttaaccgctgagccattactccagccccaacactcaagctttcttgaaaggaaagctaactttgggggtggaagttctttatcaggatagaatgccaactacattttataaaagctattttattagctcttggatgcagttggggttttggttcttgtgtgaagtatctgaaaaaaatgttttatgacttgttttcagtagtgtgcatatttgtagcattagattcatgttctgaatttaattgaaaacattatgatctatctagaattagaagttgagttaggctgatcaatagcaccgtaaaggtctccagccaaggaagtcagagagatatgcactgtagcaccttgagggctgctttcagtaacgctcctgtctaagttggtctcttctttgacagtatcagatgtcatactgcttaagtgatacaatgtgtttcagaactccagcctgcagtttctgtactttgaccacatgctgataatacttggactgtccatgttatgtttcatgaatgagaaataagaaaacaattagaaacctacgacaagatcatgttcagattgttaactcacagactgaatggcctcctatgcccttggcactggccactagtctgacataaaactcactggctgacgcttatctggagatgtgtgtaatcttaagaatgtttcatgattcatcgacattggcaggatgagagggtggagatttgggaaagtgaatttcagaggtgataaaagtattacagcctttttctgcaggatgaaaggcctgggtgaggctttggggagggtgttagtcagtactgtaattgcactctgggctctgtatgacaggcatgcactcttatgaatactctacagcctcaggctcattagacatttagcaagaccattgctgtcttcaggtttgctgtataaaaaattcaggaataataaaagaggccttgtccttctttgggtcttcagtcttttgagggagctaagcagcccaaatagagggatctgtgtcttcagtgtaacaccagtgtgcttcatgtatagaggtggccatggctttcctccttttatcagaggctggctggaagcacccacatttctgttattgttgggactgaaggaggagaggagaaagatgcatgaatacagaacatttgcttggagttgggaggtacttgggatataaggacagctgtagggaatgtgtgccagcagcttccctgcaggcctgtccacaaatgcatttcattcttttcctaaagcaccagacagctgcattcatgagcaaaacctagacccttggtaatactcagttatgttggggattggttctaatgctttgattcaaccggcaatctgcgagtccaaacgcaggtccttgtccccaattgttttttggtcaatcaataaagatgccagcgagctgggcggtggtggcgcacacctttaatcccagcattgggaggcagaggcaggtggatttttttgagttcgaggccagcctggtctacagagtgagttccagcaggacagtcagggctacacacagagaaaccctgtctcgaaaaaccaagggggaaaaaaagatacgagcggccaattgttgggcaaagggagacgggggggggggggacccttagagttcctggggctatgatgcaggagggagttggagacagagggcccccatgacttgggggagagagatggatggacatgggagctgcaggagatagagccagtgagccatgggagagtttgggtaaatggccactgtccactcccctgatttggcctagggtagcaggggaaggtttaggagttcccagcctttgaaccagccaaggcattttaaaaataagctaatgtgtgcgtgtgcgctactgttgtgaatgggaatagtttttcaaatgacatacggagactagacctgtcccttgagtctgtcatgggaactctttgccctcttgggtacctgcttagaaattctgtctgcatagtcacgtgtctgtgtattggtgtgcagttttccccctagaatgaagcctatgatatgactactactaatttctttggagagtttaacttcttcgtctttttatcgttataattttctaatgtacaaattacaaaatctgtcaattgagtttctctgaaaagagctattataggtcatattatatatatatatatatatatatatatatatatatatattcgtttttttgagacagagtttctctgtatagccctggctgtcctggaactcactctgtagaccaggctggcctcaaactcagaaatctgcctgcctctgtctcccaagtgctgggattaaaggcgtgcacaaccactgcccagcttcttttatatacttttaaagagaagaaagggccacatgtttaaaataagagttacttttttccctagggagcagacatataaagttaactttctatgtgaatgtaagcatgcttctagctgggcggtgtggtgcacacccaatcccaggactcaagaggtaggtgaagacagcccggtctacagagtgagttctaggacaaccagggctacacagagaaaccctgtctccaacccccattccccttctaccaaaaaaggagaacatgtttctagtttctgattgcctgcctagtttgcagtcctgtgaatcctgtaagcccttgttagagcacatcccggcagtgtgggaaggatgtcagtgctttaagaacttgaccttaagagacagacaccgtcagcatctccttcatttttctattttatgtcttacttggttttggttttggtgaaatgactagtcatataaactgctgcacagtagcatttggcttttcctgatttctgtattccacaaagtattgtgtctcaccttggtatgacaaggagttctgagctctgcgtgtatgactcattgcatcggtgaatgggatacatagtgatattatgtagaaagaacatggtcatttatagcctgctgtgtgtaggctcatggctcccacagagtcaccatgttgtgctttgtaatttatacactagacagtgctgtagtagtttctgtaatttgtgccttttgtaaatattatgtaaactataaaatgtgaatactttttttttttttttagatttgctttctatgagtgagtgttttgcttacatgcatgtcagtttgccacatgtctggtgcccccagaggtcaggagagggatctactggaactggcgtaaacagagttagggaattagtttgtgggcacatggagatgctgggaatagaatctgggtgttttgcaagcaacaaatgctcccctcctgagccatctccaacttctaattttttttttttaattttaatttaagggctggaaacatcttagttggtagagtgcttgccttgcatgtatgaaaccttaggctctgttcccagaacacagtaagattgggtgttcctatgtgtctgtaatcctagcatttggagatgtaggcaggtagctcttacttcaaggttgtccttggcaaggctgatatggactacatgaaacttttctcagaaggagtagtttgattctaggtgtgtgtgacatgcatttagcgttgaccatttcctggaaggatgaaaccgtgcctcgctcacaagcttcttcatgaggtttctgtagagaaagagtctgtttggctgtgagtgaccaggagggaattctgttttaaaggaaaggtgtgtgtctgtgtgtgtttgtgcgtgtgcgggcttgcctgcctgccttcttgcatgtctgtcttgtgtgcctgagtgtctgagaatgcgtgtacacgtgtacacgtgagtttgtgtgtatatctgtctgagatgtgtgagtagggttcagaggagggcgtcagatctcttggagctggagccacgtgtgtctgggattctgttctagacctcatggttgagtaggaagcgaacagaaccatttctccagcccaaacaaggtttttgctttaagtcaaattttaaactgtgccggtgtcccttctggactagttttcagctaaaggctgccatcttgtggccctaaaaatacagggctcaggacaaaagattctgttgagactatgactgccattccacagagagtgaggggtcttctcttggaattattaaattaccattgagtcaatttccctaacattagcaatactcaagtttaaattaagagcaagtatttagaatcttgatattgtgaaggctttcctgtgaagttaatgataaagatttatttaaattacactcattatgtcttttaaaatgtaattgcccaaaataattattctgagtttggtggaacacataccctttactctccctagtcctcagaggcattctaggatctgagtttgacaccagccagattcacatagagttgcaggttggtaagggtgacctggagcgaccctccactcctttaaagggatcaactctgtccagcagtgagtattgctttcgagcatagagcccccacttagctcggggagtttcagatcacctcttatgttagaatagctacttacaagcttcttggcaccggctacctgttacaaaagcagagatcttatgtgaatgagagttatgctgacatctatgtctgcatcctgcgtttgtatctagggcttatgggggctggacgaaggtgtctgatttcatgggactgaagttaacagatgacccacctgaacgtgggtcctcggtaagagcagccagtacttttaaccctgagcagtctctctagtccccagcgactgggtctttgtcccacagtcattagttagcatgtgatgtggggaatgtcatctacccagactcttgacctgacgctcctgggtgatccatccccaggcagccgctgctgaagttgctgtggtttctcccttaagccggcaggaggtcctcaaggcgaggttgtgattgtgttcttctaatgttacagttatgccaagaaggaatctgatctcagtggagcccagatcaagcttcgagagtatgaggcggcactaaactctaaggatgcggcgctggctactgccctaggggacaaaaagagtttagagggagacttggaggatctgaaagatcagattgcccaggtaagattttgccctgatctgtgtttggctggttagttgtaagtcgtgaattgtggattgattttttttttttcctttttaatttttttttagatttatttatcattatacataagtacactgtagctgactctgaagagtatcattacagatggttgtgagccaccatgtagttgctgggatttgaactcaggaccttcagaagagcagtcagtgctcttactcactgagccatctcaccagcccctcccccccttttaaaataaactaactaactaactaactaactagttaattttgtcgccctatttgtgttcttcagtggcttccccagaaggcagtctaggtagcgccttacagagcatggcagctcctcctcagcttctggtctgggcttcgtagatctcactgctttcctgggcgctctccccctttgctttcaaagcctgtttcattcttgcaccagacacaaagtgggaagagaggtcacccacactggaaacatgaccgtgcttagctataaatccttagtttggattttgagacttgaaggattgacttcttcattggctacattgataggtgatttgatatgaccccctggggtagaaccagcaaacggccccaaagttaaaatgatataatcttgttaataaatacaaagaactctaatgtcttaaattattactaaagaattgctatatcatcttcatcattctttttccttatagctagaagcatccttatctgccgccaaaaagcagttagcagatgaaactttacttaaagtggatttggagaatcgctgtcagagccttactgaggacttggagtttcgtaaaaatatgtatgaagaggtaatagcataaagattttgttttgtttttctttttttttctttcccccaagacaggatttctctgcatagtcctggccatcatggagctccctctgttgcctaggctggtctcaacctcagagatttgcctgcccggcttcccgagtgctgagactaaaggtgtgcaccacccctgcctggaaatgtttccttggaaagggaacagagactgggcgtggggacttgaatactagcgtaggaaatttaggatttcagggtcatccttgccatgtagttagcttgagaatagcctgggctactttagacattatctcaaaaaaccatgggctgctaaggtgccttatcaggcatttactgttgagccaaacagtccgcatctgatccctaagcccacgttgtgggaggaaaatctacccctgcagattgtcctctgacctctgtaacaaagccgcacacaggaaagacaaaaacaaacaagtattttttttgccataaggaaaggtagctaaatacagagatggtaggatttagggataggagatgccttgcagataactgtccaagatatgtttcccttttaatggttgagacagcaatgaagaaatgcaggtaagatacagttagtacatggcattactaggtgataacagtagcaatatgcacctgtgagtgaggtcaacactgttgaaagacacacaagcactttgagctatagtgtccccttgtggcttccttaattagtcactcaagaaaatatcttcataggaagagctaaaagagacaatttttattagtgggcttatgtatctagccacaaattgtctgtccaaggctacttggtgtgtgtgtatgtatgtgtgtgtgtgcacacgcacttggtttttttttgagacagggtttctctgtgtaataggcctggctatgcttaaactcactgtttatcaggctgcccttgaactcagagatccacctgcctctgcttcccaagtgctgggactaaagacatgcatcaccactgcctggcaggacatttcttaaaacagtgaagggtcacaactgtcacttgtgttcattagtcaagagacattgctatggacaagaccctgcctgcatacatcgttactgatagtgtaacatccgattctaagagagtcccgtaaattttactgtatctaagaaaatgtcttttttagaggtgtccgtagggattgccagtaaagcaatttagaaacacaaactgtttggtgtagtgtattgtctagggtacctacagctgcgtggctctttaaaaaatcatcaggccattcattccttgccatcagagagatgaaatagctgtgcccatgagaagagctggagagttcctggtacttggggtaccgccatcatgtcgttagtcacactccagaccttctgcttgaaaactaaaaggtaacagtgtaacggtggacctgttttgagtcaggacaggcacagaggttggtctatcaagtatgagatgacctagtgcggcccttgtaagcagttgggttttatgttctttttctccctgcaggagatcaatgagacaaggaggaagcatgagacccgcttggtggaagtggactctgggcgtcagattgagtatgagtacaagctggctcaagccctgcatgagatgcgggagcagcacgacgcgcaggtgaggctgtacaaggaagagctggagcagacctaccacgccaaggtgagcttgccgggatgtgtgcgcgcgcagtcagcacctcactcacactcagagctgagggaggacgtgttccttttctaggtttttcttctaagatttatttattgattttatgggtgttttgtctgcatgcatgtacaattgtacaacaggagagggcattggattccatgaaactatagttataaatgcttgcgacaatagactgtgggtgctggaagagcagccggtgcttttaactgctaagccagctctccagccccagtaatcatttttaaaaaccagaaccagaggctagagagatgatggtgtagtaaagagcactggctgctcttctagctgggactatgaatttaattcccagcacccagatggcatctcacacccatctgtaattgtagttgtgtgggatctagtgcctttcccctgcattcagtgtggtgtacaaagatatgtgtaagcaaaatacccatatatgtaaaatcacagatgaaagaaattaaaaaaagaactttaggaagtctaaaaaatgattttcttctttaggaataagataaaatgagtatattctttttttttaattttatttatttattttatgtatatgagtacactgtatctgtatagacagttatgagccatcctgtggttgttaggtattgaatttaggaccaagactcgctccggtcaacggtgcttgctctggtcggcctgctagctaagtccctccttgctccagcccatagatttacttattattataaatatgtacactgtagctgtcttcagactactggtggttgtgagccaccatgtggttgctgggatttgaactccagcccttctgaagaacatagatcagtgctcttacccactgagccatctcaccagcccgagtatattcttaatgtagcttcatatagaccggatgctcctgggatggagatggaaacgaggttattccagtgtcgttagacataaggtttatgcctgtgtcagtggtctcccatgtcatatcttgagtagttaagcccaaagtgtctcagtactttcctctcccaggtacgtctggcccctttccacatacttctatttttgacttccacattgctttgtctgtaaattgtcactccctgtgggtggtttttgctttgttttatagcggggccaattggaaaatctgacagtgttctcttcagaggtggggaatcatcccacttacaggaacagatcacgtgatacatcttggttttgtttgtaaaagatttttttctcacatgttaaatgttatatgaatgaataaattattagttggcaacagtgttagaaaattgatgaagttatttaaaatagtttccattgtttggactccactgttcatgtagggtgttagtcatgtaatgaggtggttatgggcatcgcatacaagaggccttacagagaggtcctgtagctgcctagcacttgctgagtgcctccactaaattatgtccgggaagaactataaaagaactctctcgcctctgtttctgtctctcttgctctatctgtcttccactcctcagtctctctctctctctctctctctctctctctctctctcacacacacacacacacacacacatcccatttggagatgtgggtattgttttatgagacctgcctttgcttctgaaaggaagagtctctggttacagagttggtttggaatatagaatgcttccttcgcacacgtcactacagtcaagtttctattgtacggcatctttgttagtgctcccctagacagtaaatgcttagtggatggaatactgaaaaaataaccttgagttgatgacctagctatctagaaattgtttaaattgatagttttaggagtgagtctgaagagataggtgtgtatggtgatgtacgtcagcaaagcaagcgtgctttcctgtttcatcagctggttaccagaagggcttgggtttgaaggtcttggtgaattacgcttcctcatttcttagttccagcttcctaggtaaggctgacagtggcttcctgtccttacttacagcttgagaatgccagactctcctcagagatgaacacttccactgtcaacagtgcccgggaagagctgatggagagccggatgaggatcgagagcctctcctcacagctctctaacctgcagaaagaggtaagcagcgtcttcctttgagcaggactgaggtgtagctggaaggctggccacctgcgccatcgctgcctccctggtgctacttctcttttgtcccagatgagacatattttctcctggattttcttttatatagtgctttctggattcttttatatagtgctttctggattcttttatatagtgctttctggattcttttatatagtgctttctggattcttttatatagtgctttctggattcttttatatagtgctttctggatttttttttatatagtgctttctggattcttttatatagtgctttctggattcttttatatagtgctttctggatttttttttttatatagtgctttctggattttcttttatatagtgctttctggatttttttttttttttttttttttgtggttgttgttgttgtccattgcttaaatattgtgaggctttgtggaggtgcacaccagtaatcccagcatcagagaggcagagataagattgctgcaagttcaaggttggccagggctacatagtaagatgctgcctccgactctcccctcctccccaaaacaccctttgtacgtcagcaaaccaaccatgcttttcctgtttcataacagtaagtgacagaagtgagggctgagggagatcccgtcagctctgacgtagtgctcactctgtcacaggatgcagagctgggctgtctgtctgtctgcctgcctgtctgtttgcctgcctgcctgcctgtctgcctgtctcatctctgcagtacagctcccactcatttggtcacacttggaaaccaaaaacatactcaaattgtaactggtgactggtgaggtgccttctttctaagtccctgtggttgaaatacttaacgggttatgaatgtctatattcattaatagtcatggccccattgtcttcctggtataccccagcgacaagtgactgcgtcactccttgtgctgaccagctggctgcagtgttgccatgctccagaagaagtgaagtaggcctggatgtggcttcaagtcagttttattctggataaagtgacgcatgcgtggaacaaagcctgcatttagcattgcccctgtctgtactgtactgtactgtactgtactgtgggaagtagcttcagcctttattttcctgagggaagaaaatcctgttcaaattttattatgccattttattaggcaggtttttctttctgtttttttttttttttttgttgttgttgttattgttgttatttttagcaaaatctttaggtataaaatcactagttactgagtttagaaattaaagcagaaaacaagtcacatagaacaatgataaatcagttaatagagagtttacattgttgccttgggtgcttattaacttgtgtcataaaactttaaattattttagaattagtttgttctgctagtattttgaagtttcatgtaacaatggactacccactctattaaaccacagaccagggtgagtttaattactttcccagaggcttcagggtagcaaattccttcccagaattccctttatgtctaactctcattgaaaatcatcttggagaaatttgttctctgttgcaccacctgacttagtcttcttgggctgctatagcaaaatgttacaaatgacttcccccaagcttgagatgatctgtctccttccttccgagccctcctcccccacctcaggcccccatgattgctcagtaagtacttcactgactgagtagctccgcagcccagttcaggagcttggaatggctaagtccaggagagagagaatggtgagttcccatctcacacctctagatggcgctctccgtgtcgtgtggtaggagggcaaatacagtgcactccccagggcctgttttatgaaagtgccaattgtagttcggaggcctcagctctcccttgcactcttttagcactgccaagttacaggagtgagattttcaacatgcgaaactgggggacattaactggtacgttcctacaaatgggcctccctgctcctgcgataaattgatgtcgaccactctccccgtaagacagtgctcacttctccgtcttgtttgtgtgcctgttgcttctcttgaggctgatctttgttttacagctgaggaggccgagacttacatagcagtgggttcggggactcttgagttcagtctttagttttgtgctattattctccgttttctacaagcgcttccaggttagtgggttttaaactgttgccttgggctttctaggagcctcctgccttagtgaacagacaggcgcctgcttcagctggagtgggctttagtttctcattgctgacaggctttacctgaagaagagatgagcacactcccatacttgctggggaacctgggcaggcttacggctttcccaaccctcctgcctcacacacaatcctgcaatttcaggtgtgtgcccctgtgtccagtctaacaaaaaaggctttgagtgttttcagtcttgaagaaaaaaaaaaaagatgtgtttaagttttccctgttgtacgtctgagggttgttgggtcactggagtttcatcatgttggtgtggggccataagagtttccttctgccagtgtgacctatgctcctggcggtcttacagaaagattgaagcaacctttctagaaatatttttagaagagaagtacagagatgatgtttgggcactaggaatttcttaacagtacttggtatttgtttggtccaagtctgcctgccttgcaagagtctgcagctgcttctagcacccagactctgggaactgttgctacatctgtatcataacgagtcagtatcattgtgttatgaattataaataaaacctggagcttggagccgggcagtggtggcgcacacctttaatcccagcacttgggaggcagaggcaggcggatttctgaattcgaggccagcttggtctacagagtgagtgccaggacagccggggctacacagagaaaccctgtcttcaataaccaaaaagaaaaaagaaaaagaaaaacaaaacaaacctgggtctggtgtgatggctcagtgggtgttagaacacttagttctctcgtagaggatctgggttcagttcccagtgcccacaggatgattgggaaaccgtctataaccccagttccaggggatctggcactcttctttctaacctttgtgggcatcaggcactcgtgtcacttagtatacatgtgtgcaggcaaaactctcagatccataaaaataataaaagtcaaaaaaaaaaaaaataaagagctcatacaacgtcaggcatagagttggagtgccaaggcaggatcgtggaggtagcatagctccatcctgcctttgtgtagtgggtactgcctcaggctagctgtggctgtccaggaatgagtagctttggttgtcaggttggagcaagtacatctacccactgaggcatctctccagcccaacgctaacgttactccttttttcgtgcctcattctatcctctaccctcacatggaaaataaattgaagacaaggtgttttagaaagggaataaaaacaagcagagcccttctggggagtggatactcatagcgcagtcctgtgtgtgcagtgtaggttatctgaggatgtagtagagtttttccactttattctgtctgcaccagctggcttgtggaaggtcagaggactgctttctctcctttcaccatgtgggtcccatggatggaatgaacgatggttgtcaggcttggtggcaagtggcttttactgggtgagctatttcactggccccatactggtttgattttagattgatagtaaaataggaacaagacagttctcctctgccttacctggtttgtctgttggtagtagcatcttcttgaattaccatgggagggaccttggtcaaacccagaaactggcagtagcatactgctgttaagggactgtggtccatttgggatgcaccaggccatgagctactcttcagcctgtctgtctgcttttcacatgattggacagcttgtgagtttcaagtgcctgttctgtcacatcctatcagggaccacgtgccaataactgggaatggttgagtgtagtagcattggccgggtttatttaactgttaatagagttgtggcttttcatttcctgttgtctggctcacccagacaagaatgactaagccccatgtcctggagaggcggatctatactcactgagtggactctgttataaagggtttttctcctcaccccctcttacgtcagtggattgtgagcagtttttaaattcagtggattggctcacgtggttctcctggggcagtgctgtgagtttgaacgctatgtgctttccttttcagtactttattacttttaaattgtgtgtgtgtgtgtgtgtgtgtgtgtgtgtgtgtttatatgtatcttcatgtgctgtatgcatgtgtgtacagattcctttgggagccagaaaagggcattagattctctcaggctggagttccaagtggttgtgaggcactcatcgtatgtgctgggaacaaaacttgggaccataagagctcttatccgtcgagccacctctccagcctggccacttttttggggtgtggggtaggggttgtttttgttttcttgtgttgctggggattgaagccagggccttggtcactctatgcaagctctctaccactgagccaaccccagcatcaccttactacctggttatgtaaggtttaccacgtatttcctctgctgcgatagagttatgatagagtcatacgtttctctaagaagttctggttctttttactggagagtagaatgtgaatgtaagatctggacactgtactgctgtctcggcttctggaccttctcctaaaataggttgtgtgcacacacactcattctcagaccagattgcacacatgaacgtgcaacatagccacaatctaaatggttttcttttttttttaaatatttatttatttatttatttatttatttatttatttatttaatgtaagtacactgtagctgtcttcatacacaccagaagagggcatcagatctcattacggatggttgtgagccaccatgtggttgctgggatttgaacttcggacctttggaagagcagtcgggtgctcttacccattgagccatctcaccagccccatctaaatggttttctatctagtgatatatgtatttatagaatctatattcatcaagtagaattgctctataaaggcgttttctcccctttaaccaggaatttatgcatttctctcaaatctgatattatagggttttgttttggttttggttttgtcttttctcatgtatttgtaagctctcacaccaggcagcttggttttatcatcaagtgttttgcagagccccattctatgtttaaaagttgagcctgtatttgttaaatgaagctcagtagtacagcatttattgcaatgtcttccttccagattaagtttttccacagcaggtcccttctctgccactggtgcaggtgtgtgggatcctgggggccttggcttccattattcttttttatctggttgtacttgtcattttctgaggcctctgaaatgaagaataagtgaaaagctttaaccccgtaagctacaagattttgaagttgaacttggtgatgtaggatgtgtgacttttcattgtgtattccaaatccagcgtctatatttctggtaatattttatacatctctctgtgtagcacatgtgctttgtgtgttaacccaacaggagatgatggggccttccgattgagactggtgcattcaacatggcagccagaaacccttttcttctggttttagaaactgccctcgcagtttttcagagtgtttttacacatacttttctgctcttcttgagaaggaatatgctggcgttctgtagttaattgccactgttgaagtgagacccttgtaggaaagccagacgaggtttccagagctgtaaacatttatgtggctaatactgaaaacttacctgttcgtttttaagctttaatgtgaggaatatttctttgtagtcttctgttacccaaaacttttattgggggtggtagtggggggagactgcttctgtgtgtaccagctctggctgtcctggaactcactttgtagactaggctggctttacagagttccgtctgcctctgcctccctgctgggattaaaggtgtgcaccatcgcacccggcctacccaaaactttaagagatgtttaatcctttaaggatttgggactgtaatcgattgctcacagtcgtgatcttttgggttaagagctagagctcctttagggctgtatctactttctgcttcagaggtggtttgaagtagctgccttgtgctcatggtgacatggtcctagaaagtcaatgtgctcctttgaccctgaagtctagagcgtgtttggaaaggatccaggaattggaggacatgcttgctaaggagagagacaactcgcgccgcatgctgtctgacagagagagagagatggcggagatcagggaccagatgcagcagcagctgagtgattatgagcagctgctggacgtgaagctggccctggacatggagatcagcgcctacaggaagctcctggaaggcgaagaagagcggtaaggggctcaggcggctccaggccggacagctggtttgtgttttcctgttatccctcccccatctttctggtatatctataaaaatatctccattattttaggactgctctaagttaaacttttccttgtgtctcaggtatttgcatcagagtaagattctggttcactcaggtaaagaacagcccaactaggacctgtcgatcctgtacaaggagcttaagcatttgcaagcgtcctgagtagccccgtgcattctccagcatggagaagtattctgtcagtacatatctccaaatgtattagatggaaggaaattacatattaaatgctcccttttaaggaaaacaaaacatttaaaaaggaggaaggcgaccttgacactttgctgtcattggttttaacatcagacagtaagtagacatagatcttgacttctcattactttgagtatcaggctggcccattcatacttagtagtacagtgcgagcatccctgagtggctagatgctgctgtggtaagacccttactggcagagtgtgacatggtgagggacctcttgcttcacaactgcctgtgtggacaaggcctaggtgagtcgggatacgtgtacctcagccacaccgtcttctttcccacgtaggttaaagctctctccaagcccttcttcccgggtgaccgtgtccagagcgtcctccagtcgcagtgtgcgcaccaccagaggaaagcggaagagagttgatgtggaggagtcggaggcgagcagcagtgttagcatttcccactctgcctcagccacggggaacgtgtgcattgaagagatagatgttgatgggaagtttattcgcttgaagaacacttctgagcaggtaaatgagccggcccatctcaggcctggctttgcactgcctggctgcagtgggtagtaacagctatccgtcttctggatgctgaacccttcagtggcttgagattttctttgttctttcttaggtttgtttatagtggtgatagggatggtgtccctgtgccatggctgggtggcagccagaggaatcaatatctttccttctaccatgttgagttcaggaattgagcactggtggaagcaccacctaacggtgccatggagccatcctaccagcctgagatttcttttgtcaatcttgctttataaaactctggaccccttcaccccagacttgaccaggctatttcatgatggctttctctcttattattattattatttttttttttctaaaaaagattcatttattttttgtatgtgagtacatcattgctgtcttcagacacaccagaagagggtatcagatcccattacagatggctgtgagccaccatgtggttgatgggaattgaactcaggtcctctggaagagaggtcaggactcttaacctctgagccatctctccagcccccgtgatgccttctcaaaaatgaattaataagttttccttagctggtgaaggtgaagttgcagctatcaataaaagctttctggaaaagtatggatgcaggctcaggtctgctgaactctctgagtttatgactgacagatgctcatgatctgctttagatttatatagaacttttgacaacatgatctccatcgtttattttaagagtttatgtgaataggaagtatccaccgcagggatttctgaggtttagaacttggactttagagagctctggggttctttctgatgggactccaaggatgtagggtggtgctggagataacagagaatgggggcgcagtggggagaatgtaaatttaagtgtaaaaatgaaatgttcagggcctgataacaactgatcactccctgttgctgtttttaattaatctttactcatgtcgaccctgctacccaccccagtgttctgggttcccaaatgaaagacagaaaggcagacagacacacacacacatacacacacaccaccaccaccaccaccacctctatgttttaatatgcctcaagagcttaatagctgggtcactccaaaacctccacatggctaacacgctcccctccgatcttatggcttactaaaataatccatattccatctctgctgccctagacccagtctgcccgcctgcccactccgcccccgggctgctcttcccagctcttacctgttggctgtctgtcctgcactttttaggtgtggcagctactcctctcctgtcatggtagctaactccgtcctctaggtctcttgcccaggaatcctaaaagtcctgcctctgtctgcttgcccagccattgacacccccccccccacgcacacgcacaggcacacaagcacacacacacaaaacttcatttaccaatcaaaaccaactgggggcaggggcccttgtgtcttatatgtggacttgtggattctcttacaattttggagaccagattaacataatacaagcaacattaggctaaatccacagcgccctttctcaccgggctattagaactactgtgtgtatatgcatttaaataagtccgatagcacaggcagttccagggggtctgggctctgggggccagctggccacagcttggaaacagagaagctcttgcctcgtcctgatgtttccagattccggaggcaccggaatgtggctggtgtgtgcctcgtgggaagccttcctactcccgctgtctccatggctcctcgctgggcaggctgggcaggggcaggtagtgggcagccaggactggtgtattgattgcttctttggctcagctttactccctcaggaacagcttattccgggcaaagctggcatatgcaagagacaaaaaaaaaatcttgtctttgctagtcctaagtgtctgatttaaaaacagaaagctgtcagatcataggagttttgtttgtggtttcgagggctggcttgtgttgtaaattcttaagggcctatctaattgagcagtgaccgtgatccttgcttgtaattttcatctctcctcagttttgtcccctttaaaattcagacccttcctggtgggtgcggtgttgatgacattgctttttgcaaagagcctgtctggggtcatggatttgattatttcatagttctctgtatgtgtgaagtaaccttgttatgttgtgttttgtgactaggatcaaccaatgggaggctgggagatgatcagaaaaattggagacacatcagtcagttacaaatatacctcaagatatgtgctgaaggctggccagactgtcacagtaagtgagctcaatcatctaattttcttttcttttcttttttttttttaaaagatttatttatttattatatgtaagtacactgtagctgttttcagacactccagaagagggaggcagattttgttacagatggttgtgagccaccatatggttgctgggatttgaactccagacctttggaagagccgtcgggtgctcttacccactgagccatctcaccagccctaattttattttcttaatcacagataaggtagttgtaccaaaaaccaaaacaacagtttgaccgaaagagaagcattttagaaatggtctttaaaatgcctttgtattagtagggtatgtgtgctgtgaaatatttaaaaattctgccttagagcagtgaaaagaattgatatttggatgattttgtctgtttagttgggtataataaaatagttgcttcctgactgatcctcctcgtgcaaggattctgcatggcatcaagatctgtaggaagccaacaccagcatccgcctaaaacaacagctgcctaaactgccttggataagctttcatgttttgctatcttgccgctccattttacccttagctgttttcagggttggagttggaggcttgcctttctaacaaaggtcattcagtagtagtcagtagtagtcagatgtagttggttgtacatgccttgcacctctaaccacttgggaagctgaggcagagcattgcaagttcaaagccaacctagcttgcattagcaatactttgtcatcttgggctgggagatggaccagttaagagcacttgctgcagctccagcccgtgaaatcccaacatacaaggggaaggccctggctaagcagccattgcattagcatttgatagctatgggaaaagaagactcagtttcctctaatgatgtgactcctgatagtctgatctcactgcaggggtgggcttcagtcccacaataggcagggcagcacaaaccagacttgatggggaaagaagaaaaaagtcatctcaaagttagatgggaatggctgggaggatggtgagggcggaaaggggaggagctaggataaggcgtgcgtgtgctcagagtacattatatgaaaatctcaaagaattaatacagataattggaagaaaacaaaaaagccaggctttaatttaacagcacctgcctttaaccccagggcttgggaggcaaaggcaggtagagttctgagtttatggctggccttgtctacagagcaagttccaagatagccaggactatacacagaaaagcctgggtttgaaaaaccaaacaaagtacccattggctactcttgcagaggaccagtttaagttccaacacccactgtgggtggttcaaaatcactctgaattcaactccacgggacctgacaccctcttctggactctaaaggcacccacctacagaaatgtacaaagaagtcctcttttggaatatgaccctggtattgtccagactaacctgcttttggcctaacttcgtgaatttatcagtgtcaagagatggctaacttgcattcttagctcttactctgactaagctctgtactgacttgctctaaaagaccacattttaaacagttatgtattgagtttagagaagtatgcatcatagagcaaacaaacgcttcctttgttttcacttagcatgctaatgtgttaactttggatttcaaagaaggcatcttcttccttgaaggatgtacaaaggatgactgctcctttgtctttctgggttctgtgaacagaagcaagtgcagctgggtgtggtgaatgcatacctgtctccttgtactagggaagtagagatctggagtctaaggtcattcatagcccaacagtttgaggccagcttggacaacttgagacactatatccagaaaacaaaaggtgcccacctatatatcgcccccttgtggtttgttttgtttttttcagatgaggtctctgtaaccttgactaccttcctagaatagaccaggctggcctggagctcatagagatccgtttgcctctgcctcctgaatgctgggattaaaggctgtcacttcagacttcttccctcctcgggtccccctgtacagcccaggctgactttgaagtgatcacaaccctgtcttagtctcccacatgtttataattttgatcagtacaaaccttaatgttgaagatcaaaggctcaaaattcaggttagaacttctctaaagtatagagagctttgacatctctttgaaaacagtaggtgttaattttgtaataatgagtgaaaatgagaacaaatatcctaactgctctattctttagtaattatagtgagagaagattgcttagttctattataagtctagggaaactgcatagtgtatttaagtttggtattttacttcagaaggcttagattagaatctttgtctcatgatgtggagccgttatgccagtcatccgcttttcctctgggtgtagggcccagagactaaagcgactgctcctggaggtgtttttacagaagaacgcatcccaggagatagcgcagtacattttttctttagtagattgtattgcgtgtgatcagatttttgggacatggtagtgagggagatttcccaatgacattgttcaaggcgaattgcaaggatcggtctaaagattcaacagagatgaaagtactatgtatgcctttaaaaaggaattcttacagtttaaaaatttacaaagctgtagaattaattatggggttgcagttagtttgttgtattgagactatcctatcaaagcagagcttttagtctcagcccaggaagcagagggaggagggtctgagttcgaggccagcgtcatctacagagttctaggtcagccagggctacacaggggagccctgtctcaagaaacaaaccaaaccaaaccaaaatgtagaatatcattccaatacaaaaattattaggtagttaacttgctcctaagcctttgcaatctggggtgcgccgcacatctgttacttgattagccccctttcaggacttgagcagcctcgctctgatgtgttagtctcacactaacccaaccatgcgatttcacataaatagtgagaagtattgccaggacttaggactgaacgtgctgctctgtggctgaaagctgcccaggacctgttccgtttttttttttttttttttttttttttcagttttctcctggtaaatccccctgcccctttctgtctgtaatgctcatggaagatctggccttcctgtccagaactagagaagtaactcagtttctctgagtcagccccttgtgggctttaggtactctaagaccaagcccacctgctgcaggagaggaagctcacagcctgatattttccgaaaacaggaaagcgacttaaagggaggagggattgttggtcccaaagattcacagacgtcctccataagcctgggcttgtccttggtatttttggtatcaaccaaaatactctataaccagttacagatttacaaccagttgtgcttaaccctgcaccgtttgttctttattcaccgccttgttggtttctctgtttcttgctctgtaggattagggttgattgtatctgcctctgagggacagacctcaaaagcataatgatttgtctaggatttaaacctaggattttgttcccccctccccctctaaggatgaattctgtgtgtctgtgtcctctgtaaggttgtgtgtatcacatgcgtgcacatgcccagagagtctgactctagatcccctgaaactaatgtcaggtgtggtcaggaagcaacctgatagaggttctgagcatcgaacctgggctctccgcaagggctgcacacttcaccgccgagctcattccctcagccctctgtacctgggttttctattctacctgtttccctctgccaaaaatacataaaaaatggcagaatttccatgctgatgaggggaatgtattttttcctttggcttatttcaatagcaatcatattttacctgcagcatttcctgcattctttgtggagcataatctgagatgggctggggcactgtgacactatgtctgcctggggatgagacactgtctctgaatatttcagatagactgtaagttgttagaaggttaatttctgttgttgaaattggagtcgtgtgtgcgtgcgtgcgtgtgttcgctgaaggcccatgaagcccatagaacaattgataatgctactattttgtagcgagcccactcctttgtattggctgtcagtttaccagcagtcctgcccattgtaggtaccattgttgctttatttttgtgaatgaagaaaataaggaaatttgttctaggttagctgctttgaggaatagctgggccagagtgtggcagctttattttaggtgcgcatgtgtccatatacctgtcctatgaggaagttggatgcttacagtctctgagtggtagtgaccacacacagctagctctcagcaaagcagctggacagagtcgtcaggctactggaggtgagaattaggtctcatcacgttgctggacttgaacgtgagcactggcttctggctggctgatggtgtcctttcctttttcaggtgtgggctgcaaatgctggcgtcacagccagccctccaactgacctcatctggaagaaccagaactcttggggtactggtgaagatgtgaaggttatattgaagaattctcagggagaggtacgaccgcatttcaccggaaggttcactgagtgatttcttatcagaaatcccattgaaatgtgaagtaactgagactttagtcagactaaggctgccaagtaatagacaccgagaaaacggacacaccacacatttgaaaaattgtgtctcatagggtattgatttattcacacagggtccaatttccctgggcaggttctgtctccactgtgcattggctttgggaccctgaataatttcacctctgactgttcatatcatatgagttttatcaaacagaatctgctgctgtgtatttacctggtaaatgcttatactgttaacctagtaaatttttgtcaaacttcctaagtgtaagattgtggcacgtatctttttggcatgttcaaccatgttagttgtagaattcttgtcaaagaacaatggctacatttgatgtttgatgtaaggagtcaggttctatattatgatgctgtttggctgtagtagcacagactttaatcccagcagttgggaagcaggaggctctctgagtttgaggccagcccggcctacagagtgagttccaagacagctagggttacacagagaaagacctcttgacagtgacaggacagctcatcataatgctgttgttttggttagaatagtgatgcacatgttctgagtgtctgagaagactggctttgcagagcctggctcaggctatagcctccttaggcctgtttcactaactcaagccacatacagccatctcagcacctagtttggtttacagaatgtgtgcttgaatgtgtttcatattgatggatatgcattgaagaagccatgcaacactgtctttggggtttcttagtctttttgttttaaaccaggggctttgttaaatttcagatggttcttactgaagcaattccactgtggagttctgtgttgaatgacctttgaactagacagtattcatactagctgcaggttagctcatgcttaaacttggcagcttttggccacctcagcattctctgcaggaaagttaccagtgcttggacgctttagtagaaaatggaaatagtattttgtgctgcacttaaaagaatgaccagagctctgtttctgtatggtgcattcgagctcagtggtctgatactaggagttggtgccaatctgtccaggttccacttcctgatggagtgaaaggtgctgtcttggccttccaactccccaggtggtcctgctgcccctatggtcgttcctgcggttagagcagctggctccacctttgttttattcagcatttatttagcaccttttctttgccagcagccaagatgtttaagcagaattcacgttgagttttataaagaatttagtatgccaaatcacttgcacagaattttccagaagagactaggataaaaagcattagaaacttctcagcaggtatttcaaattggataccagtagctcccctgcaggaaaaatcgaaggtctactaactgctgctaattatgcagaattcactagctaaagctgccgatgaaatggctttaaaaagcctcccttagccttctggtttgaagtctactgtgttgcttttaggaggttgctcagagaagcacagtcttcaagaccaccatacccgaggaggaggaggaggaggaggaggagcccatcggagtggctgtggaggaggagcgtttccaccagcaggtacggttttcatgttagtagtagaactgcccaaaagcctgtttgggtttccttcctgtattcaaacccagccagtggccatccccctgctgcagtgcacactcccctcaccggtggtgcacaaagcaacagacttggatgcagcagagaatggtagccctttaccgtttctttctttgtcaacgtttagcctttgtcttctgttttctggttaggtaatatgttgtgttgaatatgtatataacttacaaaagcatagattagatcaaatgccgaacgaagccttattggactctgaaaagtttatgttgctaaacgagaacagcattcacatagcagaaaacaagacccagagccacattgagtttcagtgtggagccacattcattgctgtcatgaagctgccattcacaaagtagttgcaagagtttagctgataactgggcttcgcagaaccccaaactccagctaaaccccaagttctgttttaactaattaattttgggaagaatgttaatataactaatgagccttcagtttatattctgctatgtaacagtgtagaaactgttgagtgatcattagtttgcctcttcctgtctccatgtctccgtgtttgtaatttaggttggccttgtgtcttagtcactggtgctgggaagagattccatggccagggcaactcttagggaagcaggcacggtgctggagcagtagctgagagctatgtcctggtcctaggcagagacatctcaaaacccactcccagtgacacagttctccaacaaggacacacctcagtccttctaatctttataaatggtgccactcactggtgactaagtcttcaagtacatgagtctgaggcacattcttagtcagagcacaccttgcccttagcacacttcatgtgtgcaaccccatttgtgtattcacctgaggtgggattttatttcatctgggtgccttgttattttgctggcatagtttaccaagtatgttatggtcctaccctcaatggaaactcgaaatgactgggagatgacatttgagacaagtgacctgatgagtcctgctgctcagacactggggaaggctgtagcggcctttggtgtcactataaacagctatgggaaaggcacttggacagtgtggtggaggatatttgggcgttagagaaagagcagatgttagtgtttgaactgccagtggaatacactgaagctgggcttaaaaacagtttttagtcctgatgattctttggtttgattgagattgattagggctgagagtactcttccagtgtgggtcagccaagcttctttacagaatagcatcttctgaaagagggcctagaaccccttctactgctgtctctaaaaggaacgaagaccaaagtgtggacactttgccccttcttagaattgggaacaaaacacccatggaaggagttacagagacaaagtttggagctgaaaggatggaccatctagagactgccatatccagggatccatcccataatcagcctccaaccgctgacaccattgcatacactagcaagattttgctgaaaggacccagatatagctctctcttgtgagactatgccggggcctaggaaacacagaagtggatgctcacagtcagctattggatggatcatagggcccccaatggaggagctagagaaagtacccaaggagctaaagggatctgcaaccctataggtggaacaacaatatgaactaagcagtaccccggagctcttgtctctagctgcatatgtatcaaaagatggcctagtcggccatcactgcagagaggcccattggtcatgcaaactttatatgccccagtacaggggaccgccagggccaagaagtgggagtaggtgggagggtatgggggacttttgggatagcattggaaatgtaaatgaggaaagtacctaataaaaaatatttaaaaagaaaaaaaaaaagtgggcctgagaggcactgaggagaaggcaagccggctccttggtggaaggagggatggagagttatgggatgtttgtcagttttaggcaagtcccctgccgttgtcacgatggagagccaccaagcacagtgcaggtgatccagtgccctcgggactgataagtttgagtttttgtctagttagcagtgggtcacaagtcacacaaggagtgagttttggtaggcaagtgacactgagcaatgtcccagctctttaaaggattaaacctttttgtcttgtgtgtctgagtgtttttcctgcatttgagtacacctaaccatgcagtatctgtggaggccagaagggggcatgggatccctggacctacattacagagtcaaacccagggtctcctagagagcagctgctgctcttaaccacagagccatctaatttacctctccagcccccgctgcagctctttacattaaaaaaaaaaccacagtttgtagaatttttcttattaagattagatcttgctatgtctgtgacctcagctggcctgagtttctattttaagtgagaaaatcttaactgtttacaggcctaggtcagcttttatttgttttgtgggaaaaactggtgtagtcagagtggaagctcagttgtggggtttgttgaagtgagcccttagagaatgctggaaagcatgaggtgtgagctggctcattttaagtagggagtgcagcgctttagtgactgggggaaatggctggcctttagaacactgtaatattgctggtactgactttccttctgtttcccctctcagggagccccaagagcatccaataaaagctgtgccattatgtgaacttgtcaagacatggtcgatcttcctcaagctagaagcatggagtcctgtatacagtgcagagccttctcagaagcacatgatatttttgtatttcctttatgtgaatttttaagctgcgaatctgatggccttaatttcctttttgacactgaaagttttgtaaaagaaatcctatccatacacgttgtaagatgtgaattattgacactgagctaactgtactgtttggaaaggggccctcaagtttttggcatttttctttcctttttgtatgtgtgtatgtaattttttttttttaagttcttttaaggggggacaaggagggtaagaaaaccactgcgtgtccgggcataattgaagcttgctctccctagatgggtggtctgctctcggtccttctctgctctctataaaatggtgctgtgcgggagggaggggggaagtttttcaatatatgaacttttgtatggaatttttttgtaataagtgatcaaggttacaaattttttttttaaatagaaaagagaagaaaaacgttgtaagaaggcaatattaatctagtcaccatgtacgcactctggatggaggttctacagagctgttgattggtcaactacttctcttacattgttgactcatgaggggagcgggcaggcggggtgagggtgggggaaggctttctcttcaaattcgctagttgagtttttaagatagtgtaacatgcttacatttcttatccgacattaacaaataaaacgctgttttcctattaatctactg

SEQ ID NO: 143 - DNA, 818 bp, Mus musculus
gccgctcagccccacgcgcctgtcgcgcctgcaggagaaagaggagctgcgggagctcaacgaccgcctggctgtgtacatcgataaggtgcgcagcctggagacggagaacagcgcgctgcagctgcaggtgaccgagcgcgaggaggtgcgcggccgcgagctcaccggcctcaaggctctctacgagaccgagctggccgacgcacgccgcgctctggacgacacggcccgcgagcgcgccaagcttcagatcgagctgggcaagttcaaggccgagcacgaccagctgctgctcaattatgccaagaaggaatctgatctcagtggagcccagatcaagcttcgagagtatgaggcggcactaaactctaaggatgcggcgctggctactgccctaggggacaaaaagagtttagagggagacttggaggatctgaaagatcagattgcccagctagaagcatccttatctgccgccaaaaagcagttagcagatgaaactttacttaaagtggatttggagaatcgctgtcagagccttactgaggacttggagtttcgtaaaaatatgtatgaagaggagatcaatgagacaaggaggaatcaccatgtacgcactctggatggaggttctacagagctgttgattggtcaactacttctcttacattgttgactcatgaggggagcgggcaggcggggtgagggtgggggaaggctttctcttcaaattcgctagttgagtttttaagatagtgtaacatgcttacatttcttatccgacattaacaaataaaacgctgttttcctattaa

SEQ ID NO: 144 - protein, 50 aa, Mus musculus
MKLYLKWIWRIAVRALLRTWSFVKICMKRRSMRQGGITMYALWMEVLQSC

SEQ ID NO: 145 - DNA, 2265 bp, Mus musculus
gccgctcagccccacgcgcctgtcgcgcctgcaggagaaagaggagctgcgggagctcaacgaccgcctggctgtgtacatcgataaggtgcgcagcctggagacggagaacagcgcgctgcagctgcaggtgaccgagcgcgaggaggtgcgcggccgcgagctcaccggcctcaaggctctctacgagaccgagctggccgacgcacgccgcgctctggacgacacggcccgcgagcgcgccaagcttcagatcgagctgggcaagttcaaggccgagcacgaccagctgctgctcaattatgccaagaaggaatctgatctcagtggagcccagatcaagcttcgagagtatgaggcggcactaaactctaaggatgcggcgctggctactgccctaggggacaaaaagagtttagagggagacttggaggatctgaaagatcagattgcccagctagaagcatccttatctgccgccaaaaagcagttagcagatgaaactttacttaaagtggatttggagaatcgctgtcagagccttactgaggacttggagtttcgtaaaaatatgtatgaagaggagatcaatgagacaaggaggaagcatgagacccgcttggtggaagtggactctgggcgtcagattgagtatgagtacaagctggctcaagccctgcatgagatgcgggagcagcacgacgcgcaggtgaggctgtacaaggaagagctggagcagacctaccacgccaagcttgagaatgccagactctcctcagagatgaacacttccactgtcaacagtgcccgggaagagctgatggagagccggatgaggatcgagagcctctcctcacagctctctaacctgcagaaagagtctagagcgtgtttggaaaggatccaggaattggaggacatgcttgctaaggagagagacaactcgcgccgcatgctgtctgacagagagagagagatggcggagatcagggaccagatgcagcagcagctgagtgattatgagcagctgctggacgtgaagctggccctggacatggagatcagcgcctacaggaagctcctggaaggcgaagaagagcggttaaagctctctccaagcccttcttcccgggtgaccgtgtccagagcgtcctccagtcgcagtgtgcgcaccaccagaggaaagcggaagagagttgatgtggaggagtcggaggcgagcagcagtgttagcatttcccactctgcctcagccacggggaacgtgtgcattgaagagatagatgttgatgggaagtttattcgcttgaagaacacttctgagcaggatcaaccaatgggaggctgggagatgatcagaaaaattggagacacgaggaggaggaggaggaggaggagcccatcggagtggctgtggaggaggagcgtttccaccagcagggagccccaagagcatccaataaaagctgtgccattatgtgaacttgtcaagacatggtcgatcttcctcaagctagaagcatggagtcctgtatacagtgcagagccttctcagaagcacatgatatttttgtatttcctttatgtgaatttttaagctgcgaatctgatggccttaatttcctttttgacactgaaagttttgtaaaagaaatcctatccatacacgttgtaagatgtgaattattgacactgagctaactgtactgtttggaaaggggccctcaagtttttggcatttttctttcctttttgtatgtgtgtatgtaattttttttttttaagttcttttaaggggggacaaggagggtaagaaaaccactgcgtgtccgggcataattgaagcttgctctccctagatgggtggtctgctctcggtccttctctgctctctataaaatggtgctgtgcgggagggaggggggaagtttttcaatatatgaacttttgtatggaatttttttgtaataagtgatcaaggttacaaattttttttttaaatagaaaagagaagaaaaacgttgtaagaaggcaatattaatctagtcaccatgtacgcactctggatggaggttctacagagctgttgattggtcaactacttctcttacattgttgactcatgaggggagcgggcaggcggggtgagggtgggggaaggctttctcttcaaattcgctagttgagtttttaagatagtgtaacatgcttacatttcttatccgacattaacaaataaaacgctgttttcctattaatctactg

SEQ ID NO: 146 - protein, 341 aa, Mus musculus
MYEEEINETRRKHETRLVEVDSGRQIEYEYKLAQALHEMREQHDAQVRLYKEELEQTYHAKLENARLSSEMNTSTVNSAREELMESRMRIESLSSQLSNLQKESRACLERIQELEDMLAKERDNSRRMLSDREREMAEIRDQMQQQLSDYEQLLDVKLALDMEISAYRKLLEGEEERLKLSPSPSSRVTVSRASSSRSVRTTRGKRKRVDVEESEASSSVSISHSASATGNVCIEEIDVDGKFIRLKNTSEQDQPMGGWEMIRKIGDTRRRRRRRSPSEWLWRRSVSTSREPQEHPIKAVPLCELVKTWSIFLKLEAWSPVYSAEPSQKHMIFLYFLYVNF

SEQ ID NO: 147 - DNA, 2781 bp, Mus musculus
acaaagtgctgcgggcgggagactcgcgtccgccgcgcacagccgtctgcgtctcccggctgccctggcctcttcccgcgcgcgtctgcgagtgtgcgtgtacactcacaaagggcgtctggcgggcgatcgcggccctcccgcttcgctctttgtgcggtagccccgccgccaccgccagcccaggtccgctcgatcctcaccggcctgtggtttgtaccttcggtcccgccgcccgccatggcgaccgcgacccccgtgcagcagcagcgggcgggcagccgcgccagcgcccccgccacgccgctcagccccacgcgcctgtcgcgcctgcaggagaaagaggagctgcgggagctcaacgaccgcctggctgtgtacatcgataaggtgcgcagcctggagacggagaacagcgcgctgcagctgcaggtgaccgagcgcgaggaggtgcgcggccgcgagctcaccggcctcaaggctctctacgagaccgagctggccgacgcacgccgcgctctggacgacacggcccgcgagcgcgccaagcttcagatcgagctgggcaagttcaaggccgagcacgaccagctgctgctcaattatgccaagaaggaatctgatctcagtggagcccagatcaagcttcgagagtatgaggcggcactaaactctaaggatgcggcgctggctactgccctaggggacaaaaagagtttagagggagacttggaggatctgaaagatcagattgcccagctagaagcatccttatctgccgccaaaaagcagttagcagatgaaactttacttaaagtggatttggagaatcgctgtcagagccttactgaggacttggagtttcgtaaaaatatgtatgaagaggagatcaatgagacaaggaggaagcatgagacccgcttggtggaagtggactctgggcgtcagattgagtatgagtacaagctggctcaagccctgcatgagatgcgggagcagcacgacgcgcaggtgaggctgtacaaggaagagctggagcagacctaccacgccaagcttgagaatgccagactctcctcagagatgaacacttccactgtcaacagtgcccgggaagagctgatggagagccggatgaggatcgagagcctctcctcacagctctctaacctgcagaaagagtctagagcgtgtttggaaaggatccaggaattggaggacatgcttgctaaggagagagacaactcgcgccgcatgctgtctgacagagagagagagatggcggagatcagggaccagatgcagcagcagctgagtgattatgagcagctgctggacgtgaagctggccctggacatggagatcagcgcctacaggaagctcctggaaggcgaagaagagcggttaaagctctctccaagcccttcttcccgggtgaccgtgtccagagcgtcctccagtcgcagtgtgcgcaccaccagaggaaagcggaagagagttgatgtggaggagtcggaggcgagcagcagtgttagcatttcccactctgcctcagccacggggaacgtgtgcattgaagagatagatgttgatgggaagtttattcgcttgaagaacacttctgagcaggatcaaccaatgggaggctgggagatgatcagaaaaattggagacacatcagtcagttacaaatatacctcaagatatgtgctgaaggctggccagactgtcacagtgtgggctgcaaatgctggcgtcacagccagccctccaactgacctcatctggaagaaccagaactcttggggtactggtgaagatgtgaaggttatattgaagaattctcagggagaggaggttgctcagagaagcacagtcttcaagaccaccatacccgaggaggaggaggaggaggaggaggagcccatcggagtggctgtggaggaggagcgtttccaccagcagggagccccaagagcatccaataaaagctgtgccattatgtgaacttgtcaagacatggtcgatcttcctcaagctagaagcatggagtcctgtatacagtgcagagccttctcagaagcacatgatatttttgtatttcctttatgtgaatttttaagctgcgaatctgatggccttaatttcctttttgacactgaaagttttgtaaaagaaatcctatccatacacgttgtaagatgtgaattattgacactgagctaactgtactgtttggaaaggggccctcaagtttttggcatttttctttcctttttgtatgtgtgtatgtaattttttttttttaagttcttttaaggggggacaaggagggtaagaaaaccactgcgtgtccgggcataattgaagcttgctctccctagatgggtggtctgctctcggtccttctctgctctctataaaatggtgctgtgcgggagggaggggggaagtttttcaatatatgaacttttgtatggaatttttttgtaataagtgatcaaggttacaaattttttttttaaatagaaaagagaagaaaaacgttgtaagaaggcaatattaatctagtcaccatgtacgcactctggatggaggttctacagagctgttgattggtcaactacttctcttacattgttgactcatgaggggagcgggcaggcggggtgagggtgggggaaggctttctcttcaaattcgctagttgagtttttaagatagtgtaacatgcttacatttcttatccgacattaacaaataaaacgctgttttcctatt

SEQ ID NO: 148 - protein, 582 aa, Mus musculus
MATATPVQQQRAGSRASAPATPLSPTRLSRLQEKEELRELNDRLAVYIDKVRSLETENSALQLQVTEREEVRGRELTGLKALYETELADARRALDDTARERAKLQIELGKFKAEHDQLLLNYAKKESDLSGAQIKLREYEAALNSKDAATALGDKKSLEGDLEDLKDQIAQLEASLSAAKKQLADETLLKVDLENRCQSLTEDLEFRKNMYEEEINETRRKHETRLVEVDSGRQIEYEYKLAQALHEMREQHDAQVRLYKEELEQTYHAKLENARLSSEMNTSTVNSAREELMESRMRIESLSSQLSNLQKESRACLERIQELEDMLAKERDNSRRMLSDREREMAEIRDQMQQQLSDYEQLLDVKLALDMEISAYRKLLEGEEERLKLSPSPSSRVTVSRASSSRSVRTTRGKRKRVDVEESEASSSVSISHSASATGNVCIEEIDVDGKFIRLKNTSEQDQPMGGWEMIRKIGDTSVSYKYTSRYVLKAGQTVTVWAANAGVTDPTDLIWKNQNSWGTGEDVKVILKNSQGEEVAQRSTVFKTTIPEEEEEEEEEPIGVAVEEERFHQQGAPRNKSCAIM

SEQ ID NO: 149 - DNA, 60084 bp, Homo sapiens
tggggagtgcggcgccgcggcccgcgccacctccgccccccgcggcttgcctccagcccgcccctcccggccctcctccccccgcccgccgctccgtgcagcctgagaggaaacaaagtgctgcgagcaggagacggcggcggcgcgaaccctgctgggcctccagtcaccctcgtcttgcattttcccgcgtgcgtgtgtgagtgggtgtgtgtgttttcttacaaagggtatttcgcgatcgatcgattgattcgtagttcccccccgcgcgcctttgccctttgtgctgtaatcgagctcccgccatcccaggtgcttctccgttcctctaaacgccagcgtctggacgtgagcgcaggtcgccggtttgtgccttcggtccccgcttcgccccctgccgtcccctccttatcacggtcccgctcgcggcctcgccgccccgctgtctccgccgcccgccatggcgactgcgacccccgtgccgccgcggatgggcagccgcgctggcggccccaccacgccgctgagccccacgcgcctgtcgcggctccaggagaaggaggagctgcgcgagctcaatgaccggctggcggtgtacatcgacaaggtgcgcagcctggagacggagaacagcgcgctgcagctgcaggtgacggagcgcgaggaggtgcgcggccgtgagctcaccggcctcaaggcgctctacgagaccgagctggccgacgcgcgacgcgcgctcgacgacacggcccgcgagcgcgccaagctgcagatcgagctgggcaagtgcaaggcggaacacgaccagctgctcctcaagtgagtgctagctggcggccgcgttagcgccaaggaggggcgggggcgcaaccgcggcgaccagctcaccgggttctgccgtggggagggagcagaggccaggatgcacgcgtccttctgaaggaacagggtctcggtctccggaaaggagaaagaatctagagttcatagcggagcaggggtcgcggagggggctcgagctgtagcgctggggggccgtgatgcccatttctagattttggatacccgctgggacgtggtaagtgcgcgcctgggactgccgagaaggagctcccgctttcgcactcgaatccggggagccggcgcggagaggcggcccctcaggccccaggtgcggggagctggagcgcgagcgcgcgctcgcgtgcgcgccccagtttccggccggcgcgagacaaagcgtctagcggatttgcagtgccgggatgggcggccggggaggactggcagcccgcctctagaatgaatgagcttcgcgcgggcagagagaggaaggggagggactttcccgcagcatccgcgtctcctgggggtgggtcccgctttggcgcgctcagtcttggccctgtgacgttttgcgaagattctacgcctgctttaggcgggagagagaggcggagcttgatccgtgcgcctccagccagccccgggcaagttaggtttgctagctggttagctttctctggggaaatgtgtcctgtcccagcggggatggtgcggtccctcgggtggttctgcgcagggaaggaaagctgggtttgtgcatgtcacggctaccgttcttagaattgcggttctcctacccctcaggcagcggccctctgtccccagcttttgcctcctcgtagtatagtcaggctttcgggtagagactgtgcttagtaccccttagtcgaccactgtgcagatagtagaccagggcaggtgacagggtgctgtgtaaatgctgagtgtttgagcgaaggagagtttgtaattcacctaagcgagtgcgagttttcattccagtgcacaaggatacatttgcagacctttgctggccttattttgactttctgataagcaaaatggcctgtcatcagtaggcaacaagtgttgatgtcatgctttagagatttgcaaaatttgggtctgaaattcatggtcgccattagcactgccagctgaaatttctggaggtaccttattctcactttgacaccctttgcccctggatgtctttctgtctgtatctgcgtgaatgtccctgtccgaagtctctgagattttgtgtatttttacttatccctcctatcatatgttttcggttcataaaaaagcatgtgcacgtggtaagaataaaatagtatagactggtttgtagcgaaaaacgataactgcactacctctttccggaggcaatcacatttatccctttttgtttttatttctttggatatttagttatacaactcgaaaataatactaagcttgtatttccctttcttggatttactaagccttggtttcatcttttaaaatgagcagtcagttaactcacactattatttctatgttcctccaaattttttgccactgaattccttcaaatcttagatatcgttgcttgtaagacttgccattattatgtgtaccactaagaaaataaaaacatcaggaccaactgtgtaggatccatcctgttggacccatcatgatgggtttcatagatattaaaatgtcaaacagggccgggcgtggtggctcacgcctgtaatcccagcgctttgggaggcgaggtgagcggatcacttgaggtcaggagttcgagaccagcctgaccaatatggtgaaaccccgtctctactaaaaatacaaaaattggccggacgcgggggctcacgcctgtaatcccagcactttgggaggccgaggcgggcggatcacgaggtcaggagatcgaggccatcctggctaacaaggtgaaaccccgtctctactaaaaatacaaaaaattatccagacgtggtggcatgcatctgtagtctcagctacttgggaggctgaggcaggagaatcgcttgaacccaggaggcggatattgcagtgagctgagattgcgccattgcaccccagcctggcgacagagtgagaccccatctcaaaaaagaaaaaaaatccgggcgtggtggcgggcgtctgtaatcccagctactggggaggctgaggcaggagaatcgcttgatatccaggaggcagaggctgcagtgagccagatggtccactgcactccagcctgggtgacagagtgagactccgtctaaaaaaaaaaattaacacagatcaaatatctgttgcgtaccagtcaccgttctatgttagaggatatgaagatttttttaaaaaaatgaattactgttctttgttgctgagagtgtagtgggggagctatatcccagcaagtaaagaaagattgtcttttgtctgatgtgaagcattttgatgctggcgcttttgtaatctttccaggagttagccacaggaggtttttcacacagtaacaaggctgccacctggctgacagtagttgtaaatgtatcgattctaaaatgcatgctggtttcagcggggttaaaaaatgagaataatgtgtattagaatcaatgaaataatgcatgtgatacaatttaggtaatagcagatgctaagggaataaaaataaagcggagtgaagggttagtgtgattaaggaaggcctgtctgaggagttgacagtacctattctctgagggttagtagtgttctgggattatatttttcttaagtctgtgctactgtatgtatattcctattgccaggattagatgactcttcttttccccccaacataccatcatttgctcaaaacatgccacattttagtttgctccttatttgaattaggactttttttatatggatttattcctcaatagcttttcatttttcttgttaagaaaaatttgccctcagtgtgtttgcagactttttgaagatatttaatcataatatctatcacatgaatctgctttcttccctagagttctctttgcttaaggtaggctgtgtactgatgtcctgtaacttattaaagacagcttcctggccaggcacggtggctcacacctgtaaagcactttgagaggcctaggcaggtggatcacctgaagtcaggagttcaagactagcctgtccaacatggcgagaccccgtctctactaaaaatacacaaattagccgcgtgtggtagtggacgcctgcaatcccagttactgtggaggctgaggcaggaggcattgcttgaaccggggaggcggaggttgcagtgagctgagatcacaccaccgcactccatcctgggtgtattttccttttccttggtttcttcatattttgttgaagaacatccttaagtaatttattcagaaaggatggcaggaggtaaactttctgagtcctgtatgtctgaaaatagctttgggctaggtatagaatactaggttaacatttttccagaacttggaaagtattattttgccctattgtcttctggcatctagggttgttaatgtctttctttttttttttgagacggagcttggctcactgcaacctccgcctcccaggttcaagcgatgctcttgacccagcctcccaagtagctgggattacaggtgtgcaccaccacacccggctaattttgtatttttagtagagacggggtttcaccgtgttggccaggctggtctccaactcctgacctcaggtgatccacccacctcggcctcccaaggtgctgggattataggcgtgagccaccatgcctggcctatatttaattttttatttggaactagagtgtttgtaattaagtataatcatcatttaggtagatttagattaagaaaacagctttgagagaattatagattccaggttacttagtttctttttggttcctcagcaaacaagataccttagaggcagagcatggaaatgcttggtctaaagagaatttggcaacagtttccatgcaggtggtgtctgaatccatagaaaacagacctcatatgtaaggtacagttactttgattcagtccaagactgattatattttgctgaaagcttttttgagagaacagtttccaaaaatgatgatgaatgccatcactcaacactttaaacaaaaagtacagagaaattgacttgtttcagattttcactgttaactatacgggaaaactagatataacagaaagttaagtgtttacatcagtcttcaataactgattttgtggattcagacatttattttccttcagtgatacaggtcccgtatcttttctgtaaaaccctgggggccagatgtgctttggaagttaaagcaattccaatttaagacggtaatatgatgcacatactggatatgacacccccagtggggtttatagatagagttagggtagatagagttagcactctatcatgaaacatttctgagggaaagatattgtcatggcaagtggagaaagacagattgaaaatagacctggtttcaggtcaggttttgccactaaatgtgttaataaaaattttaggttttcaaactctggaagtatagataaaagatggtgaatttttgtttttatttatttattttttgacacagagtctcgctcttttgcccaggctggagtgcagtgacacaatctcagctcactgcaacctctgcctcctgggttcaagcaattcttctgcctcagcctcccaagtagctgggattacaggcacccgccaccacgcccaggtaatttttatatttttagtagagaccaggtttcaccatgttggccaggatggtcttgatctcttgacctcgtgatctgcccgcctctgcctcccaaagtgctgggattacaggcgtgagccactgtgcctggtcaaaaacatgctaatcttctttaggagtgttttctttgtacataggatgattaattgaaaaacaaaaacctttggctgggcgtggtggctcacgcctgtaatcctagcactttgggaggctgaggtgggagggtcatgaggtcaggagttcgagaccagcctgaccaacactgtgaaaccccatctccataaaaatacaaaaatcagccgggcgtggtggtgcacgcctgtaatcccagctactttgggaggctgaggcaggagaatctcttgaacccagcaggtggaggttgtagtgagccaagatcgtaccactgcactccagcttgggcgacagagcgagactctgtctcaaaaacaaaaacaaacaaacaaaaaaaccacaaaaaacaaaccttcatcatcctgtgtattactatatctttttttaatgtactgattttgccctatttgaagcagattgacagtatacatcttggccttaatataagagttatcaaacttttatatttttataactcttaaaatataagagttataaaactagttttctttataagagttataaaactagttaaactgcttttcatagttcttttataacagagttatgttaaatgttactttaattttcaagggaagacttggaaggaccaaacccctaaaaatgatttaaaagtctaggaagcaggtcccaagtaattaaactgtcatgacatttccttcccatgctttcaaaagatgtttgataaagcaagatcttttggagttgtttatttaacttaggggatgagactaggtaatattttgcatacccagattcaaggaagtaaacaggcagaatgaaagataaagcactattaaaatatggtgggtcttttcttttttgtgtctttacacagttgctggttatatttattctttcgtttgtatagatggtgtcacctctgatatgtctgagttagaaatcttcagactttttttttatgccattagtgtaagtctctttcatgtacaaatgttgagaatgagcctcaggtatcagttgagtaatgggaccctgtataggtcccattatttttaggatcagggaagtttttaaaatcagttttaaaccctttttacagtgtacctctttgataaggagattgtgctttggctgtcatttgattttttttttttttttttttttttttgagacagagttttgctctcgttgcccaggctggagtacagtggtgcgatctcagctcactgcaacctccgcctcccgggttcaagcaattctcctgcctcagcctcccaagtagctgggattacaggcatgcgccactacacccggctgattttgtattttttttttaatagacttggggtttttccatgttggtcaggctggtctggaattcccaaccttggatgatccgcccgccttggcctcccaaagtgcggggattacaggcgtgagccaccgcacctggccggctgtcatttgaatttttattattttattttattttatttttttgaggcagggtctcgctgtgtcgcccaggctggagtgcagtggtgcgatctcggctcactgcaacctccgcccctccaggtttaagcaattctctgcctcagcctccggagtagctgggattacaggcacgtgccaccacgcccggctaattttttgtatttttagtagagatggggtttcaccatcttgcccaggctggtcttgagctcctgacctcgtgatccacccgcctcggcctcccaaagtgctgggattacaggcgtgagccaccgtgcctggcttgaatttttttttttttttgagacggagttttgctctgtcgcccaggctggagtgcagtggcgccatctcggctcactgcaagctccacctcccgggttcacgccattctcctgcctcactcagcctcctgagtaactggaactacaggcgccctccaccacgccgggctaatttttttttatatttttagtagaggctgggtttcaccgtgttagccgggatgggctcgatctcctgacctcgtgatccgcccgcctcagcctcccaaagtgctgggattacaggcgtaagccactgccctccgcccgaatttttaaaaattaattttattattattatttttgagacggagtcttgctgtgtcaccaggctggagtgcagtggcacaaccttggctcactgcaatctctgcctcccgggttcaagtgattctgccgcctcagcctcccaaatatctgggattacaggcacccgccaccatgcccggctaattttttttttttttaatttctagtagaaacggggtttcaccatgtcggccaggatcatctcgatctcctgacctcgtgatccgcccgccttggcctcccaaagtgctgggattacaggtgtgagccacggtgccctgcctaaaaattaattttttttttttttaataactgagtcttgctctgtcgccaggctggagtgcagtggcacgatctcagctcactacagcctctgcctcccgtgttcaagcaattctcctgcctcagcctcctgattagctgggactacaggcacacgccaccacgtcggctaattttttttttctttttctttttctttttttttttttgtattttagtagagacgaggtttcaccaggttgcccaggcttgtcttgaactcctgagctcaggcaatatctgcctgcctcagcctcccaaagtgctaggattacaggtgtgagccacggtgccaggccaaaaattaaattttttaaacagcaaatgtatattcattatagaaaaggagaaaacacaaacaccaagaagaaaattcttggttgggccttaggttgggcccaacccttaggttgggcccagcggctcatgcctgcaatcccagcacttttggaggccgaggtgggcggatcacctgaggtcagcagttcgagaccagcctggccaacatggcaaaaccctgtatctactaaaaatacaaaaattagccgggcatggtggtgggcacctgtaattctagctacttaggaggctgaggcaggagaactgcttgaacctgggaggcagaggttgcagtgagccgagatcgtgccactgcactccagcctgagtgacaaagcaagactccctttggggggtgggggaaaagatgcaggaaaaaaaaaagctgacatttattttgtgccaattctgtttgccaggcattacagtagatgctttacagacattatcttttttttttttttttttttgatgcagagtctggctctgtcgcccaggctggagtcctggagtgcagtggcacgatctcggttcactgcaggctccatctcttgagttcacgccattctcctgcctcagcctcccaagtagctgggactacaggtgcccgccactacgcccggctaattttttgtattttttagtagagacggggtttcactgttagccaggatggtctcgatctcctgacctcgtgatcctcctgccttggcctcccagagtgctgggattacaggcgtgagccaccgttcccggccagacattatcttttaagctcatgataactgctgatgagtaaggaaacttcaggctcagagagtttaagtattttgcctggtattacttagcaagtaatgaaagctagaaaggatggtagcctgacttctagcattgtgatagggtgttcacatacataaccttatttcatccatacaacagtgttctacaggtattactctggtttaccgacatgtagcaggctcacagagcatcattatctgtggttggtacttgaagtctcagataggatagttgattttcagatccctttgggtgctacttttggaaatgctactagttgcatgtttttcacgttgatagtttgtagccttcaagggaggtaattttggatttgtcagaagggtagtggtcagtagttgaaacagctgtttgaaatactgagggcttcatttgctaaagaaaggtgaagatgaattactgaaagagatcgcttttatcttttttctcttcttaaaaagctactttccaactttattccatgccttaataatttaaaagaaattaaaacctctaaataaatctttaatactcatgacagggtgttctttcattctttattcaagacacatttttgtggaacaggtactatatgccaggtcttgaaccagatgctgggaatagagaaatgggatactcagtccccattatcaagttacttacagtctagtggggaagacagaaaaccaacactacaggattgtgatactgtaagtgcagtatactaataaaatatattaagtgctgtgatgccagtatccaggtgttgctgtggagaaacaaggaccgctacctaaggcaggctaggagccgtgtgaaattttgaaagacatcccaggggaatctgagctaagtgcagggaggtaagtagggatttgcttctaaatggaaaatggagagtgagttgtcctgaatgtcaaataatttatataactggagccatatatatgtgtatgtgtgtgtatatatacatcttatatgtatatgttatatataacatatactttatgtatatgttacttatatatgaagtatatgttatatataacgtgtgtgtgtgggggtatatatatatatatatatattttttttttttttttttttgagatagagtttcactcctgttgttgcccaggctggagtgcaatggtgtggtctcggctcactgcaagctccacctcctgggttcaaatgattcttctgcctcagcgtcccaagtagctgggattacagccgcctgccaccacactcggctaatttttgaatttttagtagagacagggtttcagtatgtttgccaggctggtcatgaactcctgacctcaggtgatccacccacctcggcctcccaaagtgctgggattacaggtgtgagccactgcacctggcctactggagccatatatatatttaatacatggggtggggaaggggattgtatttttagtaatgagtggacccaagattttaaggcagaattgtgacatgatcattctggctatgctgtggagggaaaaaaagaggagaggtacaaacactagtaagaacacttggggagtaacaaggcagcccttgaactgaggcaggtggaagaaaggagagaaggtggatttaagagatactgaacataaaggactagggagaagaaagagtctagggtgactgcttccatgcttgggtgcctgagtagacaatattgctcttaaccgaaattggtggggaatgaacaggtttggaggaccctaagtcagtgaattagtggtgtttgccggactttaggtagcaatgttagttggcaatttgaagtactcaagagacatggaaagcatgcgcatatgaggactgggtagagaaaggagaacccacaatggggatgataagtaatagagaggtgaggctgggcgtggtggctcatgtctgtaatcccagcactttgggaggctgagtgtgtggatcacttgaggccaggagtttgagaccagcctgggcaacatggcgaaaccccgtttctactaaaaatacaaaaattagccaggcgtggttgcacatgcctttaatctcaactactgtggaggctgaggcaggagaatcacttgaacctgggaggcggaggttgtagtgggcggaggttgcagtgagctgagattgcgcctctgcactccagcctgtgtgacagagggacacttcgtcctaaaaggtgagaaaagagaggtgagtcatggaacaagggttttttgtttgatgaagcctaaaaagtatctgttgtcattggtgtttttggtgccttaggtgattgttgactgagaggagagcctttggttaatagaggaaaccactggccataattaaggggagaatgagaggaaaaagattatgagtttagaatacttgtttaagaatgttggcagtgaagggaaggagacaagtttttttttgttttttttgtttttttttttgagacaaggtcttgttctcttgccggtgctggattgcagtggtgcatggttcactataacctggacctcccaggctcaagtgatcctcccacctcagcctctggagtagctgggactacaggcacacaccaccacgactggctaattttttgtggggagagggttttgccatgtttcccaggctggtcttgaactttgagctcaagcaatccgcctgcctcggcctctcaaagtgttgggattacaggtgtgagccactgtgtctggcgggagggaggcattcttaagggtcaatttaaactagattcttactcagtgtttatgtaacaaaacattggacaggggaccagaacccttatctctctaaggttgtgtcctaaaatgtgatcatttcaccccttttggtataaaacattttagtagcttctagggtaaagactaagaccctactaatagtagggtgaccatataatttggcatccaaattgggatacttttgtgtatgaaagagggagctgttaataattatgcagtgacagctcgcataaatggaacttgtccttggcaatctgggacatatttgcccaggttatcctacctaaaagttctttccctacatgggctggtcccagtctgaccctccagcttcatctcataccacagttgaacttgtttactcctctttagccatgaaatcctttattcagtcccgtttactgtgatcctcttaaaatagggactttgcatttggagtttcctttgaattttttttttgaggacgagacttgctgtgtcttcttggctggagtgcagtggtgtgaccttggctcactgcaacctctgccttccagtttcaagtgattctcctgcctcagcctcctgagtagctgggactacaggcgcctaccaacgagcccgactaattttttgtatttttagtagagatggggtttcaccgtgttggccaggttggtctcgatctcctgacctcatgatccacctgcctcggcctcccaaagtgctgggattacaggcgtgagccactgtgcccggcctaattttacatttttaatagagatgaggtttcttcatgttaggctggtcttgaactcccgacctcagatgatccgcccacctcagccttccaaagtgctgagattacagacatgagccactgagcccggccttattttattttatttttgagacagtcttgctctgttgcccagactggagagtagtgagtggtatgatctctgctcagtataacctccacctcccacgttcaagtgattcttgtgcttcagcctctccagtagcggggattacaggcgtgcaccaccaagccctgtgaatttttgtatttttagtagagaaggggttttgccatgttggccaggctggtctcgaactcctgacctcaggtgatctgcctgcctcggcctcccaaagtgctgggattacagatgtaagccaccacatctggtctgctgtgttatttttaatttgtgcagaatgcaggagttgtcagaagcaacatatgttatagcagaaatacttacatagtccccagcagaactcagtaatatactgtgattagttttttttgcctatcacaccttttgatcacctataaaaatagtactttttcccacttacttttttgtataattatatagagtctatgccagttgttagaacatcaaatcatttaggatcatttttaaattaattttacctcattaaataaagaattacctttgggtaccttgtgtttttctacagtctagttgtattgtataagcattgatagtttgggtatagaattctaggttgtaaatgctattttcttagacttttgaaggcatgttttggccgaggtgggtggatcacctgaggtcaggagttcgcaaccagcctggccaacatttgtactctactaaaagtacaaaaaattagccggtgtggtggtgggtgcctgtaatcccagctactcaggaggccgaggcaagggaattgcttgaacccgggaggtggaggttgcaatgagcccaggtcgcgccattgcactccagcctgagcgacaagagcgaaactctgtctcaataaataaataaataaacaaataaacaaataaataaataaaatgaagacgtgttctttagttttctagctttcattggctgcagaagtaatgatgagtgaaaaatttaaaagcttgtaggatcttcttttgatccagttctaaaatttcacagggatgttccttgttgtagatctcttttcatccattgtgttgatcatctgattgaattcttttggtcttgaaatttatgtccttcagttgttggaaattttcttgagattttctcctcttttattaccatatgagactcctagtattcaaatgttggatctcttacattgatcctttggttttcttcccttttttaaaaaatattttttctctactaagagatgttctcaattttgttttccaatttttgctattgtattttaaatttctaatagcttctttttattctgtctcttttttttaaagatagggtcttacccttgcccaggctggagtgcagtggcatgatcttggctcactacagcctcaacctcctaggctcaagtgatcctctcaccttagcctctggagtagttgggactactactggagtagttgggtgtgtgccactacacctagctaatttcttgatttttttcatagagacagggtcttactatgttgctggtctcaaactcctgagctcaagtggtccttctgcctcagcctcccaaagtgttgggattacaggtgtgaaccatcatgcctagccttttttattcccttgatgtctctttttttgtttttgagacagggtcttgctctgttgcccaggctggagtgcagtggtgcgatcttggctcactgcaacctctgcctccgtgttcaagtgattctcatgccccagcctcccaagcagctgggattacaggtgcccaccatgacaccgggctgattttcgtatttttagtagagacggggtttcaccatgttggtcaggctggtctcgaactcctgacctcaagtgatccacctatcgctgccttccaaagtgctgggtttacaggtgtgagccactgtacccagcctattctcttcttgatagctctatagcattgtttttgtctaaatttgatggatttggttcctttttttttttttttttggagacagagtcttactctgtcacccagactggagtacagcggcatgatcccagctcactgcaacctccgcctcctgtgtttaagtgattctcctgcctcagcctcccgagtaactgggattacagacacgtgccattacgcctggctaacttttgtatttttagtagagatgggattttgccatgttgaccaggctcgtcttaaactcctgacctcaggtgattcgcctgcctcccaaagtgctgggattataggcgtgagccactgtgcctggtgtgtttggtactttctcttatctttgcagaagtcttcattgtccttcatagtccctctttgctaagttaatttctttttctgtttaggtctttgtgtcatcactcagtgcagggaacagaaagcactagggattttttttttttttttttttttttttgagatagagtttcactcttgttgcccaggctggagtgcagtggcgcgatcgcggctcaccgcaacctccgcctcccaggttcaagcgtttctcctgcctcagcctccctagtagctgggattacaggcatgtgccaccacgcctggctaattttgtatttttagtagagacggggtttctccatgctggtcaggctggtctcaaactcccgacctcaggtgatccacccgcctcggcctcccaaagtgctgagattacaggcatgagccaccgcgcccggcagcactagggattttaagcagaaagggaaacaatatgagatgtaggtgcttagaaatgatttttagagaggctagaggagcaataatgatgcttagaacattgttgtagaactgaccttctttgggagcttttatgtgtgaggccaccaatggaaccagtaaactgttttaaaaacagtatatagctactattcaggactaggaagctgccactgctattgctttaggaatagctgcctcataacacccagcaaactggagaatggacattggaacactgtttcagaaatattttacacccaggtcagtgcctagcacattgtagatgagtgacaaaggtagtagttattggtttttctttttctttttaaatgaatcagtcatttaaattaagacttaatctgtacgagtctgctccatactcctgtgcctgtttatgttacagtgatttttttttttgtttcaaagaagtggttttgtggtccagtttcaatctcatttagtatttttcctaattttacccgagtttcaactagagtttgcctgagtctgattaggttgttgctaattctttgacagattagtttattcagtgagtagcagaattttattggcaccggaaactatcctttgtaactttgagtttatgcaaaagcatcttcttagtctttttgcatatgccagaggagacccttgttaatagaaattgtgatcacaaggccgggcatggtggctcacgcctgtaatcccagcactttgggaggccgaggcaggtggatctcctgaggtcaggggttcgagaccagcctggccaacatggtgaaaccccatctctactaaaaataccaaaaattagccgaatgtagtgtcgggcgcctgtaatcctagctactcaggaggctgagacaggagaatcacttaaacccggaaggcggaggttgcagttagctgagattgcgccattgcactctggcctgggcaacaagagtgaaactccatctccaaaaagaaagaaagaaagaaagaaagaaattgtgatcataagaccttctagagtttttgtgtaatttttttttttgagatggaatctcgctttgttgcccaggctggagtgcaatggagtgatcttgactcactgctacctccatctcctgggttcaagcgattctcctgcctcagcctcttgagtagctgggattacaggcatgagccaccacgcccagccaacttttgtatttttgtatttcaccatgttgaccagtctggtctctaactcctgacctcaggtgatctgcctgcctcggccccctatagtactgggattacaggagtgaaccaccgtgcctggccgagtttttgtgtattaagttatatttgttttaatttcggggaagttcattaattttcctttggaaaaatactgtggatcacatcctttttccctttggaagggaagttaacatgaggacagtgttgaagctgatgagtggctgttggagcaaatgcatgcttgataagcagtttgagcctgttatgaaataaaattatctagttttaggacaaggtttttatgtgggtatattttactttaaattgaaaataaggtttattttttctctaaaggtctggagcatggctagatataagagacatggcatgttgatgctgagctctgggtgtgaagagatccccagacacggatttgtgtgatagtcacttgagtactgcactagtgttgagtggtgttcaggggctaccagacagctgttcagaagaaccttacagtatatgaaagcaggaacagagcttagccagctaggcctaattggcctggctctgtatgtacagtgggtctgttttaagggatttaaaaatccttgttttgtggctttgattagaaataagaattttgtatagaatgatttctgttagctgattacaggtgaaaaactaaatggcttttctctttcatctcctgtaatatatttgtttttctaaataagaatgggcctgaggtgaaatgttagggataggtactgacacaaactgaccaagagaatgttaacaggtgggcaataatttgccgttaccaaattaattaaaactattttgtaatgagcttcagattatgttgtatttgtccctgcaagtttacttattgatttgtttcacactaattctttgttccctgtttaagtggacaatcttattttttcaagtgtttatggttggaatatgctaactaattccttttcctttttttttttttttaaataaggatcttgctctgttgcccagagcgacagtggctggagtgccgtggcatgaccacagctcactgcagccttaacctccctggcccaagcaatcctcccatctcagtctctctagtagctgggactacaggcacaggccactactcccagctaatttttgtattctttgtagaaatggggtttcaccatgttgcccagggtggtctcgaactcctgggctcaagcattctgcccattttggcctcccaaagtgctaggattacaggcatgaaccaccgggcctggccccctaattcattttcaagtagttattgttattgcaggcctggaatgactttctgcatgttatgtatgtggtatgacttttggaagaatgtaccctaaagttatcacctagtaatgatatatttctctaagagttccattgagggttcattttccagcgattctgtgattggatgtggtttttttgtttgttcatttgtttgttttagatggagccttgctctgtcgcccaggctggagtgcaatggtgcgatcttggctcacagcaacctctgcccccccgggttcaagcgattctcctgcctcagcctcccgagtagctgggattacaggcatgcacaaccacacctggctaatttttttgtatttgttagttagacggggcttcaccatgttggatcaggctggtctcaaactcttgacctcatgatccgccttccttggcctcccaaagtgctgggattacaggcgtgagccactgcgcctggcccaggatgctttttttttttttttttttttttttgagacggagtttcactcttgttgcccaggtgggagtgcaatggtgcgatcttggctcactgcaacctccgcctcccaggttcaagcaattctcctgcctcagcctcccaagtagctgagattacaggcatgcaccactacgcccggccaattttgtatttttagtagagacagggtttctctgtgttgaggctggtctcgagctcttgacctcaggtgatccgccagccttagcctcccaaagtgctgggattataggtgtgagctaccgtgcccggccctggatgcattttttaatctcctttttttgccttgccctgtcttcttatggtgctgactgatctctactttctgactggtaggactagtctggagtagggtacacctagacaaatgaaggacacccagggagtgagagagagtcatcctcacagaaggactagtgcagaggccaagcaaagttcagacactaagttccagaaccaagtagttcaatgcagaagccagggttggaaatgaccttaaaacaagtcaaggtcaaactggcggcatgttgaacaaccagcatgattaaagcagcagagtatatggtattgctggtggtagaaggtgcttaggagcattttagaaagtgttaaccaactggatttagattagttctataggcctcaggagaggataggcatgtgtcccagatacatggtactaggttttattgggaaagtacaaccatagtaaagctgtgtatgttagtcttaagtcactgctgtagaatgttagcaggaatataaatatatcctttctagctaattttctttttctttttcttttttctttcttttttttttttttttttgagatagagcttcgctctttgacccagttggagtgcagtggcacgatctcagctcactgcaacctccacacccccagattcaagcgattctcctgcctcagcctcccgagtagctgggattataggcatggaccaccatgtccggctaatttttgtatttttagcagagatggggtttcgccatgttggccaggctggtcttgaactcctggcctcatatgatccacccgctgcagcctcccaaagtgctgggattacaagagtgagccactgcacccagcctggctaattttctttttaatggccagatacttgattacacctggttacttgttagaccaataaaattcaagcttacttgaaatgaaagctaatttggtttattaagggaggaaattcttaattagcatagaatgccagttacatttataaaactttatttttttctggttgcagttagagtttggttcttctgtaaaacatctaaagcaaatgggtatgttttgtgacttattttcaggagcgtgtatatttctagtattagattcacatgttgaatttaacataggaagatctccttatctggaatataaatagtttaatcaggcaggtggataacacaacaaatccagtcaggaaatggactcaaagtaaatgtatactaatatcttaagtgttagatagcttctagtaatttaggattcctatctaaattgctctgtgtttggaggcattgtcagatgtcattctgtgcttaggtgatagctgcagcaagtccatgtatgtatgttttaggatatcagttctacaggtttctgcactttgactatgtgctgataattacacttggactttctacattatattgatgaatgaaaaataatatggttagaaaattatgacaagaatatgttcagaatattaactcactgcatggctccccatgtatccttgacaactcatgtgacatagaagactcattgatttggctgagtgcagtggctcatgctggtaatcgcagcacttcgggaggctgaggcggacaggtcacttgagcccaggagtttgaaaccagccggggcaacataggaaaaccctgtcttcccatctgccccagcaaaatacagaaattagccgggcgtagtggcacatgtgtatactcccagcttcttgggggactgagatgggaggattgtttgaacccaggaggtgtaagttacagtcagccatgatcgtggaggattgcttgaacccaggaggtagaggttgcagtgagccgtgattgtgccactgcactccagtctgggcaacagagcgagaccgtctcaaaacaaacaaacaaacaaacaaacaaacaaacaagctgggcgcggtggctcaccgagcctgtaatcccagcactttgggaggccaaggcggttggatcacgaggtcagtagttgaccatcctggccaacacggtgaaaccccgtctctactaaaaatacaaaaaaattagctgggcatggtggcgggtgcctgtagtcccagttactcgggaggctgaggcaggtgaatggcgtgaacccaggaggcggagcttgcagtgagccgagatcgcgctactgcactccagcctgggccacagagcgagactctgtctcaaaacaaacaaacaaacaaaaaaactccaactcattgatttattgctattgtctgatggagacatgggtgtaaccttaagaattttttttcatgattcattcagcctgggaaattggtaggaagaaagagaggatacccatgcatgtgagttttagagattatagaagcatcagttattatttttttcttcttggaagagacatgatattttacataggatgaaaaaagagaagttgtgtgtgtctgtgtgtgtgattttttttccttcctggaaaacacatgatacattttacataggatgaaaaaagaagtgtgtgtgtgtgtgtgtgtgtgtgtgtgtgcgtgtgcttgtaacatttagcaaaatagtcattatctgagttttctgtgcagaagatgtaggaataataagtcatgggccttgccctcaaagggtttacagtctcttgaggtagctaagcatatccacaaatacagggatttgtatgatcaatgcactgtaagtgctgtatatgcaagaggaagagatagtagtcagttcttctctctttattagccacttcatgatgcattgacttttttttttttttttttgagacggagtctcgctgtcgcccaggctggagtgcagtggcgcaatctcggctcactgcaggctccgccccctggggttcacgccattctcctgcctcagcctcccgagtagctgggactacaggcgcccgccacctcgcccggctaattttttgtatttttagtagagacggggtttcaccgtgttagccaggatggtctcgatctcctgacctcgtgatccgcctgcctcccaaactgctgggattacaggcgtgagccaccgcgcccggccgcgatgcattgactttttcactgttaatattgtggcctaaggaggaagaggaaaaatatatgaacacagaacaatttgtttgtggagttaaagggctcacaatgtaaggacagctgtaagaactgtctgccctgagctcccagtgcaggtagccccacaagtcccttttcatcattttacttcagcatctgcaagataagtctttatgctacctagacagctacacacctaagtgtggtgacatggcctagtgcctgaccctgagcagtaaaggtactgagggtccagaagaaggaagggaatactaaaaacgcacttagttgggaccctgtcttatttatttatctttctcttcctggtagtacatagtagatactcagtaatgtctgctggattaggtaaatatgtctcaaaactagggacctggactgagcctttccgcaccgtctcgaaactctcctgtgtacctgtgcataagagtgcatataaatgccactgtacatttgtgtgggttagaaaaagcaaaagtgtgttcataacctcttatgagaagagactataaattactttgcaccaagggcggtagctgactcttgagttctcttcagtgcctggtacaatgcctgctgcccacctgcttgtgaaggctgtggtggcttgtacaggcactgcagggcagatctagattgactatttgggtctcagaataacctgggtcctctgtaacagaggctgagtacttatcttttcatgagttgttatattaaagtaaaattgtaagcactgctttcctgtggcttgcttctttcattttttaacagaaattttattgagtatccccaccctataccagacattgccaggcactgaggatctgaaggtaatctcattttacccacattccagtgtaggagacagacatggaatcttaaattttaaaaagatgtatataccatgcaccatatgagaatgatgcaccaagtgctgtggagcccagaaaggtacatgatttttttctgctaggagaggtaaagcagggaagcattacagaggaaggatgacatttgttccatccttggtcttagtttccaatggcagttggttaggaattagatggagttaggaatgggaatagatggcatggagtgggggagagtgaagtccgaggctcagaaggtctttaggacttagacctgaagggctttctagggggactgccatgccaaggagcttgcatatttcttggtggtcagaagttttcaaactgttttgcagaaaactaggactgttgggatggggcttgatgggacactggaccctacactgtatcttcttttttttttttttttttttttgagacggagtttcactcttgttgcccaggctggagtgcaatggcacaatcttggctcaccgcaacctctgcctcccgggttcaagcgattctcccgcctcagcctcctgagtagctgggattacaagcatgtgccatcacgcctggctaattttgtatttttagtagagactgggtttctccatgttggtcaggctggtcttgacctcccaacctcaggtgatccgcttgcctcggcctcccaaagtgctgggattacaagtgtgagccattgcagccagactatatatatatatatatatatatatatatatatattttttttttttttttttggtggtagggtctcactctctcaccaaggctggagtgcagtggcacgatcagggctcactgcagcctcgacctcctgggatcaagtgattctcccgcctcagcccctctagtagctgggactacaggcatgtgccaccacgcctggctaattttttttatttttagtagagatggggtctcaccgtgttgcccaggctagtctcccttccaaagtgctgggattatagacgtgagccaccgcacttggccaagaagtaatttataacagaacaatttatattttcatagaacagtgttttatgtgactaagaacttgacataaaatgaacagtagaagcattagtcatgattgaaattaaagctcctataaaatttccactggtatcattgggtggccctcagggtaccacaagtaaatactctcttcatcccctgtcctccttatcttctttggtttttatttttatggaagaaatcaccatattctagtcatctggatgtactgccttgggttaatttttggcttcttgtgttttctacactccacaagatgttgaacacagtatctttcacttggtagtatgacatcttgagttttgagctatttgcatgtattacttattaaatctgtgaagtcaaataaacaagaacaatactgcataaaatatgccgattttacaggttgttccatacaataacttgtaaagttgacatgctgttttatgcagtatcattcttgctggaccattttggtccctggaaggcacaggtcattctcctgccatgaggcaggatcacattgagaagtaccacattatgacctgagctttaaaaattactgtttgtaattgttaagtaattaattttgagtcagtagcttttgtaagtattgtgtaatactgcatttaaaatatggttttattttcagtcatatgtcttatgacatgtatcctagcccttctggtagttttatagtggggcaaaatagagactccttcacaagtgtcagttcattcctgtggagacccagcacttgtgtgaactaggcattttggttgtaaattattacagtatgggattttttttaacagttaattttttcctcttctggactagtcttcagttaaagcctgccatcgtgtggtgttttaaagcatgagatttaagcatgtggcatgactgctgagcttttatgatgagtaaaaagtgaatactattaaatcttttcatatgtgatcaacatttggccagtttatttcttcactttattttaatattacaatattattttgaaatttttattaattaaaggttcctcctttagccagtcctcaaacatcagtaagtaaaagtactcttttacttttttagtttatttttaagatcctgtttctccaagaaaaatacaatagcagttttaagaacaggtattaataattttgatgttattattattttttgagacggagtctcactctgtcacccaggctggagtgcagtggtatgatctcggctcactgcaacctctacctcccgggttcaggcaattctcctgcctcagcctcccaggtagctgggattacaggcacaccccaccatgccctgctaatttttgtattttttatagagacagggcttcattttggccaggcttgcctcaaactcctgacctcaggtgatccacttgcctcggcctcccaaaatgctgggattacaggcatggcccaccatgcccggcaataattttggtattattaaggcttctctgtgtaactactgttaataattatttggatgagagaaatactgacctttaaaatataattattgggcaaaatatatccaaatgaactataattttataatgtagaactccatttaaaaaaaagtggttatttagaggccgggtcagcagctcatgcctgtaatcccagcatcttgggaagctgaggctggcagatcacttgaggccaggtgttcgagaccagcctggccaaaataggcaaaccctatctctactacaaatacaaaaaattatctcggcctagtaccgcatgcctgtaatcccagctacttgggaggctgaggcatgagaaccacttgaaaccaggaggcagaggttgcaatgagccgagatcgccccactgcgctccagcctaggtgatggtgagatgccatctcaaaaaaaaaaaaaagtgatatttagagaaaaagaaacttcagtttgaacctcagcttgttttttgtttttgttgtttttgagacggagtttcactcttgttgcccaggctggagtgcaatggcacaatctcggctcactgcaacctctgcctcctgggttcaagtgattctccttcctcagccccctgagtagctgggattacaggcatgcgcctccatgcctggataatttttttgtatttttagtagagacggggtttctccatgttggtcaggcaggtcttgaactcccaacatcaggtgatccgcccacctcagcctcccagagtgctgggattacaggcatgagccaccacgcccggcctgtttgtttgtttttttgatacaaggtctctctctgtcacccaggctggagtgcagtggtgcggtctcggctcactgcaacctccacctcctgagttcaagtgattctcctgcctgagcctctcgagtaggtgggactacaggcattgcgccaccatgcccagcttaagtttttgtattttttggtaaagacgaggttttaccatgttggcaaggctggtctcgaactcctgacctcaagtgatccgccagccttggccttccaaagtgctgggattacaggcatgagccaccgtgcccggccctgaacctcagttttttggtagttggttttataaactgaaataatttttatgcaaaatattagggaggccgttatttattgttacctctatgtaacaaaatgggaggtacttgcaagcttggggtcaattagttcttactaatatcaggggagtttcagtatcatgcattgggttataacattactttttaaaataaccttttcttctcatttagtgtaatttgattttctttttttttttgagactgggtcttggtctactgcccagctgcagtacagttgtgcagtcatggctcactgcagcctcaacctcctgggctcaagcgatgtccccgcctaagcctcccaagtagctgggactacaaatgtgtgccactgtgccaggctcttttttttttttttttttttgtagatttggggtcttgctatgttgcctaggttggtcttgaattcctggtctcaagtgatcctcccacatcagcctctcaaagtgatgtgattacagacgtaagccactgcgctcagcatgatatcctgacttacagttcctgtatgttttggcttataatatgcattatatttaaaaaatgaattttcatttcttcaaaaatatcctgtgttagtgtgcctctttatagaacaagggggacatgcagtctcactcaaggacaagcaggattctggtacattggtctttaatatggacgtctttgacccatagttattagtaatcatgtgacattgaaagagaatgttagccaacaaaaactctagatccagtgcttgtgaattgcttctctaattttgataggtgatgggagcctttatttaaactacttcttttgtttgtcccttcagcagagagggagaagacctcaagtcatcagtatggtttgatgtcttatgctttttaaatctgttccagctatgctaagaaggaatctgatcttaatggcgcccagatcaagcttcgagaatatgaagcagcactgaattcgaaagatgcagctcttgctactgcacttggtgacaaaaaaagtttagagggagatttggaggatctgaaggatcagattgcccaggtaaggtcaagcctactcttgagccgtatgtgacaggttaattgcctcatctgccttaagccatagtttgattgattgattgattttcaaatgtattttatttttgaaattttatatatttgttttctgatggtttacttgaagaaaagtcttgaggtagctaacatgcaaaacattatcacctcccaggcattatatctggattggccagatcttgtggttcccttcttcttccctattgtgcacacactcattctgtctctgctctcaaagcctattttgttagttaggaaataagtaagaaaagagatgccaaaatgctgctctccacacaggaaaaaatgaaagtggttagctaaaataactagtttgatttttgaaatgtgagtgagtcatacgtctctgttctattccctgttgccaattaacaatttgactggtcgtttggtatgatactctgtgggtgggaccagcaaatgaatacccagttctgtgataaatgttaagatgaagtaattatacattgataaatatataggaattttaacacttgatttgatttgattcatagatatcttatgttcattattaaatgattgccatgtaatttttatcacaattctttttccttgtaatagttggaagcctccttagctgcagccaaaaaacagttagcagatgaaactttacttaaagtagatttggagaatcgttgtcagagccttactgaggacttggagtttcgcaaaagcatgtatgaagaggtaactatatataattttgctttgtaaaggaatggaggggttctagaatgactttgtcatagctaaacatgtaattatattttatttatgatttctttgccacaaaaatatatcagataaagaaataataaggtttggggatggggagaaattttgcaggtagattattcaagctactgctgctaaaagaccgcatttgagaactcaagctgttaccgtaaacagatatgatttcacttcatcttacttatttttgtttttttgtttttgtttttttgagacggagtcttgctctgccgccaggctggagtacagtggcacgatctcggctcctttcaacctctgcctcctgggttcaagcagttctcctgcctcagcctcccgagtagctggaactacaggcgtgcgccaccacgcccagctaatttttgtattcttagtagagacgggatttcaccatattggccagggtggtctcgatctcctgacctcgtgatccgcccaccttggcctcccaaagtgctgggattacaggtgtgagccaccacatccggcctcacttcatcttaacttataaaggcttggtcacagcagctaattactgtcaacatgtttaagcattagttatctattcctgcctaacaaattacttccaaagttcatcaacctaaaaccacagacttgtattaatttcttagttcctgaaggtcagaattcagagctgctaaactgggtggttctgtttcttggtcccatgaggttgcagtacagcttttaacctgggctggaggaatggcatctgagctctttcacagggctgtgggcaggacgtgtcagttcctcacctcatggtcttcttcatagggctgctcatgatatggcccccctaagggtcagtgatgagaaagagagagagagagagaaagaaacacaacgagaacatgaatacatgctaccagctaccaaggcagaagccagattgtcttctataacctaatcacagaggttacataccatcactttggccttctcctatggctcacatctggaaatgcggctactcacagcatttataggcgtgtaaatttttttttttttgagacacgagacccgctctgtcgcccaggctggaatgcagtggcatgatcttggctcactgcaacctctgcctcctgggttcaagctattctcctgccttagcccccctagtagctgggactacaggcgcatgcacccacgccctgctaattttttgtatttttaatagagacgaggttccaccgtgttagccaggatggtctcaatctcctgaccttgtgattggcccgcctcagcctcccaaagtgctgggattacaggcgtgagccaccgtgcccggctcactcatgtggaaatcttaaaatatcacttataagccttaactgctgtggtcaaggggcaggggcaaaaccgttgtcaaacaaaggaagtaataaaattgaggaaaggggaatgtatatttcatgaaaattgtagagggttgaaatcaactcatgggggagaacatgctgttaatgtgctaggcttaatgtttttagaagtagtgtaattttgaaaacagtgcaaataggaattcattgtagcagttagcaaaccagttttttagttggaggaaaaataatagaaatctgattattttttaaaattacaggctttaaacaaaatagatattagtgcaaggtgcaccagacaagcagtcagaccttggacaactcttagtgtcagtttcttatttaaaatgaaatactaatactgctatttttttcttcaatgagtggtaaggatcaaagtggaatactgtgtgtgaaaactctttggatactgtagcaagtgctgtcatataattgttactaagtgttgctttgttaaagcagatattttgatatgaggttgacttacatttttgttttgttttgtaaaaattgtgatttatcattacttatttctgatgttgtgtgtagacaaccaggagtagggttttttttctttgtaaggtcactggttctatataaaaaatagcatcagtaaaaagtaatttaatatttttagagtgcatagcatctttgaatttttggcttttgcctttttgagaatggatgttaagatagtcctcttcagttttgtttttgtttttgtttttgtttttgtttttttaactctttttggagacagagtcctgctctctcgcccaggctggagtgcagtagtacgatcttggctcactgcaacctccacctcctgggttcaagcgattcttctgcttcagcctctggagtaactgggtctacaggcatgtgccaccatgcccggctaagttttgtatttttagtagagacagggtttcaccacattggccaggctggtctcgaactcctgaactcaagtgctccatctgcctcggcctcccaaagtgctgggattatagttgtgagccaccgcacctggccttttttactttaaaaaaaatttttttgtgtgagacagagtctcactctgttgcccaggctggtgtgcagtggtacggtcttggctcactgcaacctgtgcctcctggattcaaatgattcttgtgcctcagcctcacgagtagctgggattacaggttcacaccctcacaactggctaactttttttttttttccttactttttactaagtaataccatgttggccaggctggtctaaaactcctggcctcaggtgagccactcgcctcagcctcccaaagtgctgggattacaggtgtgagccactacgctggccttaactttttttttttacattcatgatatatattcagtaataatatctaacttccttattatgaacagttgggggaaaaaaggaaggagaaagacgaaagaggaaggaggaggtagacaaagaacaaaccattagcagtcactcgtcagtatttttgtgatttaggtattatttgcttcatgaaatagatgtgatctctgggaaggtgatagcagaatcctcctgatttttctgatttttcagattttgtcaagtgcatgctcctgtgtagtagttaagagaaagatgaagaaatgcaaaggaaaatacatgcgctaatatacacaaacagcaactttggtgggttatacttccctcttgtggcttcttcagatattaccattctaattattatttttttttttttgagacggagtccagctcagctgcccaggctggaatgcagtggtgcgatcttggctcactgcaaccaccgtctcccaggttcaagtgattctcccatctcagcctcctgagtagctgggattacaggcaccctccatcatggctgactaatttttgtattttagtagagacagggttttaccatattggccaggctggtcttgaactcctcacctcaggtgatctgattgccttggcctcccaaagtgctaggattacaggcgtgagccaccgcgcccagccttccattctaattttatttagacacttccttaaaacagagtaaaggaaaggatcatgacaactacttctattcttcaatggtaaatttttcataaatatttgagttagtcaactaatattgttaataagatcctgtgtcacttgataatgatagcttaataccggcttttaaagaagtcatgtaaattagcttgtgctgcctattattatgtctaagaaaatggttttatggctgggcaaggtggttcacacctgtaatcccagcaacttgagtggctgaggcagatggatcacctgaggtcaggagtttgagaccagtctggccaacatggggaaatctcatctctactaaaaatacaaaaattagctgggcatggtggtatgtgcctgtaatcccagttactagggaggctgatgcaggagaattgcttgaacccgggaggcggaggttgtagtgagctgagatcataccattgcacaacagcctgggcgacagagtgatactctatctcagaaaagaaaagaaaagaaaagaaaatagtttcatttcacataaatctttacatgaatttatcacaactgttaagtttaactttccatgtgctgttttttcagagatgttcttaagattatcaatgaaacaattcagaaaaataatttttgcttagtgtttagtatagtatactgtgtataaatccttgattgcagatagttttagtaggccatccaggcctttccttggcttcagaaaaataaatagctatgctcctgaaaaggaatagaaagttcctaaggcttgagatgctaccacttctgtcattagttccatttcaaaaacctcaactgaaaactaagaggcaaaaaagtgtttattcacatgaccgcctgaggacaaacaggaggaagttcgtgtgtaaaacttcagatggctgtgatgtcactcagatgtgtaccaatgcagccatggtaagtagcttggctttatgctttttgttttttccccaggagattaacgagaccagaaggaagcatgaaacgcgcttggtagaggtggattctgggcgtcaaattgagtatgagtacaagctggcgcaagcccttcatgagatgagagagcaacatgatgcccaagtgaggctgtataaggaggagctggagcagacttaccatgccaaagtgagctctcttcagaagattcttttgaacacttaaaatcattacttcacaattcccatgatgaacatggctttatgtttattttgttctagtttttaaaaatgattcccctagtctccatgaaatatatagaaaattgattttttcaaaaaagtgcagttttctataaactaaatgttattaaaaattactagaagaatgtagggttgttgcaattttattagaggttaggttttgtctttttgtcccattgatcattcgtactatgccatagtagttgaacccaaaccatgtgaaataactttcttccaataacaagtactgatcatgctgtcctacataaacatccatttagtaatgaatgaatgtcagactgcattagatctcactttcatgtcatcattgtgcatagattgtgactaccacacttccggcttttttgcataagggccaaatggaaagtctctgctatttcttcttctgtcactattattcacttaaaaaaatattgtagaaacttcccacttatattagctgaccttacaagaattcataaaaatcaccaactagtacaggctttccctggtaaatgattttgccttgtgttttaaatgttacatgatttgattaaaaagacttttttgtggttgacttagaatattagagtcacagagttattgaaaattttcattgcatggctttaaactgttcatgttgctttttatctattgtatgaagtagcagttagtgaaagtgaaagatcttattataagcagtaacttcagttgtataacatttatctaatatcacacattgagctatacagtgaaggagctaaagtaaggatccgtcacagactgtggcctcacagggagccagggaggagacacaggagcatgtccctgagacacacatacacaatagtgttatgggatttgtattttactcaaggagttttttttgcttctgaaaggaagtgtttctatctggtttgaacgaatctataaactagtattttctgcttgttggtttacattctgtattggatttggtgggttagggatatgtgatgtttcttttcttacagacaccaccacagtcaagttgctattgcccagtcttcttattatcagtgttatcttagacattaaaggtttaatagatgaaatattgaagtaataagctttgggtaaaggcctaggtatattagcattcttaaagctcattatttaggaagtgactctaaaagtcacacagaattaccatcattcacaccatatcagcaaacttcatgatgcttttcctgtgtttcatctaccagttaccagcaggacttaggtttgaaatgccttgaggtgaatcatgcttccttttttgtttcagttctagataagactgactatgctttgcttcttcttttagcttgagaatgccagactgtcatcagagatgaatacttctactgtcaacagtgccagggaagaactgatggaaagccgcatgagaattgagagcctttcatcccagctttctaatctacagaaagaggtaaataatcatctttctgtaagaagttagacttgaaggctaccttcaccacgggcacctacctgctttgcttgggctgatgtcactcctccctctgtttgttacagaggatggtgtcatcctgtgctttcgtcttcacagtacttttctagattcgttcattttgcattgcataaacatcctgtgagcagatactattgttcctaattagtagattacacagagctaagggacttgcccttgaggaaggagcctgctagtttattcactgtacttaccctaggacccggatcttccgacctgtctaacagcttcatctctacagagttattctcaacaccttccttttttatatcatttgaaaaccaaaatgaagaaaaacatgcaaaaattctttgtgggtggtgaatgctttgtgtttctagacaaattctttagtgcttaaagtatataacaattaggatccaggaaagtagctttaatttgcatattccgataagaatttagtgactcattcattcgttggtacgcctaagtgacaaatggcattattgccggctgtgttgactggctgcctatcagggtgtgatggtgtgcttcaggtgctgcttaagcaggcatggacactacttcagatcagttttagcctagggtgatgtcagtgtggacacaaagtacatatactccatatactgcattcagaatgattcagcaattaactcgtcaccttaattattttggaaataacttccgcttctattttcctcaagggaggaaatcttgttttgaattttccacatgagaataaactttattttacttttttttttttttttctttttgagatggagtctcactctgtcgcccaggctggagtgcagtggtacgatctcggctcactgtgagctccgcctcccgggttcacgccattctcctgcctcagcctcccaagtagctgggactacaagtgcgtgccaccacgcccggctaatttttgtatttttagtagagacggggtttcaccgtgttagccaggatggtctcgatctcctgacctcatgatccacccgcctcggcttcccagagtgctgggattacaggcgtgagccaccgtgcccagcctattttactcttgattgggcttttcttccttcctttttctttttaccatttttagtaaaatatttttctaattataaaactgatgacctctgttgcaggaacttagaaataaagcagaaaatgagtcccataaaatggggtgatataaaataatttagttaacacaggggcttttacactgtctatcatgtgctttgttacttacggcacaaatttttaaattattttaaacctattttgtgctgatagtgttttgaagattttcatttaatagcagagctggaagcacctctgagttcattccatgtaaccacagatctaggtgagtttaatgatttgcccgttgcccagaggctgcagactgataaatgggtttctctactccttcccagtttttccttttataactcattttcttcaaagaagatttacttttagaaatttaacagataatctttttttccattgcaccatctgtcttagtccttttgggctgctataacaaactactattgacttggtagcttataaacaacagatatgtcagaaattatttctcacagttttggaggctgggaagtccaagatcaaggcactggcagattggatatctgcctggtgagggctgttccccgatttatagatggtgccttcttgctgtgtcctcacatggttaaagggtgaatgagcacccttggccctatattataagggcatgaatcccattcactagggctttcctctcatgatctaattaccactcaaaggccctacctcttaatatcatcaccttgagggttaggatttaaacatgaaatttgtgggaacacaaacacacagactgtatcactgtctttgtttttcttgttgtttttttttcttctgagacagaatttcgttcttgttgcccaggctgtagtgcaatggcgcaatctcggctcactgcaacctccgcctcccaggtttaagcaattcccctgccttagcttccctagtagctgggattaccggcatgcaccaccacaccctgctaattttgtatttttggtagagacagggtttctccatgttggtcaggccggtcttgaactcctgaccttaggtgatccgcccgcctcagcctcccaaagtgttgggattataggcgtgagccactgcacctggcctatatcaactgtcttaacaggtacttttccaaaaatgggcctctctgttcttgtactgagttggcatttactactcttttccatttactaatagtaagttgtctactagttactgtctatccctcaattttattttttcctactgtattattatttttttggctgctgcctaatccatttgatttacttagtacagatcttctcttgaggttgatcttcactgtgctttggatgaggagactgttattaataagtagtagtgggctctgaaacttagtagctatgtgttctaacctaggttcaaggctgtttccctgttaattgaattcccatttttgcaagttggtttttttttttttttgagacagaattttgcttttgttgcccaagctggagtgcaatggcactatctcagctcactgcaacttctgcttcccaggttcaagtgattctcctgcctcagcctcctgagtagctgggattacaggcacgcgctaccacgcccagctaattctttgtatttttagtagaaatggggtgctccatgttagccaggttggtttcaaactcctgacttcaggtactctgcctaccttggcctcccaaaatggaagggattacaggcgtgagctgctgccttaaatgctgggattacaggtgtaagccactgtgcctggctgcaagttttttttgttaaccttatcttagtggtttttaagtaatgttaggcagtgcactgggggtttccaggagctaactccttagcagataggagacgagcaatccctttagccaaaatagtttttaatttctctggggtgaatctttcctctgttcattattggtaacagactttatggtaaacagtatattttgaggaatatttttattagttgataaattttagccttagaaaaatcatcaaaaataaaaatgttatctttttgaatattttcctattgtttgtcttaatagtgtttgttgctgagtcatatcagtttcatcatgctgcctattaggccataagaatttccttttggttaaataactcaggttagtgaagtacttcttaaattttacttaaaattgacatggctttaaaatactggttttacaagatatatttaaataatatatagatggtagcagtgttatgttttggaattagaaattttacattgcttatagcatctctagatttttgacttgggaccaaatgaattggttggttagagtctgcttgccttagagaagagtacagtatggtacttaaaaacacctctaacttttgtttttctaacacccagattctggagactttggttgcagctagaccttaataaaccagtacaattacattacatactataaaatatttaaaaaccccaagatcatcagaagtcataaaatttagggttagtggcaagatctgagagatcatctagatagttagagctcttcattttccttatgtggaaactggtttagtgagattagttacagcttgcttatagcctcataggtagtttcaatggcagaattagaaaggagaatctaggtctaacttctcatactgtgttccttatatttcactacacaggtgtaagtgcagctactgaaaatagaatttaaatatttctatttaaaatacagaatgattcagagtaactttaaaatttttatacctagattttgatttttccctcttaaagagctctacaacatcaaaggcagtcaaacagagacatcattgggtttataaatctcggctcaggttatctgtgaatcttgggtagtttatatctctcatcaactctcctttagattctacctttttgcccattcaaatatatcttctacctctgatatatgaaataaagggaggcattttgaacttacatgactttttttttttcttttggagaaaaagaaaatacaaggaacatggtagcggggaaatggatttctccatttatagcatgatttttgcaaacgcagttaaatgcaagttctctgaggttcagggactacctttgtaatatccatcttaagaggagtgcctgtctaaatagcatgtcaagtcatatactactctggaatttaattaattgattggtcaattttttttctttaaaaatatatttttgtgtgtgcgtgtgaaccaggcaccccctctgcccccaaataggtttacagtgactcttgattattttttaaataaccttgttattttggcataattttagatttacagaaaagttggcaaagtactatagacagttcttgttttcctctcacccattttcccctgttgttagcatcttatgttaccatagtatatttgtcaaaactaagaaactgacattggtatattactgtgaactcgtctccagactatttggatttcaccagttcttctgttatcttctttctgttccaggtgccacatgcctcccctggtctgtgacagtttcttgggctttccttgttttttatgagcttgagtcttgagtaagattgtccaggtatcctgtagactgtcccccaatttggatttgtccggtgcttttcacgtgattagactggggttttgggttttaagtgcccgttttgtcacatcgtatcagggattgcacgtatgtgataaccacatgacatcactggtggtgtttggtttaagatagtgtttgtcaggtttctccactgtcaacagcgctactatttttccgttcccatacactgttcatggaaaacagctcactaagtccagcctaccctcaagggtgaaggacagggcaggacttaagcgccacattctggagggaaatctacatttattaaatggcattcttctgtaacgatttatccattccccgtttgtttggtttgtttgtttgtttgtttgtgtccgtatggaccatgggcatttactttatactttgggttgtaagctaatactgcagtatttacttttttggcttaaattgtttcatatttggccactgggagttctgtcagcttggccactatgtcccattgttttttgagcactttgttgctttctggtactataacatgctctaggctcatcttgcattttccctgccccagtcctagaattatccagtctccaaggagccctggttcttgttattggagaatggtatatagaaattaagatctgggcactgagtgtgctcactggtactgggtatcactgcttcttggccctctcaccgataaaagtgggtaacattttatgtatgctaacccatgtgtatgcacatatttataactttttctgtctaatcatttgtgttaagataaacatgaattcatacagatgtctctgacttgaatctagtaggacagcattcaattttggcttcctttctgacatacctgtatcttttctctctcagagtgagaaacctggtttttatcatccatttacttatctgttcagccccagtatatgttaaagcagtttcaaaattttgaacctgtactgctgtgaaaagtaaatttaccagcaagagtacagtttttatgtatttggtagctcctttttatctctagccttctagatttagtttttgcacattagatgccctttctctcctgctctgttgcaggtacttgtgattctgagggcctaagctatccatcagtctttttgagttgtcactttctgaggctactgagatgaattctgtcatggagaaacacagaagaataattacccagcgagccacaaggtttctaagatgaactttctggtgtaggatgtgtgatttttaatttttttatgccaaatatacagcttctatattcacagtaatactttacaaatcaccctatattgtgtgtcctttgtgtgctaactgaacatgagatagcccagcaatcctaaagggacactaggtagtgccttccacatagtaaccagagtccctttgccttggtttctgaatattcctcagcagtctgctaaaacgtacttttacccactcttaggtttattttgtcagtcagtgtttatatctttttttttttttttttgagacagagtctcgctctgttgcccaggttggagtgcaatggcgtgatcttggctcactgcaacctctgcctccggggttcaagcgattgtcctgcctcagcctcccaagtagctgggattacaggcgcccaccactacaacctgctaattttttttgtatttttagtagagacggggtttcgccatgttagtcaggctggtctcaaactcctgacctcaggtgatccacctgccccggcctcccaaagtgttgggattacaggcgtaagccaccacacccacccagtgttcttatctttttaagttctttatttaatttatacttttggaagtaaaggctttgtaagggagccagacttgacttttaccaaaaccacatcttaacatttttttggctaagtacagaaaaattatatgtatatttacagaacttacatttgtggaatatgtcttttattcttttatcagccaaaactatcctgaggtctgtgttttgtatttgaggaattttgggttttaatttcttaaaatctcttgaattctagtgagttagagattccatagggttgtactgttttccagtctaggaaatgatttaaaatagctgcctggtgctaatgttggaatgttcctagaaagtaaatatgtttccttgcatcttaagtctagagcatgtttggaaaggattcaagaattagaggacttgcttgctaaagaaaaagacaactctcgtcgcatgctgacagacaaagagagagagatggcggaaataagggatcaaatgcagcaacagctgaatgactatgaacagcttcttgatgtaaagttagccctggacatggaaatcagtgcttacaggaaactcttagaaggcgaagaagagaggtaaggaacttaagggtcaccctaccttatggtccactttttgcctctcaccctttttattgaaataaaaataaatagcattttaaaaagaactttattttcttggtcatttctttgaacacctaggtatagaagtagtaatagatcatatttctacctcatcgcagaaaatgttgctcaagtactcttagtttatttattattattactttaaatgctgaactgcatcaggatggattagttcctttgagattttaagtgttttggtgatttaatatattgtaaaatgccaaactggctgaaagagactttacatattatttatttatttatttatttatttatttatttatttatttttgagacagagtctcagcctgttgcccaggctagagtgcagtggtgtgattctcggctcactgcaaccttcacctcctggtttcaagcgatttgcctacctcagcctcctgagtaactgggattacaggcgtgtgtcaccacacccggctaattttgtttttagtagagaagaggtttcaccatgttggccaggctggtctcaaactcctgactgcaagtgacccacccgcctcagcctcccaaagtgctaggattacaggtgtgagccaccacgcccggctggctttatatatattttaaatctggtcaatgtataaatatttttgacacctgttctcagaaaagagttccaaaagggccaggtgcattgcctcatgcctgtaatcccggcactttgggaggccaaggcaggcggatcacatgaggtcaggagttcaagaccagcctggtcaacatggtgaaactccgtctctaatgaaaatacaaaaattagctgggcatggtggcaggcacctgtaatcccagctacttgggaggctgagacagaattgcttgaacctgggaggtggagtttgcagtgagccaagattgtgccattgcactccagcctgggtgacaagagtgaaactctgtctcacaaaaaaaagaaaaagaaaaaaaaagttccaaaaggaaagtggctgatttaggataaaaagccagataattttaatattatatccgttgtgatcataagaaagtacaggtacgaaaagagaaaaaagtacaccaactataacagtggctgtggtgggtggtggtagatcagatgactttctacccatttaccagacttcttgcattatggttatattacttccatccctagagaaaacattcagattgttattttttaaaaaagaaaattgacgatgggcaccttatgaagaagtttacattagttaaggtaaactttggctttggctaacagattgtaagtaatattttgctttagaaatgcatgggtgggatattcttcttcttattattattattttgagacaggttttcactctgtcacccaggctagagtgcagtggtgtgatctcagctcactgcagcctctgcctcccgggttcaagccattctcctgcctcagcctcctgagtagctagtattacaggcgcccaccaccacgcctggctaatttttgtatttttagtagagacggggtttcaccatgttggtcaggctgatcttgaactcctgacctcaagcaatccacctgccttggcctcccaaagtgctgttgggttacagacatgagcctctgtgcccagcccttgtttttttgttttttttttttttaaggcgagaagggcatatgtgttttaaaaatgaattgttttatttttcccatataggttgaagctgtctccaagcccttcttcccgtgtgacagtatcccgagcatcctcaagtcgtagtgtacgtacaactagaggaaagcggaagagggttgatgtggaagaatcagaggcgagtagtagtgttagcatctctcattccgcctcagccactggaaatgtttgcatcgaagaaattgatgttgatgggaaatttatccgcttgaagaacacttctgaacaggtaataaaatagacccttttttttctagcaaggctttgtggattgctagattctcttgcaattgtcatagctccttagtttttgtttggattcattacgtcttcatggaataagggtttatgtcctttttacttaaattcataaaataaaataaaaattaaaataggaggaggaagagttaggtacccttagtagtttaaagatttgcttcattaacccttctttagagggccagggcttttttgaaaagcatgttccttttatcacagtggttctgaggatgagttattattattctctgccctagccaaatttgtgaagaagttggagcaattggatgaaaatggtggatattctttcggtcattaacttaataaaaagcttactgaaagaaggagataagagcctggactcagatattaagggaatatttttccctgcaaataaatgaatgaacaaatgctaatactttacatgaaaaatagcatgaagccttattttgaaatatgtttaaaagtaaacatgaagtattcatagcagagatttctgaaatttagggctggggctttcgggagctctgtagtgtgggccttccctagctctgcatcaaggagctggaggccatgatgggttgtgagatgatactagaggaaggcatggtctgggagcgtgcaggcggcagtgggatggatgtcacatcttgaaacatatgttcagggcctgctaaaagtagttttgaaaattagtcttttctcaccacagttattaaaactatcttgcatgtggatgaatatgtaatttggatgagtgaaggagcactaatgagcaccaacagttttaatgctaaagagaataggctctaaggtctctttgtagccttttttttttttttgagtcttgctctgttgcccaggtcggagtgcagtggcatgatcttggctcctccacctcttgggttcaagagattctcctgcctcagcctcctgagtagctgggattacaggtgcacgcaagcacgcctgctgatttttgtatttttacacagggcttcaccatgttggccaggctggtctccaactcctgacctcaggtgatccacccgccttggcctcctaaagtgctgggattacaggcatgggccaccatgcccagccccactgaccctttttttgagccccttatgctttcatgtatgagagctgaatgtgggcagaagtgggacagatgcagaaggaaaatgacagattttcttctgtttctaagcttatgtgtctattttaaaagcttgaagtaatccaatacttgatgtttaaaaattgtgattatgacagctagatagtgctgtaaatttgaaagacccaccttatctagcggtgaatttgaccatttaatttggttcataccctgttcttccagttctgtcctctttaaagtcaagtaccttactaattaactcattgttgaagttactgtttgacaaaatgacagaatcgtgttttctttttatagtaggaaaacctgaaatgtgggaagatgaccataaagcggtcttagtttaactgcctgtatggattaatttatttgattattccacaactttctttatctttgaagtaacacccctcaccctcctttctgtgtgtaggatcaaccaatgggaggctgggagatgatcagaaaaattggagacacatcagtcagttataaatatacctcaagatatgtgctgaaggcaggccagactgttacagtaagtgaatctagtcatcatttaatttaacttcattgtgttaactaacaaagtaactcaaaaagttttttggctaaaagagaagcattttagaaatggccgttaaagtactttttatattattagggcattacaagtgctataaaagatttttaaaattctgtcttattgagagtagtgaagaatggacctttgaattatttttatcttgtctattccagtagatataaaagctatctctaggctgatacttatagcccagtgtcattcaggagacactgcttggcataaagaactgttaagaatttagcattaacatatgcctaaaacagcaatctctagccttgggtgagcttcagaatcatttgggtagtattttggtgttcaggccctacttcaccctttgctatctttagggttggggtaggagcctaggttttgaataaaagtccttagattataggcacccttgtaaattttcactaattggcattctgtgtcttgatttctaaatggctctctattggtatgttctgaaatactacatctttaatagttactgaattattattagcttactttttagagaagtatgtttcattgagtaatcaaagattcttttgcttttacttagtaggtagatttagctaacaataaaatatgttaactttgatacagatttcaaagaagtcactcttttcatcctaaaagaatgtagaggtgactgtctctttccttttatatattctttaaaaaatattaaacgcatgttttaaatgtgtttataattttatgttgatacaaaccttactgttgaagatcaaaggctcagacttctctttaaaaaggtgtattcagagagcgtgatgccactttgtgaaaatatcaaatgctaatttggtaataatgggtaaaaatgggatcaactatcctaactacaatatcctttcttctcgttagtaattactatagtgagaaaaaattgctcactatagcaattgctattatatgtcttatggaagctgtataatgtggtaaaaagaatctgacattttagttcagaggattcagaattgagtgtgctctctatctcagaagtaatatggaagccttatgccaatcatgtgctttttctactgggtatactacctcagggactaaatacatggattctagagatctagtggataactcaattatcatataaaataatgtgatacttttttcccttcagttactggcattaaatgtgataagcagctctttggaacatggtagtaataagtgatctttctgtaaaattgcagaggcaaaagcaaagatcagtttaaaactctagaatagaaatatgagaaccacatgtgtaattttaaattttcttatagccgcattaaagtaaaaaagaaagacatgaattttagaactatattttatgaaacccaatatatccaaaatattgctttaacatgtaatcagtctaaaaagtcagatatttttacattcttttttttttatgtttagctaagtcttcaaaatctagtgtgtattttacccttacagcacattcatttcagactagccatattttaagtgctaacaagccacattttgctgcggtattgaatgacatggctataggacatattagttttaggttaagttagccagcaaggatactgacattttatgatgatgattactaacataaatcaactatgtgattacatataggctagtgagaaatattgcttacaattagggaaacactaacattccacatagtctgaatgttggaccagattcagttctttttttcagtttaatcccagttaatatcttgtgcccttttccatttgtaatgctgatgaaagatctggatgcttcaggggaacatctcaaaagtaagggctctctcctaatcagtaattcatagattttttttttcctgtttccaccccacccccccaccctttcttttttttgatagagacaggatttcaccatgttgcccaggctggttttaaactccttagctcaagtgatctgcccgcctcggcctcccaaagtgctgtgattacaggctggagccactacacctggcccccattttgaaataatacttggctttgccatcttcagctttccttttgcagtcataaagtcttttatattctataacaatgtatggattacaaacttttctgtttctatttgtttttaaatgatctttctaagagatcagggctagtagtatccctgtagctaaaggcattgagtttcctagaggtgtagtgatttgtccagaattcaaacctaggctttctgactgccaggtgttcttcactctatccattctcttttgccagtagatatataaaaagaatttcatgctcatgagaagggaaatataattatttctttgacctatttcaatagcaattatattttcccttgaacagcgagtgatttatacatttccagcattctttttggagcgcagtctcagatactctagggtattgtgacattgtctgtttggagacgtaccagtttccataagattattctagataggctctctgctgcagaaggtctctttagttcttgctgtaggcagccagagaacattattagagggagtcacagaaggctctaacatggaaggatggcctataaaacccacagagtaatagaacgctgaggctaccattcactgagttagccagccactgaatgtgggttatcacttgctcttttcaataatcgcacctgttacaggtgccatttctaccctgttttatggatgactaaagtaaggtaacttgctcagggtcagctggtgtgtaaaggaactaggatgtgagtgtaggcagttttacttcagggtcttatatattatcatcttcacttatcagatggggaagctgaggccttgagaagctctgtgagttctcctggccacatagctgtgtatagcactctgtagctggggcatagttctcagacttttagaatcaagtgtttgagtctcatcgcattgctgtcgttggcgtgtgggagaactgggttctgggtgtactgacatgctttggttttttacagatttgggctgcaaacgctggtgtcacagccagccccccaactgacctcatctggaagaaccagaactcgtggggcactggcgaagatgtgaaggttatattgaaaaattctcagggagaggtatggccagtttatcaggaccaccacaatgttaatttcacttaaagttcactgtgcaagtataatcaagatcagattgaaacgtgcaataaccgattgcataaacagaccaaagctgctaagttaattgaactgaagctgtctttaagttttaggaataaataggagtgtattatagagtactgattattagcacaggctccagaacagattttctgtgtcctgtttctgttttcactgcacattagctttgtgactttgggcaagttacttcacctctcttagatttgtcatttaaaaatggatattaatgacacaatatccatgagctaataataagaatgagacagtacttgggaaatgcttggaatagtatctggcatagtacctttatctagtaaatgcttaaattattaaccttgttactagctctcagaatgttcatgaaactgtgagtttgaagattgtggagtgtacatcttcttggagtgtgtgttttcagtgtgtcagtcttagaatccttgtcaaagtaccttaccttccccattgccacataaagacactgcatatacccctaccaatactagtcttagaaatactacttcctaataaagcagctacagtgtgctttgaagctagtaaaacatggcttcctccttgtctttccctagcgaatcaccttatccaggtgctgtaccacgcatcactgagcctctgtttagaatttgagtccctcctttgttgctattgccataagcatgttaatggagcttttgttgtgagttcagcatggtttgttcttctcattttccttttagttgtaatactgctttttcatcctttgcctaccaggagagctgtaagttggcttgcaaggaagccattggtcataaccttgttctgacatgcttactgattctgaccttttcacccagtttccaggctggcaggctctgctgtttgtaccttacaacctgactgggtatgcatttcagtctgagtggtgctgaaaggagatatatagggggaatgttaggctggcaaacctggtagggaagctaaccatatttacaagtgcagggctattcatttatttggaaaatcctgagtatctgctgtatgccagccactttgtgttaggaataagcaggaaaaaagccatacgtggtttctggcatcatggagcccacattgtaaagagagtaagggagccagggaataagataaagtgattttctgataaaggtaataaagataaactgtggtatcaggcccagcgcagtggctcatgcctgtaatcccagcactttgggaggccgaaggtgggtggatcacctgaggtcaggagttagagaccagcgtggccaacatggtgaaaccccgtctctactaaaaacacaagaattagccgggcatggtggcacgtgcctgtagtccaggctactcaggaagctgaggcaggagaattgcttgaactcgggatgagctgagattgcgccattgcactccagcctgggcgacagagcaagactgtgtctcaaataaataaataaagttacaggactcgctgagtaaagtttgtcaggagagggtccagaattgagccctagaaaatattgacattaggaataagagcaaaggaagtagaagatgcagccagtgaagtcagaggaaaatggtgtgtgatgtcaggaaagccaagggaggaaagtatctgtgaaaggagtggtcagcgggtcaaatcacaccgtccccttaggggttttttgtctgctcccatagtgccacgggcaggcctctaacctgcgtggtgctcatcacattgttctcactcactagaggaagcacactgagggcaagggcctgttctggtagatcctggtatcatgcttggcacataacaggaattcaggaagcatttactggatgcattttttaaaaaaaaatcagacatggaccttgacttacgttcagagaaataaagcaatagcagcattcattataagagtctgaggtgcctggataaaaagttctgttcatggccatcttcctgtctatccctcactgtaaccatgtctcttgtgaaacattgttaagagtggtgattggctcagataagactgaaaagcactgttataaggggtacaaggcagattaaatggactttcgtgagccatggaatctagtcattatttatgtcattttttttttctctgtgaaagtgtgttccaagttagaaacaatgttataggaggatatttggaatggagcagtaggtttaaatgccccaaaaaatagatacagtgacatgaacaaagtagtagatattatgacatgggatgcatcttcagacagtattactagtattactgatgacatattagtaaagctaactgaagcttagctccatttcataactcaaacattgaatagtagattatttgattgattgattggttggttggtccattcttttttttttttttggtgaaggagtttcactctgttgcccaggctggagtggagtggcatagcacgatctcggctcactgcaacctccgcctcctgcctcagcctcctgagtagctggaactacaggtgcgtgccaacacacctggctaatttttatatttttagtagagatggggttttaccatattggccaggatggtctcaatctcttgaccttgtgatccgtcacctcggcctcccaaagtgctgggattacaggtgtgagccaccatgcccggccaaggttggtccattcttttaacaaacttctaataccttcagcttgcgaggctctgttttaagtgagttctgtcagaaatgaggagagaaagtattatgaatacaggtcttatttcactagacagttacttttggcatttattcatttaattcgataagaccatatttgtcagtagggaccagaccacattaggaacaatctataaacaatccccgccataaagaccagtttgcagtaagattgttggtaactggcttagtcagttttgtttcttatgtttttttttttcttcttgctggggcattggaaatgtcagaaaacccaattaaactggcttagaaataatggaaattttttgggctcacataataaaaaatttaaatagtggacctaatccagtggctcacagcatgtccccggggatctgtctgttgtttctcttctggttgcctcccttggggacgcaggatagctgctggctgctcccagaggtacgtcttttctatttgctttttgtgggaaggtgatctttcaaaaaagtgctctttatggtggagtttatagattgttgctaacgtggtccggtactactgacagataaacatggtcttacccaattaaatgaatacataccaaaagtaactgtctaatgaaataagacctgtattcataccactttctctcctcgttcctgacagaactctctcagaacagcctagcaagcagaaggcagtagaagtttgttaaaagaatggacaatccagcccaccaaataatctgatattgagtgtttgaattatggagggaagctaaacttcatcccctgtgaggcacccatcctgggcttcactcacactggactagggtgggtcacgtgcccacctctaaaccagttcctggagttgggagggcggaattagagctcaagacttcttcctcccctctacagccacattgcactgggctccttgtgacacacgtgtgctccatggggggtgtgtacccaggtaaacctaggggctcttattcaggagggaaggggcactgggtggttaaaaacagcgattgtcaccatggcaaaaacaagatgttttttatgagggaaataaaaaataaagcagtccttccaaactttccagaatatagatataatggaaacttttgtatatgcaaatgattacttatatatgtagagatgcaatatataaaatataaacaatcatctttcgtccacataagatcgccctgatttgtagcatttgctaatttctgtggtataaatactcctactgtggctgatgccaggcttccagcattatgtgactgagcacagagctgtgcagtgatgagcagcatcagcaggtgcagccagctccgggcaccactgcacagatcagtgcaccttcatatgcccaaggctcgcagcaggggcggaccaatgctgcattttatagacagagtaaagcctgtcatgtaagactatttatgtgaacctttcaggacacttggggtaaacacatttatttagtagcatcttgactaataacaatttccttgatctaaacctcccaacagctttttggttctaaattattatttattatttttctacctagatttttagacattagctcacccattttttatacggctttctgtattagattaattggtttttgcatgttttcaaatgaagagtgcttaacagcagggttacacttaaagtagttatgttaaggtaattcataataatgaagacaggcaagttgctgttttctgaggttctcattgaggctaatagtcttaagctacatcatgagccttaagagccaatgtttgcatatgggatgtataccacgagcttctagaagctggaatgtggtaattttgttatagaagattttatttgactcgttcctcattttaagatgagttgagaaaagctgggtactctcaaagttttttaagaatttatttttctgctttatatgctgctatctcctagttgatagcttgaacggtggttgatctaaagaatcacattttttttattactaatttggttaaaacactgatatttgtgaaatggctatttctgtttgtaaagatagaccaatttcacagaattgaagttactggctaattgagaggctcaaaatggtccatcttccttggtcctgcaagagtaataaaaaatccccacaaaatactgttctgccaccttactttatttacaaaacacattattgggcatatttcaaatcgaagtctcatttctgtgacactgggttttgattttctttctctgccattgtaaactagctggtctgtgttagataagcttttactgaagtaatattgtgtcttcccctgtagcattctctttcttgagtgaccttaggacagggtacagaataaaattatatgctctgcagcactcttgaggacacactcatttacttgctgccagatcatcaggttagccttgtgcttaagcaaaaacactgctgcatttgtgccaagtcagcattttccacaggaaagtaatctgtatttgacctttttagtagaaaatggaaatagttgctttctgtcatacctttagtgaatgataggagacctatttctgtacagaatacattggaacctcactagtacgttattggtaaatagtgtacagtgttcatctgtcttgattttgtttcattcaagaggtatcagttgctgaaaggaatgaaaggagcttgtcctttcttctcacttatcaggtggtcctgttgctggtagtccctgagatcacagttggcttccagcttcattttattcagcatttatttagcaccttatctttgccaggagctaagatctttaagctgaattcatgttgagttttataaagaatttagtatgtcaaataatttgtagaattcttagtaacagaataggataaaaagcagtggaaacttctcagcagatatttcgaattggatagtacttcctcccctgcaggaaatatggaaggtataagaactgctactaattatgcggaaatttcagtttagtaaccagaaagttactgatatacagctccccccgccccacccctttaaaaataataaacaggggccaagtgtggaggctcatgcctgtaatcccagcactttgggaggctgaggtgggtggatcacttgaaaccaggagttcaagaccagcctggccaacgtggcaaaaccccatctctactaaaaatgtataaaaattagccgcacgtggtggtgcatgcctgtaatcccagctactggggtggctgaggcatgagaatcgcttgaacctgggaagtgaaggtttcagtgaaccgaggtcatgccactgcacaccagcctgggcgacagagtgagactctgtctccaaaaaaagggatgaataatagtaataataataaacagaaatgctgtctcttttttttttcttttttgagacagtcttgctgtgacactggagtgcagtggcgtgatctcggctcactgcaacctcaatgcaagccattcttctgcctcagcctcctgagtagctgggattacaggcacgtgccatcatgcccagctaatttttgtatttttagtagagacggggtttcaccatgttggtcaggctggtctctaactcctgacctcgggtgatctgcctgccttggcctcccaaagtgctgggattacaggtgtgagccactgcgcctggcaagaaatgctgtctcttaagcaaagaaaaggtccctctcccccgcatttggtgattttaagtgtgttttttaacttaaactactattgtttttaggaggttgctcaaagaagtacagtctttaaaacaaccatacctgaagaagaggaggaggaggaagaagcagctggagtggttgttgaggaagaacttttccaccagcaggtattactttatttatttaatatatttatttcaaattttattcacagaattacatgaagaccaagagtgtggttgggtttttcccctatcagttgatgaaccagcgcagttatctaccaagtggggtttgtactccccaaagggatattcaaggtgatactttagggtactggaagaatatgttggcacttttatttttattttttctcattgtaccaagtttcagttttgtcctttgttttctaatgtgcattatgtgttacagtaaaacatgtctatggattggatgtttactccaaacttgtttactctgtagggtcctatgattaaaaggtttagatcactaatttagagcaagaatctgcatataaactttaaaaaaacaaagtaatattcaacttcagtgtgaaacaaaattcttgctgtattaagttcctaatcattatctaattgaagatagattttggctgatggttgggcttttgagagcccttgaaataaagaaactccaaatttggttttaattataattaaattggaattattaataactaatgagccttcagtttatattctcaagctgtttgagtccgatcattaatcaaagtgtctacccttatcctgataagactttgtttccatggctccagatttttagtcttaagtctgctttgcttcattagccctagtcctggtctaaataaacactgtctcatatatttaacccccagggttgagaaccacttgaggtgggttgcatgaagtagcatgaattttttacctggatgccttctcatacattttggaggaatattttaaaacacatatgttacacttaacttacaagaaacaagcacaagttccattttctgtgcttcaatgggaaccatcgtaattactagaagtaaaataattatgtaagagataactcaaggcaccagacaagagggtcagcatgagttatatagcatgtcagatgctagaggaggtactccaggccagcagagtagttgagaagaactctgtgaggtgatgcttgtccactaatttgaaggatgggtgattatttggttattggagagaaggcagatgatggtgctctgaggatgttggaattcaccattgcttcactaacagaccaccccaaagcttagtggcttaaaacagtgatttcttacttcccataattctgtggtttgactgggctcagctgggcagtgtttctgttccacatgctgcagactgaactcaatcgagcaggctgtgttcagctcagaggttggcctcggctggaatatcttttaggtctctttctgtgtggatttctatgatttaagagtttagtcaaagctttatagcatggcaattgtctaacagagtaagtggagggtacaggtttctttcttttttcttttttttttttgagatagagtcttgctgtgtcgccaggctggagcgcagtggcgcaatctcagctcaccgcaacctccacctcccaggttcaagagatacccctgcctcagtctcccaagtagctgggattacaggcatgcgccaccacgcctggctaattttttatattgtagtagagatggagtttcaccatgttggccacgacaatctcaatctcaagagagtaccaggtttcttaaagggccctttgtaacattctcttagtcaaagtcatgaggccagtccagattcaaagtgggggtaaatagtctccacctgttggtgggaggaatggcaaagaattcatggtgatctttaactcactacagaggatgtgtaaagaatgtggccgggcacggtggcttacgcctgtaatcccagcagtttgggaggcaggcagatcacaaggtcaggagatcgagaccatcctggctaacacggtgaaaccccgtctctactaaaaatacaaaaaattagccgggcgtggtggcgggagcctgtagtcccagctactcgggaggctgaggcaggagaatggcgtgaacccgggaggcggagcttgcagtgagctgagatggcgccactgcactccagcttgggtgacagagtgagactctgcctcataaaaaaagacttaatgcaccaactatatccgctcatccagttattttgtagggttcatgtgagagttaaatgaagttgaaagattggaattaaactgacatagtctggaatgcttagggatgtagcttctgtacaatttggaacaaaggagaagttaagactgcattttaaaatatcactggccaagctgaatcagagggactaactctagagaggagattccagaggcagtgagggaatatataatggaaatttattaaggcttagtgactaaacttgagggtgagagaagaaaaaaaataaagatgtatgaggtttttagcttttgtgatcacagaaactaatgataccaaggttcataagagggaagatggaagggcagaacaggcgtttgaacttcatatttgaggatgaatccaatcgccttttgaattgattagaaatattttggtgaccttcaaaaaaccagttttagttcaatcagtggtgagtcacaagtcatattgtgaggttatatgaaattaatgagtgataaagaaatgggtagaggagccatgttgacttcaccttggaggacaaatccactgcagatggcttgggatgtgtaagttcaggatctagcaagctgtagtctccgatgtggttgttaaaagctgatccactgatctcctatttcctaagttatcaaaagaggttattgaacaatggttttcaaattgagctgcacattagaattactttaaaattatatatagatagctaccctttcccagtaaaatgagaaattcttatttgattgatcaagggacctagatcagaatttgttttaaactcctcaggatctgaatgtgtagccagagttgacaattactgttctggaatttgttggggggtattctagaaagaagtccataaaagaaggttagaggccagatacggtggctcacgcctgtaatcccagcactttgggaggccaagggcaggtggatcacttgaggccaggagttcaagaccagcctggctaacgtggtggtgatgcacacctgtagtcgcagctgctcgggaggctgaggcatgagaatcgcttgaacccaggaggtagaggttgcagtgagccaagattgcaccactgcactccagcctgggcaacagagtgagactctatctcaaacaaacaaagaaaaagaaaaaaagaaaaggttagaaaagatgagagatgataaagggtccatttgaggttaggtaatatggtttggtatccctgtagttaaaagtttttgtcttattttagaatactgtgatctatttctttagtattaatttttccttctgttttcctcatcagggaaccccaagagcatccaatagaagctgtgcaattatgtaaaattttcaactgtcttcctcaaaataaagaagtatggtaatccttacctgtatacagtgcagagccttctcagaagcacagaatatttttatatttcctttatgtgaatttttaagctgcaaatctgatggccttaatttcctttttgacactgaaagttttgtaaaagaaatcatgtccatacactttgttgcaagatgtgaattattgacactgaacttaataactgtgtactgttcggaaggggttcctcaaattttttgactttttttgtatgtgtgttttttctttttttttaagttcttatgaggaggggagggtaaataaaccactgtgcgtcttggtgtaatttgaagattgccccatctagactagcaatctcttcattattctctgctatatataaaacggtgctgtgagggaggggaaaagcatttttcaatatattgaacttttgtactgaatttttttgtaataagcaatcaaggttataattttttttaaaatagaaattttgtaagaaggcaatattaacctaatcaccatgtaagcactctggatgatggattccacaaaacttggttttatggttacttcttctcttagattcttaattcatgaggagggtgggggagggaggtggagggagggaagggtttctctattaaaatgcattcgttgtgttttttaagatagtgtaacttgcttaaatttcttatgtgacattaacaaataaaaaagctcttttaatattgatatactgtcctttttaacgctttaaaaacagattttgaggggagaaaagtattgtttcagttttgcttttgataaaaatataatttgacttctttg

SEQ ID NO: 150 - DNA, 2927 bp, Homo sapiens
tggggagtgcggcgccgcggcccgcgccacctccgccccccgcggcttgcctccagcccgcccctcccggccctcctccccccgcccgccgctccgtgcagcctgagaggaaacaaagtgctgcgagcaggagacggcggcggcgcgaaccctgctgggcctccagtcaccctcgtcttgcattttcccgcgtgcgtgtgtgagtgggtgtgtgtgttttcttacaaagggtatttcgcgatcgatcgattgattcgtagttcccccccgcgcgcctttgccctttgtgctgtaatcgagctcccgccatcccaggtgcttctccgttcctctaaacgccagcgtctggacgtgagcgcaggtcgccggtttgtgccttcggtccccgcttcgccccctgccgtcccctccttatcacggtcccgctcgcggcctcgccgccccgctgtctccgccgcccgccatggcgactgcgacccccgtgccgccgcggatgggcagccgcgctggcggccccaccacgccgctgagccccacgcgcctgtcgcggctccaggagaaggaggagctgcgcgagctcaatgaccggctggcggtgtacatcgacaaggtgcgcagcctggagacggagaacagcgcgctgcagctgcaggtgacggagcgcgaggaggtgcgcggccgtgagctcaccggcctcaaggcgctctacgagaccgagctggccgacgcgcgacgcgcgctcgacgacacggcccgcgagcgcgccaagctgcagatcgagctgggcaagtgcaaggcggaacacgaccagctgctcctcaactatgctaagaaggaatctgatcttaatggcgcccagatcaagcttcgagaatatgaagcagcactgaattcgaaagatgcagctcttgctactgcacttggtgacaaaaaaagtttagagggagatttggaggatctgaaggatcagattgcccagttggaagcctccttagctgcagccaaaaaacagttagcagatgaaactttacttaaagtagatttggagaatcgttgtcagagccttactgaggacttggagtttcgcaaaagcatgtatgaagaggagattaacgagaccagaaggaagcatgaaacgcgcttggtagaggtggattctgggcgtcaaattgagtatgagtacaagctggcgcaagcccttcatgagatgagagagcaacatgatgcccaagtgaggctgtataaggaggagctggagcagacttaccatgccaaacttgagaatgccagactgtcatcagagatgaatacttctactgtcaacagtgccagggaagaactgatggaaagccgcatgagaattgagagcctttcatcccagctttctaatctacagaaagagtctagagcatgtttggaaaggattcaagaattagaggacttgcttgctaaagaaaaagacaactctcgtcgcatgctgacagacaaagagagagagatggcggaaataagggatcaaatgcagcaacagctgaatgactatgaacagcttcttgatgtaaagttagccctggacatggaaatcagtgcttacaggaaactcttagaaggcgaagaagagaggttgaagctgtctccaagcccttcttcccgtgtgacagtatcccgagcatcctcaagtcgtagtgtacgtacaactagaggaaagcggaagagggttgatgtggaagaatcagaggcgagtagtagtgttagcatctctcattccgcctcagccactggaaatgtttgcatcgaagaaattgatgttgatgggaaatttatccgcttgaagaacacttctgaacaggatcaaccaatgggaggctgggagatgatcagaaaaattggagacacatcagtcagttataaatatacctcaagatatgtgctgaaggcaggccagactgttacaatttgggctgcaaacgctggtgtcacagccagccccccaactgacctcatctggaagaaccagaactcgtggggcactggcgaagatgtgaaggttatattgaaaaattctcagggagaggaggttgctcaaagaagtacagtctttaaaacaaccatacctgaagaagaggaggaggaggaagaagcagctggagtggttgttgaggaagaacttttccaccagcagggaaccccaagagcatccaatagaagctgtgcaattatgtaaaattttcaactgtcttcctcaaaataaagaagtatggtaatccttacctgtatacagtgcagagccttctcagaagcacagaatatttttatatttcctttatgtgaatttttaagctgcaaatctgatggccttaatttcctttttgacactgaaagttttgtaaaagaaatcatgtccatacactttgttgcaagatgtgaattattgacactgaacttaataactgtgtactgttcggaaggggttcctcaaattttttgactttttttgtatgtgtgttttttctttttttttaagttcttatgaggaggggagggtaaataaaccactgtgcgtcttggtgtaatttgaagattgccccatctagactagcaatctcttcattattctctgctatatataaaacggtgctgtgagggaggggaaaagcatttttcaatatattgaacttttgtactgaatttttttgtaataagcaatcaaggttataattttttttaaaatagaaattttgtaagaaggcaatattaacctaatcaccatgtaagcactctggatgatggattccacaaaacttggttttatggttacttcttagggaagggtttctctattaaaatgcattcgttgtgttttttaagatagtgtaacttgcttaaatttcttatgtgacattaacaaataaaaaagctcttttaat

SEQ ID NO: 151 - protein, 580 aa, Homo sapiens
MATATPVPPRMGSRAGGPTTPLSPTRLSRLQEKEELRELNDRLAVYIDKVRSLETENSALQLQVTEREEVRGRELTGLKALYETELADARRALDDTARERAKLQIELGKCKAEHDQLLLNYAKKESDLNGAQIKLREYEAALNSKDAATALGDKKSLEGDLEDLKDQIAQLEASLAAAKKQLADETLLKVDLENRCQSLTEDLEFRKSMYEEEINETRRKHETRLVEVDSGRQIEYEYKLAQALHEMREQHDAQVRLYKEELEQTYHAKLENARLSSEMNTSTVNSAREELMESRMRIESLSSQLSNLQKESRACLERIQELEDLLAKEKDNSRRMLTDKEREMAEIRDQMQQQLNDYEQLLDVKLALDMEISAYRKLLEGEEERLKLSPSPSSRVTVSRASSSRSVRTTRGKRKRVDVEESEASSSVSISHSASATGNVCIEEIDVDGKFIRLKNTSEQDQPMGGWEMIRKIGDTSVSYKYTSRYVLKAGQTVTIWAANAGVTDPTDLIWKNQNSWGTGEDVKVILKNSQGEEVAQRSTVFKTTIPEEEEEEEEAAGVVVEEELFHQQGTPRNRSCAIM

SEQ ID NO: 152 - DNA, 3076 bp, Homo sapiens
tggggagtgcggcgccgcggcccgcgccacctccgccccccgcggcttgcctccagcccgcccctcccggccctcctccccccgcccgccgctccgtgcagcctgagaggaaacaaagtgctgcgagcaggagacggcggcggcgcgaaccctgctgggcctccagtcaccctcgtcttgcattttcccgcgtgcgtgtgtgagtgggtgtgtgtgttttcttacaaagggtatttcgcgatcgatcgattgattcgtagttcccccccgcgcgcctttgccctttgtgctgtaatcgagctcccgccatcccaggtgcttctccgttcctctaaacgccagcgtctggacgtgagcgcaggtcgccggtttgtgccttcggtccccgcttcgccccctgccgtcccctccttatcacggtcccgctcgcggcctcgccgccccgctgtctccgccgcccgccatggcgactgcgacccccgtgccgccgcggatgggcagccgcgctggcggccccaccacgccgctgagccccacgcgcctgtcgcggctccaggagaaggaggagctgcgcgagctcaatgaccggctggcggtgtacatcgacaaggtgcgcagcctggagacggagaacagcgcgctgcagctgcaggtgacggagcgcgaggaggtgcgcggccgtgagctcaccggcctcaaggcgctctacgagaccgagctggccgacgcgcgacgcgcgctcgacgacacggcccgcgagcgcgccaagctgcagatcgagctgggcaagtgcaaggcggaacacgaccagctgctcctcaactatgctaagaaggaatctgatcttaatggcgcccagatcaagcttcgagaatatgaagcagcactgaattcgaaagatgcagctcttgctactgcacttggtgacaaaaaaagtttagagggagatttggaggatctgaaggatcagattgcccagttggaagcctccttagctgcagccaaaaaacagttagcagatgaaactttacttaaagtagatttggagaatcgttgtcagagccttactgaggacttggagtttcgcaaaagcatgtatgaagaggagattaacgagaccagaaggaagcatgaaacgcgcttggtagaggtggattctgggcgtcaaattgagtatgagtacaagctggcgcaagcccttcatgagatgagagagcaacatgatgcccaagtgaggctgtataaggaggagctggagcagacttaccatgccaaacttgagaatgccagactgtcatcagagatgaatacttctactgtcaacagtgccagggaagaactgatggaaagccgcatgagaattgagagcctttcatcccagctttctaatctacagaaagagtctagagcatgtttggaaaggattcaagaattagaggacttgcttgctaaagaaaaagacaactctcgtcgcatgctgacagacaaagagagagagatggcggaaataagggatcaaatgcagcaacagctgaatgactatgaacagcttcttgatgtaaagttagccctggacatggaaatcagtgcttacaggaaactcttagaaggcgaagaagagaggttgaagctgtctccaagcccttcttcccgtgtgacagtatcccgagcatcctcaagtcgtagtgtacgtacaactagaggaaagcggaagagggttgatgtggaagaatcagaggcgagtagtagtgttagcatctctcattccgcctcagccactggaaatgtttgcatcgaagaaattgatgttgatgggaaatttatccgcttgaagaacacttctgaacaggatcaaccaatgggaggctgggagatgatcagaaaaattggagacacatcagtcagttataaatatacctcaagatatgtgctgaaggcaggccagactgttacaatttgggctgcaaacgctggtgtcacagccagccccccaactgacctcatctggaagaaccagaactcgtggggcactggcgaagatgtgaaggttatattgaaaaattctcagggagaggaggttgctcaaagaagtacagtctttaaaacaaccatacctgaagaagaggaggaggaggaagaagcagctggagtggttgttgaggaagaacttttccaccagcagggaaccccaagagcatccaatagaagctgtgcaattatgtaaaattttcaactgtcttcctcaaaataaagaagtatggtaatccttacctgtatacagtgcagagccttctcagaagcacagaatatttttatatttcctttatgtgaatttttaagctgcaaatctgatggccttaatttcctttttgacactgaaagttttgtaaaagaaatcatgtccatacactttgttgcaagatgtgaattattgacactgaacttaataactgtgtactgttcggaaggggttcctcaaattttttgactttttttgtatgtgtgttttttctttttttttaagttcttatgaggaggggagggtaaataaaccactgtgcgtcttggtgtaatttgaagattgccccatctagactagcaatctcttcattattctctgctatatataaaacggtgctgtgagggaggggaaaagcatttttcaatatattgaacttttgtactgaatttttttgtaataagcaatcaaggttataattttttttaaaatagaaattttgtaagaaggcaatattaacctaatcaccatgtaagcactctggatgatggattccacaaaacttggttttatggttacttcttctcttagattcttaattcatgaggagggtgggggagggaggtggagggagggaagggtttctctattaaaatgcattcgttgtgttttttaagatagtgtaacttgcttaaatttcttatgtgacattaacaaataaaaaagctcttttaatattgatatactgtcctttttaacgctttaaaaacagattttgaggggagaaaagtattgtttcagttttgcttttgataaaaatataatttgacttctttg

SEQ ID NO: 153 - protein, 580 aa, Homo sapiens; identical to SEQ ID NO: 151

SEQ ID NO: 154 - DNA, 24039 bp, Mus musculus
  misc_feature (1)...(24039): n = A,T,C or G
catcaccaaatcctggggttttgggccctcggtaccgtttgcgcacgaaggggcgtggccccgggacccaggccagggagccagaactattcgctgctcgcaggagcgcagcctgtcgccaaggtcgggtcaagtcgtcgcggggcgtggctgatagggcagtgatttaagagacgcggctttgggacaggaggacccgcaccaatggagaccgccagggactacgcgggagccctcatcaggcgagtgccgaccacgtacccctgcgcccgggtcacccttctttcagaatactctgctcgtctccatttctcctctgctccccagttcctcctgagccccaagtcaccaactccccgcgcgttcccgtgaatccctctccctctcacaccccatcacctaccccgggtctctgctccctgggccatagtcccccgtgccgggcctgttcctacccacgagcccagcagccagaggttcctcccgaaaaaggccacaggtgcccagtggagtgctcccgaggtgcgtgggagtccgcaaacaagtgacatttgtgaacgcggggcggggggtggggggtggcgggaagggtgccctcattctgttgctgctcctacaggagatgaggtactgggaattctggagtgtctgtgctggacagggcttctcgggggttttttgaatcaaattggagggcgaggaaggagtccaggcttaggtcctccgggtgagtgcagactctgcctatctgggctggattcactcaggttttggaggggcagttttggctcccagaccactccccttcagtttctctctatatgctgttagaacattctggttctcggtaatatactagacagtatgagggtgtgtgtctgtgtctatgtaagaaagagacagagacatagagagatgctaaggcaagagacttggagacacagatttggagacagacacagagacagagaatgagaggcagacaatgagaatgagagacaggaagacaaagaataagatacagagagaaggatttggaaacagagagagaaagactcacagacatacagggcctccctataaggcccagcttagcttagaaatggctatatagtccagactggtctcaaactcacagaactcttgcctctgattctgtactctagatgactggctttcagagtcaaggccagccagctgcagggcagcgactttacaaagcaggttaaacagtgagatcttgattctttacagatggcaaaaatactacaaaaggatgtagaaacccgagtacactcacagacctcactgcgtatcttttacagagagggaggaacagggtcaccaaacttggatgctctgacatcttatgagacagggacataagggaaactgtgtgtcagatcacagggttagaaaagtagccaccaaaatgaaaaaagaggggggtggggagggaagctggtcttcctggatggttcctgcttttctcttgaaacaaagacttaactctgggagttgggggatttgtaaaggctcccaaataacaaggtatcctacctctcagcagcaggagatgtgtgggtggcgaggaccatgggcagcctcactgcaggagagaagaagccctttgccaggtttctcagttcctcctgcagccttccctttagctcctccagtttcctctattcccatctgtgcttgtcctgggaagccttattttccatctatcttgtcctgatgctcagactggttgagggaacaggggctgctttttgctctctttacagctcaacacaccatctgccctcaccaacacttgaaagctcaaggacaagagctgtggttctggggtccttttttcattcttcaagggctgaggtttacagatgttcattctctaggcagtatcattttgccttggagaagggaggcatgggaacatccttgcgtctgatcataacgtcatcatcattgtttattgaaatccagcatgtacctgggtgaggtctccatggtgttacatgtgaggcggaagtgactcagtaaatcaaaacactggagaatctatgatctatgactccctcccttgccacctgacaagtcccaggagctcatggctttttttttttgtgacagacttgcttcagttaaaaaaaaaaaattacctatttccaaaccagcctgctctaatcctttggcatgacttgattccaaacagaattggaagaaaacaacctataatacttgctggctgaaggaaaagaaaacatttcccatttccccacccctgtttaaaattctatccaggctaaagagccacaggcaaggccccctgttcattgtggtcttgctgcatacctgcttcctgtccggggatttaaacagcacagcacagtgtggttaccattccttagcgaataactggaacctttcccgggaggtaacttaatcaataaacacagtatgaaaaagatacttgttctgacggggtggctcaatagtagagtaaaccctcatggaggaagccccgggctgagacaggagagagaggatagttgtacacaattctgaagtctttgggacaggaggaatagctcagggttaacgagtgcttgctgcctaagcatgaagacctgagttcagatcctggctcctgcgcgtaaagccaggcctggtcacaggcactcagaaccccagacctgtgggagatagagacaagggggtgcttaggggctcactggccaccagcctaactccaggttcagcaaaagatcttgtcacaaaggcatgaagcagaaaggacactgtgcgtcctccttcagcctctgtgtgtgctcctgggtgttttacacacaccacattcatacaaattacaaattattctttaatgattttgaaaaaaattttaaagatttatttattatagttatctataatgaatacactgtacactgtagctgacttcagatgcaccagaagagggcatcaggtctcattagagatggttgtgagccaccaggtggttgctgggatttgaactctggaccttcggaagagcagtcagtgctcttaccctctgagccatctcaccagcctgaacttttttttttatttgtgtgcacaatataagtgtgtggaatgcccaaagagaacaaaaagatgtttaggattccctggagctggagttacaaatagttgtgagccacctgatgtgggcgctggatacccaactctcagctgctgagtcatctctgcagccctaactgcagatcctgaaacagcctgttgacgaacctgtcaccactagagaccttggtaacaaggaagaggctagtttctagtgaaaccctggatatttgtaggtgtttattactacagacaaggtctactttggccaaaccctgaagctattacaaggctgacatttaccctgaaaggccaacaccagcacttgtaactatttagtagatcatctatggccgggcgctgctcagtggcacagggagtgcttagcaagtctggtaccaccggctgcactccagcaccattcaaaaaaaaataatcagaatagcttcccttttgtaagatcttggttttggacagctgctctcccagctcagaatttatcccggcttctctggtggcattagaaagagaacagtctcccagctttctgtttctgtaacaataatgttacaaggtatccaagggcttcagtcttgtgttttgtgtgtgtgtgtgttctatgttcttttttatatcattatatgtaagcacgctgtaactgtcttcagacactgcagaagagggagtcagatctcattatggatggtttgtgagccatcatgagctgggatttgaactcgggaccttcggaggagcagtcagtgctcttaaccactgaaccatctccccagcccatgttgtatgttcttatcgtaagcattctgtcaggtctcaagaatagatgggggtcccacagcctgtgtcaagcatgctccctctgtgtgtgctaccttcaaggagctcggtgatgggaagcctggtttgctgacacttgccattggaccctagtactcttagaccccgccttacaatgaatagacccctctctaaacctgatggtcacccctgaccctcatctcctctctctccatttactggtgcctgacctcaccatcacccaccttaacgttagttctcaaatactcttgccctgtggtgttgggctgataaagttctgttttctacttcccctatatgcattcctcattttctgaataagagggaaatgcacagcagctatagctgatccctgaatagcctctatcactagtaacaccaaaagtgcagctggcccccatcacctcagcatctgcctccaaggattcagccaactgcagaggggaaaaggtgattgattgattgattgattgattgattgattgattgattgagtttgaagaggaagttggttggttgcgtttcttgacactaagattagattctcccatgtagcctaagttggcctcaaatttctgcctgcttctgcctcttcaggtacagagagtgcagtcattttgtaccacctgcaggtgagtgccacctgagagtgcatgtgtaaaacacataatggtgcagatgggtaccacctgagggtgcaggtgtgcaccacatgaggatgcacctgtgaaccacctgagggtgcaggtgtgcaccacatgaggatgcacctgtgaaccacctgagggtgcaggagtgcaccacatgaggatgcacctgtgaaccacctgagggtgcaggtgtgcaccacatgaggatgcacctgtgtaccacctcaggatacacgtgttaccaccacctctggctcttgaaaatatctgtagttttgagttgcacctgtgcagacatggtctgtcctgctgtgctatatggtagagcagctacttacaatgtacttggtgtactcagtaatgtagagatggttaaaacattcaagaggatgtatgtaggttctacaaacattatatcttataaggggacttgaacatctgtgaatttggggatactggggctctggagacacacctccttgggatactgggagacagttgtatctctctttaagacctagttccaggacctttgctctagtgctttcaagatagacatcagcccatggatagcatacaaagaaagccttttatgggttttgagggagttccatgtagaatgatgggcaaggccagtggggcaggtggtaaaaggatttaccaaaggcaaaaaacaatacactacaaagaatccccagggaacccctagaacctgcaagggaatagccgtctttcatagtagttgaggaggagttatagtcttgccttgtgggcagttggtgtgtggccccaatctggtgacatttccttatcttgtaaaaccatacatttcccccgtgagactggtctttctcatgtgcattggatcatgggaattaggctcctgtgtaaggcatttaagttcataagaagaggttccacctaggcatggtcttgctgttaacatgcagggattttgatcttggttttggcctttttcctctggtgtgtaagtgtatgtctgtaggggaggggtagtcatcttattggagaaaaagccatgtggactgtcagtccgtggcttcttgcttattgtcacatattgtcacacgttctctcagagacgactgcaaagctcccccactaccccctcttcttggagatctgatgtgtgagaatattccatgaagtctgatttctattattgttttgatttcctctgaacaatctatttccttaaaggccctgtttccttattagttttcctcaatgagttacttcccttccaacttcatagaactgtctgcacccagtttccaaggaactagggagcagcggctctcactgttgacggggtgaaaagcagaatccggggggtttctcagtggtctggctgttttgattttggggagctacggaaggagggctgaacccagggccttattatgttcttctaactactaagccacacacccccaactctttctttctttttatttattcattcatttatttatttattttggtttgttttgagacagggtttctctgtgtagccctggctgttctggaactcactctgtagaccgggctggcctcaaactcagaaatccacctgcctctgcctcccaagtgctgggattaaaggcgtgtgccacctctgcccagtccccctcaactcttaaggctccctgtcttaactttgacaagtcaggatattgggggggggtgttcaggaatatagaaatagaaaccccacttttagcagtgtgccaatggccagatataaagcattctgtctttcccattgggacagagtgaataggggccactcacacgctgtgcatttaacagcttagactgactgatcatttagttggagcagtcagtactcatacatgcttcttactcgggtttagtgtgcaaaaaagttcagttaacccctccatgtgtttaaaaaacagtcttcttgttgttgttattttggtttggtttggtttttcaatacagggtttccttgcatagccctggctgtcctggaactagcttggtagaacaggctggccttgaactcacagagctccatctgcttctgcctccccagcgctaggattaaaggcatgagcccacactgcccaacataagatagtcttaatctgagagagagactgttgaaatagggtttctatttggaacctggggctcacagattagactaagttaggtcacagtgagccctacggatccaaagtgtttaatttttccatctgagcctgatttttctttttatcatttgacacattaaggcactcatccttgataaaaatggttggacttaatttctgtgtggtgtggtgtgtgtgtgtgtgtgtggtgtgtgtgtgtgtgtgtgtgtgtgtgtgtgtggtgtgtgtgtgtgtgtgtgtgtggtgtgtgtgtgtgtgtgtgtgtgtgtgtgtgttccaagagtcttatctccagctgtgagtcagttcttgcttaggaaatagaaaactaagaacaaaagatccactgtacctcctagccaagaaggctgcactgaggtcaggtagaggcagggagggccgccgtgattgccagcccttatcttgtcagatgggaaaagacagtgaggacttttgaactctccagccgggccaggttactggagtggttcctggggagccctggggcccaggtaattaggtcaaagatgtgccttctgctgctagcggctagagctggcatttttgggttttcagtacagggcccctgttctcttgtgtctcctactttatcctctcatgcaaataaatggcatgaggtgggatggggttgaggagggatgctcaagcaggccctgggctctctgagcagcttccagaggccccgtgggagcagcaaaggcctcttactcaggagaaggagatagactctctacaggggggctcagagtctcctatgggaaggacagaatttggtggggcagacaccaaggtaagaaagttctggttagagactagatgtggtgacacaggatgtaattatagtacacaggagacaggcagggggatcaggtattcttggtcagcctaaagaacatagtgagacccagtttcaaaatgcccctgctgctgggcatggtggcgcacgcctttgatcccagcacttgggaggcagaggcaggcggatttctgagttcgaggccagcctggtctacaaagtgagttccaggacagccagggctatacagagaaaccctgtctcaataaaactaactaactaaataaataaatgcccctgccctcccccccaccccgaaagttgggtgcctattcagaacttaaaacctggtactgcttaatggccttctccactgcctgctgtccccgggccactgtctaactcatgactgtgacttagaagtttccccatagtccgttaatgggcacaggtgtttgctggatgtagaactctgctggctttttctcttccagctggttaaagcttcacagtgtgagtcggttgagaacaaagttgggattctgagtgggaaacatagacgtcgctagtccccaactgctgccttccaagttcccaggtgtggtgccattgcacgaattctgccctactgttagctcagccctatgtggacatcttgtgctttgcgttgtgcaacagagacctggtacaactcctccaaatcaaggcagaagttcaggagccatatgccagggccgctgctaggctagacctatccaggtctctggtcaaggttccaaggtccttcggatgggagagctgggtcaggaacccctgggtctatcccagtcccctccacacatcctcatgggaagcaaattgtgcagccactttacacttctggaaaggaaggaatcaagtatataaatacaaaactgccgtactcaggactggagagagagctctgtggtaaagagcacttgatgatcttacaaaggacccgagtttagttcccagccccgacatcaggaggtgcacagccatttgaaatttcagctccaggacatttgagcctctgacctccatgggcaactgccttcacttgcatatactcacatgcaaacatacacacctatacctaatttaaaatgataaaaataggctggacatggtggtacaaggctttaatcatagcacccaggaggcagacaggccttcacaggttcgagatcagcctggtctgcaacacaagttccaggccagccaagactaactacatagaaggattctgttccaaaacaaaacaaaacaaaagaattattactgtaataataataaaataatcatgatttgagcttctgtgctatcaacctggttgctccaggatgttatagattgtttatgatctacttcttccacccaacagaaacttttggcttaggacagatactgcttcccataccatcaatttggatgatgttgagaaaccatgttgggtctcactcttcccatctgtgaaatggggtgggggaggtttgatgctgtggggactgtagtgtgtttgactatggcaggtacacagaggcaaacagtatgaggttgtgtgtacttcagaccaaattattgctgacaacctaggtctaatttcagagtgtcagcttgttgtgggggggaggggtagggaggaatgagggaggaaagagaagagaacaagaagctgcaagtgacaagtgttggctggcagtcccctcttctgaacttcctgagatgtgtcaatgcagatagcaacatgacttagtctgccaggtttattttttaattttctctttttttttaaatatttattttatgtatgtgagtctactgtctctgtcttcagacacaccagaagagagcatcagatcccattacagatggttgtgagccaccatgtggttgctgggaattgaactcaggacctctggaagagcagtcagtgctcttaaccactgagctacctctccagcccaaatattttattttatgtgtgtgttttatctgcatatatatatatatgtatgtatgtatgtatatatatgtgtgtgtgtgtgtgtgtgcacacacacgcgcgcgcgcgcgcgcgcaccccatgcatgtagtacctaaagatgtcagaagagggcaccagatgccctagaactgtagtttacgggtgagaaccacaacgtgggcactgagaatcaaaacaggtcttctgaaagagcagctagtgctcttaactgctgagccatctctccggcctgttggaataacatctttatgggtgtgttcctgaatgagaaagagcccacaagctccttgtgtgtcactcacctggtttccacagaggtttaaccaccgttgaggctcaacagcacagctgtcacctgatggagttgtgtttagggagtgtcttaatgctccacttcccaggcattacttctgtcctttgttaaatacagcttgtgtgatgtttgagaacatgcagtggtatgtcagaggcagtcaggcatcctttcatgacgcccaaagtgtcttgcatttaataacatgctcttcacttgtgtccttgctacttagcaagtagcctagctgacctgtggaaggtgatagtgagtgcctggggctgaatctgaagttcagggtcatcctctgctatgtaaggagttgaaggctaacctgggctacatgagaaccctgacttaaatcagcaacagaaacaagcccatccaactttgaaagttaattaaatattaagcccaaataaaacaaattttgttttcctaattaactactaaaagagtaaatgtgttcttttttcactaatctaacatactacttccttgtagtttcccattaataaaaattgaacaatagagggtccggttctttcagaaaatgttgtttttgatgttgctgtaattattcccctggtccatgttagtgtggtttgggggatgcactgtttaaaagtcgttagtaaagaactgcctcagctaaagtctatgacgtagtctttgcttagaaaagagaacagtcaatgaataatatttgttatctctgagggtgcacatgaaaagaaaacaccagcgtgcctgctgtttcccatgttgtatcctggcttggtgtaaaattccacatttcccaaagaattaaaatgaaatatgaagggtcatgggactcaggacctagagtttcctccttccgttcttccaatgacatttatgatgttggtccttcataaggtctcagcaaaatgttaaggcctagatggaatgttaaggcctaggtaacagttacttggcaccctgtcattatatggaaacttttttatatgtcttcgctgttactaggaaactttctaatgccaagactgattacatattctgttatgttctgtgcccttggaaaccaattatggtaaaagtcaatagaactgttttgtatcgttacctacaataagcttggacctgaaccaaccacccaacagcacttcctgtacctgtgtataagccttcatggtatcagctgcccctgggatggaccccagcataagagagacacttgcgccaatataagaaactatttggaataagacttccattttgagtagtggtccaggaaagtttaagttcccaagaccatggggaaaatcccattttttaaagaacaggcaggtgtacttatctggggtctgtttgatctgtcgcaaggggatccaagtcttatgaccctctgaaaagcaattaacaggtgtctgtagacagcaggagtaaaggcatggacatttagtccagagggctagatatgcaaaatgaacagagatggtttgagaatgatgaaagcacctttaaatctatattcagaagacaaccatagaaaatccaaaacctcgagcctgtggctgaattgtaagcagccagtattccatcagctcctcagaatcccattgatcaatgttaaaataataatagcagggggaagaactgtgaaacttcttttcatattttgtatatcttatattatttttaatatttttataacttttatttacatattttaaaatattcctttaggccctctaatctttataaaacatattgaacctctgaacatttttagaagcatttatatccttagattttatatatcatatgtataaagttaatatataatatatataattttaaattttgtaattttgtaattttttttttttttggttttttggttttttgagacagggtttctctgtgtagctctggctgtcctggaactcactttgtagaccaggctggcctcgaactcagaaatccacctgcctctgcctcccaagtgctgggattaaaggcgtgcgccaccacgcccggctaaattttgtaatttttaattaattatttatcacgagtcataggtggtaacatgaaacctgtgagcaaagcaaacctgtttgacctttttaataagagattagtagttttaatcaattaataagttgattaataaactaaatcagtgatggcttaccctgaggtaaggagctagttgtctgttgttctctagctgtcaagctacagttagtatagccatcgattaatcagagacctgaagaaggataaattaaaatgccagaggctagtccatattttattacccaggcagttacaccaggctccttcatctctatggcaccgagggcagaggcgatctttgtccatcaggccagaagatgaagaggccttttcctgtggaggaggaacatggggcagaccgacctcaccttgtcttaagcaatctgtggcaatcaattctgcagtgtcctctgtttgtccacagttcaggccaggccctagcagcaggggagacattggggcagttatgctcagtggttattgtaccacactccgggcagtgccttttgtgcccatatcttcttggagaccttggcgggggggggggggggtcaccaagtgtttgggagtctctgtcatggtaagtttaaacatattaaatgccatatttagcagatctctgacaggtttgagagccagtatttgcctagcatatctgtgttaaacaatctctgtctgtttttagttatcctttttaaactgagccttgtaaacataaaataggagactaaataaagatttaatcttataattaactgtatcagtttttagcctggatttaaatgtattttttaacatgtttaaaggatttgatcatttaccaggttattcgctctcagttcctgttaaatttgatccttaaaaattacagttttgaattgtagctcttttagtatgaaaataaaactttttaacctacaaagcctctttattttatagagattaggaacttttctgatcttggctgagagaactttttgccagagctcaggcaaactgaaagggggtgggggtggnnnnnnnnnnnnnnnnnnnnnnnnnnnnnnnnnnnnnnnnnnnnnnnnnnnnnnnnnnnnnnnnnnnnnnnnnnnnnnnnnnnnnnnnnnnnnnnnnnnnnnnaaaatccttatcaagtggattattttcatgttacaaagtttggttgaaaatatgaaagtttttgtatacaaatatatggaggtataattttaatacccctttaataaaaaaaaaattgttttaaatcctatctttttaagtttgggtttaagacaggacggaaattgtatatcccaatttaaaagtatctttagagacctgtttctttggtcagttcatgtcatgtgttgtcgtctagaatggctttaactcctgaattatttgttttgagccaactttttgttataggtcttaccgatttttaacaatatccaaatacccttctaggctgatctcaaaaccttggctgggaatcagctcagcggcagaatactgacctagcaggcacagaaccaaaaccccgaagtgactgatacattgaacagtattttagatgaattctgcaccagtattatacaaatatgtacctatttgtctgtctctatacaccaactctctaaactggctcagctactttgtagtctctagaaatcatagtcttacatgtttagctttaagacccatcccgtgggctgctgaggtggctcagtgggtaaagacgcttgcttcacaagactggcaacctgtgtctgatcccccaaacccacataaatgttaaaggtgaggaccaacccccacaaactggtcctctgctgctgctcacacactgtggcctctgtacctatctgtacccatcatgtacatgcagacacgcacaaaaataataataaaatttatttatatttgggggctggagcgatggctcggaggttgagagcatacgttgttaccaggttctagtctcagcacccacatagtggctcccaaccacctgtaactccagttccaggggattcgatgctctcctctaaaccccacaggtaccaggcacacatgtggtacacacatatatgcatgcaagcaaaatattcatatgcataaaataaataaatctgaacctttttgaatcaatatttgatgactataggttggaaaggggcagaggaccaaaatgaggccagccctggatgtgctaagctaatcagttactagcttgctctttggaggtatggatatatgtaacatttaggagttggatatatgtaacattcagtaagtggatatgtgtaacatttggtaattggatatgtgtaacatttagtaattggatatatgtaacatttagtaattggatatatgtaacattcggtaagtggatatatgtaacattcggtaagtagatatatgtaacatttggtaagtggatatatgtaacattcacattcggtaagtggatatatgtaacatttggtaagtggatatatgtaacagtcgataagtggatatatgtaacatttgctaattcctaggtgtcatgcttcttactttaaatgcaaatattaaaattgcattcttcttaaaaagccccggaggtggtggtgcaggtctttaatctcagcactcaggatgctgactcacacagatctctgtgagtttgaagccagcctggtcttctgattgagttctaggacagccagagctgttacacagagaaatcctctgtgtgtgtgtgtgtgtgtgtgtgtgtgtgtgtgtgtgtgtgtgtgtgtgtgtatgtacgcacaaggagcaaaatccaaacccttgggctggagagatggctcagtggttaagagcactgactgttctttgaaggtcctgagttcaaatcccagcaaccacatagtggctcataaccacctgtaatgcgatctgatgccctcttctggggtgtctgaagtcagctacagtgtgctgtgtaatgaacattgtatataataatagataactcttttttaaaacaaaacaaaagcacttgtctgaaaaatggttctttcccctctgtgtctcctttccaggcccctgacattcatgggattgcagactaagaaggtcctactgacccccctcatacatccagctcgcccttttcgagtttcaaaccatgaccgaagtagccggcgtggggtgatggccagcagcctgcaggaacttatcagcaaggtactgtggtcaccacctcaggtaccctctgctagctcagagtccaggcctggggcagtaagccagtgataagacacaagcattaaaagagagtttatcagccaggtagtggtgacacttgcttctaatcccaggactcaggtggcagaggcaggtgggtctctgagtttgaggccagcctggtctaaagagcaagttgcagggcagccagggctaaagggctatatagagagcttgtctcaaaaaaggggggaggggaggaaagggagaaaagaggaagagagggagggaagaagaaagannnnnnnnnnnnnnnnnnnnaagaagaagaagcagaagaagaagaagaagaagaagaggaggaggaggaggaggaggaggaggaggaggagaagaagagaagaagaagaagaagaagaagaagaagaagaagaagaagaagaagaagaagaagagaagaagaagaagagaagaagaagaagaagaagaagaagaagaagaagaagaagaagaagaagaagaagaagaagaagaagaagaagaagaagaagaagaagaaagacagcatatcagtctatttataggttccagggtcttgagaggggacataacaagcaagtgaagaacaggtctaagtcctcaaagtggcactatatctctgcatcatggaagactggggttcagagatgaatgccttaaaagcatccatcaaatgaaaatgtaactgcccttctttgacaagggagactatgacctgggagatctgaccaggataggtggccctcaatctaaaacagtgttctcagccaccaaggaaggaaaaactcacagtctcagagaagcacaactcagagattcctacagaaatgggacatgggcttgcagcgcgcagcctctgaagcaagaggtcgaggtgtgctgcacgatgccgtgtgcttaaagcacaaggtgtgctaggctgtctgcttattcctccgcataacaggcagtcgtggaaactgtaaacacacgctagatcactcgtctcattccctagggagagagcactccattcaaaaccttagtctgttcttctgaatgaaggctgaattataaacaccagtcagtgggtctcctcaccagtacagcttgatcccagccagccaggacccctgaaaccttaacctaagcatcatcttgttcttgtgctcccttgcaaacctagactctggatgtcttagtcatcacaactggcctggttacgctggtgctggaggaggacggcaccgtggtggacacagaggagttctttcagaccttaagggacaacacgcatttcatgatcttggaaaagggacagaaatggacaccggtaagtatggccttgctatgcaaacaacaactgggtagacattctacctatgagcgtactgtctggtttagcactggagcaagccacaccctaattttataattaaatactttataaactcacttcccggctacaaccacaaccctcaaaaggattctcaagtgtttctagaaaattcgacgtctctgaattcagagtgtataatttcaaataaattgttttgaatcatgagctttagtcagagacctaccctaattaaaaagaagaaaggtttatcttgtctcacagtttgaggggatccagtctacaatcagttctgcctccttgctgaggcagcagattgttgcaggagcaagcggtgggacaaagccactcttattggagccagggagtgaagagaacaaagaggaaatgggagtcccatgatctctttttccatcttcaagatataggacgagcttccctacacgcctacaaaattgatgtttaaaacaacagagttgaaacatagtttgcaacctagaaacgtggccccacccctgggcacatgccctggaacacactaacacctatatagcagatgtgtatcaggaccatcagtgtcacctttgtgaatgctggtaaatattgtcacaggccagttgcagtgggatggagatgtgtcatacagccaccactgtatgtccatttaactgtatgtaggttgacatgcctctgtctatttactgaatagactgttcttcaaccttgaagacacatggagtacagctaaggcattgtctgcgtaaatcccataactgtgctgagagagagaaagcgcagcatgggctaggacatcaggcaagccaccatcaggcctcctcatcccaggattcatgaaagctcacaaggactcccagttcctctccttaacgtgtcaacagatgcctgtcaatcagaggatcttacctggggatagtttgcctataggagccatggaataatatctaaagacagtccaggatgacagattggggcagaaggacactgttgctgtcgactagtagggaaactgcaaggcacagcctttgcaacaaagcgtcacccactcccacatgacccagtgccaaggttgagaaactagaagccataggtacagatattcccagcattcgagattcaaaattgagaaattaaaaatatgtgttgattaataataacagtaaaggttagcttaaaccacatattctaataagaaaatatattttttaaaaaatttgtaaaatatttatttatttatttaatgtatgaatgctctatctgtatatatacctgtatgccagaagagggcaccagatcccagtatagatggttatgagtcaccatgtggttgttgggaattaaactaaggacctgtgaaagagcagatagcactcttaacagctgagccatccatccctccagccccagataatattttcttaaaataaataaaaataaacaaccactctccaaaagagagcaaggaactatactttttgtatttttgcaaatctctttaatgtctagaagacacttgagtcctcaaagctggagagatggctcagcaattccgagcatttgctgcccttacagaggacccgggttcaggttccagcacccacatggcagcccacaactatctgtatctccagttccagggatctgatgtctcttccgatctctgagtaagggcactgtatatactcacgtatgcacacacagatgcaccataacacacacacacatgcacacgcacgcgcacgcacacacgtgctatataagcaatcgtcagaagtatttctgtgttcaatctgctgtagtctattgtttgggtggaactatgagggaactctggctgcagatatgaagacagagaggaaaggagggtgcagatggtgtttgcacacagttgagggtactctgctcgacactgcacgagagtcaacaggccggctccaaagctcagctgcatggagaatctgagatgctcccagtggagttgatcactctgctccgctgggctctttggtctgtcttgcattttgaaaggatccttcatcaaagtgatcttgaaacatcatactttggtcatttggaaactattgtctttgaactgaagtgcagctcagtggtgaatgtacttcataagtacaaggccctgggttggatctccaagcccgaaagaaagacagcagaaaaagagaacaaaacaaaatattgattcactgagccacacattttccctaagctgtagaaaatcaggacctggggagcagagaaggacaattgtctttttgtatttattgtaaaaatagttttaacccagaagggattttttgtttgtttgtttgattgttttggttttttgagacagggtttcttggtgtagcctggtttctcttgtgtatgtatttggcaccctcagatggtattggatccccaagacctagagttacaaatggttgtgagcctccatgtgggtgctgggatttgaacttgtgtctcctgtatgagccatccctgcatcctctttaaatgcttttttttggtttttggtttttgtttttttcgagacagggtttctttgtgtagccctggctgtcctggaactcactctgtagaccaggctggcatcgaactcagaaattcgcctgcctctgcctcctgagtgctgggattaaaggcatgcaccgccactgcccagcaccatggcaactcttataaattggggctggcttacagttcagaggtttagttcattatcatcatggcaggaagcatggtggcacacaggcaggcatggtgctggagaaggagctgagagttctatatgtagatccacaggcaccaggaagagagagtgagacactgggcctggcttgagcatcttaaacctcgaagccagtccccaataacacactttctccaacaaggccacacctcctaatagtgccactccctgtgggtctgtgggggccttttcattcaagccaccacagaaaccatacctgtagaataggcaaattagaaaacatttaaagccgggcgtggtggcacacacctttaatccaggacagccagggctacacaaagaaaccctgtcttaaaaaaacaaaaaaacaacaacaacaaaaaaacaaacaaaacaaaacaaaaaacaaaaaaaaaaagaaaagaaaaaagagaaaaaaaaagaaaacatttaaaaagacagatcaatcttgggctctactaatttccttccttccctcctcctcctcctcctcctcctcctcctnnnnnnnnnnnnnnnnnnnncttcccggctgttctggaactcactttatagaccagtctgttctagaactgacagagatccaccggtgtctgcctcctggtgctgagattaaaggtattcaccaccactgccaagcttccaattctgggcttttttttttttttttttttttttttttgactgtttgtactgggaacaagctaaccatggcttgccacaggtcaagctggtgttcttccagagtggctcctccatgcctgtccttcctgcgtgagaaagatgtagtcacttgcatgacctccagagtgtccgcactcattctcagaacctttcctggccagagggccttggcggatgtgtgccctgagatgcaaagatcatcctgctattctggaggccactgtcaccacagggttctcatgggatggcggagcaggagggtacgagccaggatgatgctcaggggaagagaaaaaccacaggccaaggaaggtggggacattggtgaggacccctgttcccagcatcttcagagcataagcctgtgacttctaagctgaggctctgaaaaccaattgcagcagcgatagaaaactaacacagatggaaaaggtgtttgcggttggtttatacaaacgagggtttagaggtgagtttggaagtgacacatttaagttctgcacagtaatgggacctaagaaatatagcacagtgccaagtcctgccaagctgtagtaagtgtgaatatcgtgactgccacattcaagggctggctcaggcctcatgaatctgaaacactgggttgttctgagggttggattttgggggtagagggaggagggcggtgaggatggaaccaggctctcacagatacgtacttctcatgctctaccattaagccccatcaaagattctggagtcttctccgggcttaacctctcagccatctccccctcccccaccaagtgagggagaaatggcggcttcctgcacagtgcagattgccacattacctcaggaagggtatcccagaggcccgttctaaccggaacaaaaacttccaccaagaaacagccaccagatgtctcccttgctcagtctcagagccctaaaatcccaggggaagatgcttcctgccaccctggaagaggacagcatgtagctgagcccgtcctttctggcaggctatagaagtctgaatgcccagatgtaaagggagagtcacataaacgttgaaaagccagaaagcaacgtgagggtgtgaatcaggagcagggggaagcagtagacttaactccttcagttctgtagtcttgagttgtttgtttgttggagaaagggtctctcctgataaccccagctctaaagacgcttgttgtatagcacagactggcatcaaactcacagagatcgcctgcctctgccttacaagtgttgggaataaagatgtgcgccaccatgtcagactcagttttggatttttaagtgatgctgtgtctttcttgggttgtggatagttggagtagaagtggcaccggctcttgggcatggtacactgggtgacaaccgaaatcacttgtcatttatgacctgggaggtaggaagagggggacatggacagtggcttcagcaagaagggctggcatgcttttaggggaatttgtgctttaatttcaagtgtatgtgatcattttgttgtgcaatgcttgaagtttgcaagcactcccgacccccaaaatgcctgaggcacagggactcttgcatcatgtaagcttgaccgtggataaagtgaggccggtgtgtggtaggaaaaaaaaaaaaacaacaacttttaggaaagtagtcctttgagccaggatgggctccctgcctgctcctccaacccccaaccagaactggagattatacatgaacccagaaccttgcacatgctaggcaagttcgctactactgagccatatccctggacctagcatcttgagacttctttgttctctcggggtgttatcgagctgtctacaaacctgggaacgtatgtctctctcaacctgaaggatcacctggtgtccctgggacagagtgattcttttttttttttttttgtcttttcaagacagggtttctctgtatagccctggctgtcctggaactcactttgtagaccaggctggcctcgaactcagaaatccacctgcctttgcctcccgagtgctgggattaaaggcatgcaccaccacgcccggcccagagtgattctttaagtggctaatgtttctacccagtcatctttcctccttggcagaaggaggcctcccgagagaggcctctgttccaccgtttccctcagtctcagagttccagccttttcttcatcccgggcacttatgaagcgaaacaaagagtactttctgttcctcctcggcttttttgacagttgcaaaaagaggctgaccaagcaagtcctttttcatcctcaaggtctggcctaagggctctgtgcaaacaagcaaggaggttccctaagtcaggaacacctttaaacatcagacatggagtcctcaaaaccaaagcaatgtatcccgagtcactaaagtggaagttgttgggaagagatatgggagccttgtagtataacgcatcagcctcctggggacttgcctggaataactgcagctgacatctaggagctctgactttgccatcaccccagaattgtgtgctttttgagggactttgccagcatgggttccaagcctgtcccttgcttctctgttccagggtagtaagtatgtcccagtctgcaagcaaccaaagaaatcgggaatagccagagtcaccttcgacctatacaggctgaaccccaaggacttcctcggctgtctcaatgtcaaagccacgatgtacgagatgtactcggtgtcctacgacatccgatgcacaagcttcaaggccgtgttaaggtaacatgctccaggggtgtgtatcatggaaagacccaggtgtggcccaggtagctcctctagcttgtcttctgcctgaaagcccaacaacagggcctggatcctctgttgtcatcgggtgtgctctggtccatgcagtgtaacttcagtttaacttttagaccacagacttgtatccaaaagcacaaagctatatccccagttggtctttgtgcgttttgatataagactgtgaagtagctcagtgatagctaatttgcttggcagtgttagaggccctaggtcccacacccagcaacacgcacacccacactggcaccaagcctatatagcacgctcacaccaccacgccacgctcgcaccatgctcgcacgccgtggaatctggcccagatgttctgctgacgtgagaccaggaaaaggatacgaacgtgaggaaacactttttgtttgacctagtctgaaataagactagtttagcctcgggacttcagagattaggacaggacaaagtgtcctcttgttgaggaacaaactggaacactccaggtacctaccctccacacgcccaatcaggattataattcctgttctttggacaattttcctcagtttactggtcttgtcaccttgacctagggattgcaggagcaagcccctcacacccacctggctgctagctcttgtcaaagtggcttgagggtcgtgtccccagtaggtggccctagggagtactggcaacctaccagggagcgtttacacaccgagtgccctgaaagtggtattccatggatgcctgatgtgtctccatctccctctgttgcaggaatctgctgaggtttatgtcctatgctgcacagatgacgggacagttcctggtctatgcgggcacatacatgctccgagtactgggcgatacagaagagcagccatcccccaagcctagcaccaaaggctggttcatgtaaccagggcacagctacagaggcccagggaccctgctctctgttataggctgtgggatgccaggggaaggaatgggggcttgggggtggtacccagtgcagggctgagtagcaggattcctgcaaaggaaaggcggcagaggggcctttcaagcgctttaggaagggatcaacagtggagtgtgtgggaactgcgtggatacgaatcagtttctttggatccttacatactgtaataaaccagtcacatgagtcgtc

SEQ ID NO: 155 - DNA, 1113 bp, Mus musculus
catcaccaaatcctggggttttgggccctcggtaccgtttgcgcacgaaggggcgtggccccgggacccaggccagggagccagaactattcgctgctcgcaggagcgcagcctgtcgccaaggtcgggtcaagtcgtcgcggggcgtggctgatagggcagtgatttaagagacgcggctttgggacaggaggacccgcaccaatggagaccgccagggactacgcgggagccctcatcaggcccctgacattcatgggattgcagactaagaaggtcctactgacccccctcatacatccagctcgcccttttcgagtttcaaaccatgaccgaagtagccggcgtggggtgatggccagcagcctgcaggaacttatcagcaagactctggatgtcttagtcatcacaactggcctggttacgctggtgctggaggaggacggcaccgtggtggacacagaggagttctttcagaccttaagggacaacacgcatttcatgatcttggaaaagggacagaaatggacaccgggtagtaagtatgtcccagtctgcaagcaaccaaagaaatcgggaatagccagagtcaccttcgacctatacaggctgaaccccaaggacttcctcggctgtctcaatgtcaaagccacgatgtacgagatgtactcggtgtcctacgacatccgatgcacaagcttcaaggccgtgttaaggaatctgctgaggtttatgtcctatgctgcacagatgacgggacagttcctggtctatgcgggcacatacatgctccgagtactgggcgatacagaagagcagccatcccccaagcctagcaccaaaggctggttcatgtaaccagggcacagctacagaggcccagggaccctgctctctgttataggctgtgggatgccaggggaaggaatgggggcttgggggtggtacccagtgcagggctgagtagcaggattcctgcaaaggaaaggcggcagaggggcctttcaagcgctttaggaagggatcaacagtggagtgtgtgggaactgcgtggatacgaatcagtttctttggatccttacatactgtaataaaccagtcacatgagtcgtc

SEQ ID NO: 156 - protein, 213 aa, Mus musculus
MARDYAGALIRPLTFMGLQTKKVLLTPLIHPARPFRVSNHDRSSRRGVMASSLQELISKTLDVLVITTGLVTLVLEEDGTVVDTEEFFQTLRDNTHFMIKGQKWTPGSKYVPVCKQPKKSGIARVTFDLYRLNPKDFLGCLNVKATMYEMYSVSYDIRCTSFKAVLRNLLRFMSYAAQMTGQFLVYAGTYMLRVLGDTEEQPSPKPSTKGWFM

SEQ ID NO: 157 - DNA, 1113 bp, Mus musculus; identical to SEQ ID NO: 155

SEQ ID NO: 158 - protein, 213 aa, Mus musculus; identical to SEQ ID NO: 156

SEQ ID NO: 159 - DNA, 23500 bp, Homo sapiens
  misc_feature (1)...(23500): n = A,T,C or G
cgcgccatggaggccgcccgggactatgcaggagccctcatcaggcgagtgccccgcgtccccctgattgccgtgcgcttccaatcgccttgcgttcggtggcctcatattcccctgtgcgcctctagtaccgtaccccgctcccttcagccccctgctccccgcattctcttgcgctccgcgaccccgcgcacacacccatccgccccactggtgcccaagccgtccagccgcgcccgcgggcagagcccaatcccgtcccgcgcctcctcaccctcttgcagctgggcacaggtaccaggtgtggctcttgcgaggtgcgcgggcgtctgcaaaccaggtgacagctggcgagtggctgcatgcatctctggccgctgctgcagtcgcgggcgcagaagagggtccggtcccaggaaccccgagcaaagcttccgcgatgcgaggggaccgggcttctgggggtcctggaaatcacaacgggagctgggcgcgggaggggcccaggcttggcccctcctggaagcgcgggctctggtctccgaggggaggccccaaccgtccggcggagccctccaggttggtggtgctgggagaagcgctcctccttgcctccgggtccaagggcggagacgctgcctggggagcatgggggacaaggggcgggtggaccctgaggagtcttccctgcgcttcgcacccgctcgtggtcgaacaggcagcattggctattttcctgcttgggttaatattcatatcccaacagacccaagccaattcttggtaaaatcctaagtcattgcgtggcagcaactgtaaagtaaggtctaagagggagatcgtgtttctctgaagatcaagtacctggaaaaggatagagaaccatttgcgggcttgaaggtgcaggcgttcagcggcgccgggtcccactgtgtgtgctacgtgtggcgggcagagagactacatgtgtgaaagggagcggtccggctacgaaacgcaatctatgagcttccaatcccgggttcttaaatgggagctgttgtagacactgcaggttagaagcatctttctctttaaaaataagcccacagtacaagtcggggcggtggcagggggacgctgagaaacacctgcttcgtgtatggtcattaacacgcttaggcctaaaggtcagggccctgtatcttttgcgttcttccagaaccatccacaccacagtcccacttccaggaggggaggtcttagcagtttggaatgcgtccttccaaccacttttccagtgaattcacaacacacccactgttcctccggagcatgggggaaggaggtgtgggctgactcgcactaaccaatcctggttggcctctgagcaggattcaggctgagcctgtccctgcctctgactattataacagctcaccaaaatccaaaatgcatctgtgtggggtctctgtgaggtcgtgtgaagtggaagtgacttgcttatgagctgttgacaaatgaaacattgggaaaccttgagtctcctaggacacattccttccagcttggctcatcccaggagtgaatgactctacctgttatggacaagctgttgctgcagttctttgaaatctacctgcttccaggctgaactactgtcattctgtgaaatctacctgctcccaggctgaactactgtcattctgtgaaatctacctgctcccaggctggactactgtcattctgtgaaatctacctgttaccaaactaaactggaagaaaacaatctgtaattcttgttgaagggaaaacaccttttcttccctgcccctctctaaaaccctgtccgggcaaaagagccagaggccaggtcctaacacatttgctaattgtgctcttgctggacttctgcttcctctcagggttccttaatttaaaccaggtccaggatgtcataattctgtctttattagtaactacattttaccaaggaaagaaccgaatcaatgtgcacaaaaatttttaaaaatcaggtacttgtagtcagtggtgaaaccttaacccaggcatttgttagtcagctagaatcgttaggggccttggtcctgaggaaagcagcctgaggtctcacaacaaagctccagacatcaaggaggtccacatgcaggttgactatcacagacaaagtctgctctgttcctgtgttctgccagtgataacattcctgccaaacgctgaagttgttatgaagctggtacatgttataagcttcgtgtgaaatggctgctttcatagctatctagcacatttttcctttccttgaacaaggaactctaggttttgtgctgctatttcagtacaaatttcaccagtcttcttagtgacattagtaaggaattaagtatgctacaagtcaatctctcagctttctgcttcttgaatttaaattcttattttaacgaaactgcaaagtgttcaaagacttcatggtcatgtattgaacacttgataatgtcaagcctttaggtagcttgcgaagaactgagccatgaaccaggcagtccttgtcgggacgagtttatctggggggtaggtgtgctcccacctgcatatgtcacgtccaagagccctaggggagccgggcagcaggaagtctcgtcaaggcagcacttgcttccctgcttcctgccactgaccccaccatcctctgacactgtctctacagctcagggactcttctccaggcctgtggagcactttcccagccctcccttccttctctgcgtggctgtgcttgacctcacacttccctccttggcattccctgctgctcttggtgacagtgctcggttggcttctgtccaattcctgtgtactgcttcttcctcccacggtggctgcctctttttcttcctaatgatgagatgcagagttccctcagccatcactgccccctgaatattcccaggcactattttacacagcctgtactgctgccccctcacccatgacaccaaaatatttcactttgaggaagaccttaatactgggcccttttcctccataggtggcatgtaaagaaagctttttaattctctgtacggctcaggtttgttttactggagaagagttcaggtccactgtcagtctgtggcttgttggtgtatttcacacacttttggaagttggcggcgccctgcctccctcggggcagaatacaaaaccttcccttcccacctgttcctgagagacatgccgtttcacagcgttctatgaagtctgacttttcctctctggatttctgtgaaacagcctacttccttaaacaaactgtttccttatatcttccctgttagagggttatttccctttctgtttcctgtggttgtgtgcccccactttcacaggaattaggagcggcagttctcatgtgtggtgtgtctaaacgcaggatcctagggccgctcagtggccctgcttttaggcacggtgctgatggccagtgatagagatgactctactcagcgggctggaggtgacttgggtggagacggtggcttgttcatgtagcagcagattcggtacctgtagggtcctggagtacataggcctggcgtgcagaacatctcattcaacccctttctgtgttacatatgagacagccttgattttacataatttgacccagaaatcactcacctcctccttgacaagaaggtggggtgtaaatttcctttcctctgtgcccccaccagcctttcctccagcagtgacgcagctcttggtttggaaatgctacaggtgagaacaataggtgttttttcactgacgatggcaatcttgagggcaggtgaaggcagggagaaccagaaatggttgccagctcttatcttgtcagacaggtaaagaccgcaggaacctggaattaatcatctgggccaggtcaccggagcacaggtgcttacgaaggcgtgagcatgttcgtccaatgaggagatgcagggccagggctgcgcctttgaccactggggctggacctagcattggaagacatggaccatgttctctcatttctctgattttggcctagcatctttcactcagtaaatagatggcgtgctgacaggcgctgtgggaaagtaggagatgcaccgccagactccgtgagacagatgctagaggccttgtgcaagactgtggtgacttcctgccttgggggcgaagaggggctctttctcgctgctgaggccgggcccttctctcttgtgggagccgcgtcttctggccaggtgccgcaccgctgggtggaagccggagctggattcagaccctggtctagcctttgctgccctgacgattcgcctcctgctttccccaggcctaggtttcactgtaaggtggatcccaaggagtggtaaggcaaggcgctagctctcacacacgagggtttggcatccagcggcacttgggcctttctgtcaccctccttgaggggacttcagctagtttaaatttcagctgccatgatgaggtggaggcgacgccagggttctgaacgtgaaatgtaacacagcccgtcctcaccgccctctccccccgggtcaccaggagtgagagtgtgcccgaattccccgtggtgtcagcacagcagtgttgtttatggcattgtgtaactgagaaccctgcgtcactctcttaatcgaggtgacagttcagaagctgtgtgccagtcctggggccgcgttggtgcacagcccggccgggcgaggctctgattggctaggtgggtccctggcaaacgtgtgcgggtcattctgacaggtccggagccccaacccagcacatttccctcgggcttgcctcattgaaaacaaactgtgtagcaactttgtctacccagaagggaaaggcgttgagggcatgaactcgaagcgctgctgtgctttcagccatagagcagcttttccgcacagccctctagatagatgtttattgcttgagatttgaagttcagaggatggataacaaaacaacctgctcccacaaccaaaaaaagtcttggctttggacagacctgggatcaggttttatctttttcccttattgactggcccacttggagaagccactctgagcctcagttttctcatccgtgaagtggggcaatagtttccttgcaaggttgtgaggataatttgctaatattaattaatattgaattaatgggcatggtggtgcacacctgtaatcccagcacttagggaggccaaggtgggcagatcacgaggtcaggagttggagacaagcctgaacaacatggtgaaaaccttttctttactaaaaatacaaaaattagccaggcatggtagcgggcgcctgtaaccccagctactcagggaggctgaggcaggagaattgcttgaacccgagaagcagaggctgtagtgagcccagatggcatcactgcactccagcctgggcaacagagcgagactctgtctccaaaaacaaacaaacaaaaattgaactaacattaacaagagctgaaattgctaatacactgctggccatggtgcttagatgccagcagttatgaggccctgatgtcatcctggccaaggatactccagaccaaattcttgccaatgaccttggtctggttctagaacgacactttgttggtgaggcacctggagaaggcacaaacactcacgattatggaaagcctgaaactgggatcaagctggtagcgtgaactcaacaaggcgatttttgagagccagcttgttactctactctcaggtttttggtctgttttttgtttgtttgtttgtttgtttgttttagagacagtgtcactcttttgcccaggctggagtgcactgtggccccaatctagggctcgagcaatccccttgcctcagcctcccaagtagctaggactacaggcatgcaccaccacgcctgactaattttttttttcaatttattttttgtaaagatgagggtctcactatgttgcccagattggtctctaactcctgggctcaagtgaccctcctgcctcagccttccaaagtgctgggattacaggcatgagccattgcacccagccaactatcggttttttatattacaaacaatttggtaagtcattgaattttcacttggatccatttgcagagctttaagttagataatatactatctaaaatgtatgtgcctacaactaagctaggtattacaggaaatataacaacgaagtctttatccatacagaaaataaagcatggatacatggctgtgtgtcataaagtgccaaatcgcaggtgacaggcattggcaatccgtgcaggtgttccctagtattttagcattcagtgagttaatccagaaaaactgctctaagagtcaaaaagcagtgatgtgctcactttgtgtctttttcaaggttgtcctgaaactacaccctttgtttcattctcttgaatgtccgtgtacaagcatttgtccaaatagccactaatttgagcacctgtggtaggtgggtgctctccggggtgagggaagtgtccagtcctgctctgtgggggcatggggattcaatgaggtcacacagatgccactatcacggtgcctggctctaggtaagacctgaacccttgctgatttctgattgtgttatttgcaatcactttgttatgaatctatttctgaatgtaaaaaagtcggccaagagtgctggctcacgcctgaaatcctagcactttgggatgctgaggtgggtggatcacttgaggtcaggagtttgaaaccagcttggccatcatggtgaaactcagtctctactaaatatacaaaaaattagctggccatggtggtgcacgcctgcaatcccagctactcaggaggctgaggcaggagaattgcttgaacccaggaggcggaagaatcgcttgaaccattccagtctgggcaacagagcgagactccatctcaaaacaaacaaacaaacaaaagtctgcggtcctgggtgaaaactctacatgtggctctactggccccccttctagtgacagcagcagggtacctgtgtctcccctcttggagttatttttataaaatttcatgccttcatgctttttggtttaaaagcatgcaatcatgtgttgaaggcagtttcccttttcttttcttttttctttttctttcagttggagtctcactatgtcatccaggctggagtacagtggtgcaaccttggctcactgcagccttgaccttctaggttcatccgggctcaagcaatcctctcatctccacttcctgagtagatgagagtatagctgcaccaccacacccagctaatttttttttatttttatttttttgtaaagacagggtnnnnnnnnnnnnnnnnnnnnnnnnnnnnnnnnnnnnnnnncctcccaaagtactggaattacaggcatgagagccaccatgcccagcaggttttgcatttcttaaattgctatcaaaagcttcatctgggaggctgaagcaggagggaggactgcttgaacccaggagttcaagaccagcctgggcaaacaaaataaggccctgtctctacaaaaatacaaaactcagacaaacatggtggcttgcacctatagtcccagctactcaggaggctgaggcaggaggatcgcttgagcccaggaggtcaaggctgcagtaagttgagatcacactactgcaatccagcctgggcaacaaagcaagaccctgtatctaaaaggagaaaaaaaaagtaaatttttgaattaattctttgataaatgtggacttaatccaaagtgtcctgtgatgtaagccctgaaggtcttttctttcttgtgattccagccacagttctaagggtggttctgctgttcttggttcctcctaagttgatttcagaaacttcattgattgctatagtgaccaatattgcacttttgaattgatttctggcttacccttattgtggaaacatgtagctatgtgcacgtgtctgagtgcactgagtctctaactctgcgtaactacttcatggccactagaaatcattcttttggattttttaaatctcccacccatatttgcagaatataattcttatttcttgtttgagttgaattccctaaccattccttctcaaagagtttcagcaaggactttggatgttctagtaaaataggaataaagatggatgtgtgttttggcttgatgtgttacttgtttcttctttggaattatgtgtacacttgtatatataatttttagtaatcccaacaactgaatttctttcttttagatgcaaatattaaaaatgcattatttttatgtactttcacacttcttctgacagactctttttaaaaagttttacttttcacctccattttcaggcccctgacatttatgggatcacagactaagcgagtcctgttcaccccgctcatgcatccagctcgccctttccgggtctccaaccatgacaggagcagccggcgtggggtgatggcaagcagcctgcaggagctcatcagcaaggtgccccacatcccgcacctctcccccagtccacaggggtgccctgcactcacacagggccatggtcttgggctctaagccagggccagcacagaaaggtcaagaaaagcagcatctcactggggggaaacggggagagaaattgggaatgactgctggtggttatggagtttctttttctttttctgtttttgagacaggatcttgccatgtggcccaggctggcctcaaactcctgggcttaagtgatcctcccacctcaacctcccaagtgcatgccagtttctttcttgggtgatgaaagtgctgtaaaattgattgtggtgacggtgggccaactctgtgagcataccaaaaaccactgcaccgtatactttaaatgagtggatcatatgatatgtgaattatacatcagtaaagctgtttttaaaagaggaggaaaagaaagaaggagaaacagcaagttaaactcatcagaccctctcttggcctcagagactctgagagtaaaggttaggtataaatgatcaaggggaacattacatctctgtaccataaaacattgaggtacagagacaaaaaccttaaaacagtcactaatggagaatgttgctttgtttctttgacaagggaggatgcagggatggagccgactttggaagtctgggtttggttgtaaaggccaggatctagaacagtgtcctagaccaccaaataaggaagaatcccagcctctcagagaagcataactcagactcaggcacccatggaaacaagaaacaagcatccaacatgcagtctctgaagcaagagagacactcagctacgcacacgaggctgtggctcttacagcagcaaacatgcaagagctttctttttattcatctaaataaataggtaatcttagaaattacaaatattatttaatgtaatcattacctcatgtatcttaagaagacagatccattaaaaatcttaacttcccggccgcatgcaatggcatgtacttgtagccccagctactccggaggctgtggcaggaagattgcttgagcccaggagtctgaggctgtgatgcactatgattgtgtctgtgaatagccactgcactccagcctgggcagcatagtgggtccccatcttaaaaagaacattcttcacttccctgtttccaagcaaagactgagtcatagacacaagtcaaggttacctttaccattaaaattttatcagaatcagcccaacacttttgaaaactgtaacttaataaatgtcattggctggtcacatggaaatacctggcttcactccatttctctgatgtgttgcacacctagactctggatgccctcgtcatcgctaccggactggtcactctggtgctggaggaagatggcaccgtggtggacacagaagagttctttcagaccttgggagacaacacgcatttcatgatcttggaaaaaggacagaagtggatgccggtaagcaaaaacactgtcacccaaacagctactgggtagactttttacctacaaatttgcgtgccctacttgggtgttgacttgtccactttctttcttttttttttttctttttttgagacggagtctcgctctgtcacccaggctggagtgcagtggcgcgatctcggctcactgcaagctccgcctcccgggttcccgccattctcctgcctcagcctccggagtagctgggactacaggcacccgccaccacgcccggctaactttttgtatttttagtagagacggggtttcaccgtgttagccaggatggtctcgatctcctgacctcgcgatccgcccccctctgcctcccaaagtgctgggattacaggcgtgagccaccgcgcccggccaacttctccactttctaaatatgcactttgtattcacctaacaactggatccactgccctcaaagggattcttacaaatgtttctaggaaacttagtctctctgtgaactgaggctatttgatataaagcaaataattccagggaacaggctttggccagtgagtagctacagatcctgtaaatgcacggaattgacttggcaactcttcaccatctctgttcttagaaggctggagaagtaaacaccatcaaggaagttagggagaggggtgtgtgtgcatgtgtgaatatggagatttagaaaagtaaagagacagaatgaagccttcggtctctgggaaaactatagatgatatagctcaaaaaaccttctcagtataaaatgcctaaaaatgtaaagcacaatatcaaaatatcttttcacataataaactgatctccaagaaagagaaatcctcagtggttaaaatgttgaggccagcatccagagaggaacacgaacactgaagctggcagttccccaggcatctcctctggggttcccccacctgtgagcacccacagacctcagggacagatgctgggaggacaggagacagcctccagctgacacaaagttaaggggtgagatgtgagggtctgcgtaaagcagggaatcttagagctctctcctggcaatttgggccacaagctgccctcatgagggtttaggcattgctgagtcccaaacccctaagctgagagttcggttttcagcagtatctgggggagtagcatcaatggaggggtttgctcattggattctctttactccagccccgtttccaggattgatagtgccccaggtaactagcaggagctcaggcagttccgcttgggatgaacatccatcctggcctcaaagagttttcattcgtaacgttctcacaatgcaagttcacaatcaaaacacagaacgtaaggactcaggcaccacattcatgagagtaagcagaagcaatcaagtcaggcctgccaggaccgcagatgttggaatcatcagacacacagtataaaattagtgtactaaaaatgctcacccatggctaagtttgactgactaaataaataaattaattaaatgctcaaagaaacattaaaaataatctaaaataagaatagctaggaattgaagaccagcctaggcaacagcaaaaccccaatctccaccaaaaaaaaattttttaaggcttagctgggcaagatgctacacacctgaagtcctagctactcaggaggctgaggcaggaggatcacttgagcccaggacttggatgctgcaatgaactatgatcacacctctgcactccagcctgagtgacagagcaagaccctatatcaaaaaaaacaaaaaataagaaaataccagcctgagcaacatggcaaaaccccatctctaccaaaaaatacaaaaattagcctggcgtagtggtgcatacctctagtcccagctacttgagaggctgaggcgggagaaccacttgctcctgggaggtcaaggctgcagagagtcatgattgcaccattgcactccagccccagggacagagggaaaccctgtctcaaaaaataaaaatacattaaaaaggaacaagagctaataagaactgactatacagatttgaaataatcaaatagaatttttggaaatgaaaaatataacaactaaaatcaagtaaatggagactcaggttagacagagctgaaggtaatgataaaagatctgaaagatgttgcctgtgatgtaacacaaagcagtagaggtggggaacacgaaggatgttagagaccagactgaaatctaatctctctctctttggcatcctcacgtagggaaggatttttttaaaacaagatacaatgcacaagtcatttttttttttttttttgagacagagtctcactctgttgcccaggcttgagtgcagtggtgtgatctcggctcactgcaacttctgcctcccgagttcaggtgattcttctgcctcagcctcccgagtagctgggactacaggcatgtgccaccacgcctggctaatttttgtattttcagtagagatggggtttcaccatattggacaggctggtctcgaactcctgaccttgtgatccacctgcctcggcctcccaaagtgctgggattacaggtgtgagccaccgcacccggccgatttttttatttttaagatatagggcaacacactcctctactaccaccaacagctacttaatgcagcaatttgcttcatctcagagagtgaggcacaaactatgacccagcagctgctttcctgggcatgaacctgagattccaacaacaccacgtcagcaggtgtgtgttagagcgtccatggcagcaatgccctaagtggtgagaacaaacactggaaacaaatcatgtacccttgcagcacacacgtgtgcccagcacatagaagtacttctaagtaaatacacacgaagaaactgtaatgtggtccctgaacagaatgctcttcagctgtgaaaatgtgtgaagttcagctacaggcatccatgtggatacacatcagctatgctgagcaaaagatcacaggataatacagtaaacaacgcatcctcaaactttatctcaggacctctttactctcctaaaaattaacgaggaccccaaacagcctttggcatgatctcggctcactgcaacctctgcctccctggctcaagtgtttcttgtgcctcagcctcccaagtagctgggatcacaggcaagccaccaccacgcctggctaatttttgtatttttagtagagacagggtttcaccatgttttccaggctggtcttgaacttctgacctcaagtgatccaccggccttggcctcccaaagtgctgggattacaggcatgagccaccacacccggcttgtatcaataaattctatagacatgtgccaatcagaggttctgagctgcagagattttgtcccttgggggacatttgttaatgtctgaagacatgttaggctgttgcatctagtgtgtagagaccagagatgctgccaaacatcctgcaatgcacaggacaaccccgacagcaaagacttatccagcctccaatgtcgttagtgtcaaggtcgagaaactataagctatagatagatatagatattcccaatagtcaaaattgttttttgtttgtttgcttgttttttgagatggagtctcgctctgtcgcccaggctggagtgcagtggcgcgatctcggctcactgcaacctatgcctcctggcttcaagggatcctcctgcctcagcctcctgagtagctgggattacaagtgcctgccaccatgcccggccttttttttttttttttttttttttcatttttagtagagacggggttttgtcatattggccaggctggtctcgaactcctgacctcaggtgatccacccaccttggcctcccaaagtgctaggattacaggcatgagccaccgcccccagtggtttttttttttttttaatttgtttgctttttgtttggagacagtcttgctctgtcgcccactctggagtgcagtggcacgatctcagctcactgctacctcgacctcctgggctcccccacctcagcctcccaagtagctgggactacaggcatgtgccaccatgcctggctgatttttgtatcttcttgtagagacagggttttgccatgctggccaggctggcttcaaactcctggtttcaagctcctgagctccagcgatccactacctctgcctcccacagtgctgggattacaggcgtgagccaccccgcccagccaatattcaaattcaaattgtttggaagttactgattagcatatttttgaaagaaattaaaattcagaaatttaaaaataggtattaattcattaaaagtaataacccaatacagattaacttaactcacttttttttttttttagatggagtctcgctctgtcgcccaggctggagtgcagtggcgtgatctcggctcactgcaacctccacctcctgggttcaagcgattctcctgcctcagcctcccaagtagctgggattacaggtgcctgtcaccacgcccagctaatttttgtatttttagtggggtttcactatgttggccaggctggtcttaaacttctgaccttgtgatctgcctgcctcagcttcccaaagtgctggagttgcaggcacgagccaccacgaccagccaccaggttaatttaactcatatttttatgaaaagtgactattttccaaaacaaaaagatggaggaacggcattttttacatttttgtaaatttctttaatgtctggcttaatagaagattcttatatctgcttctttatattcagtctgttgtaacatattgttttgatggaagtatgaagaaaatccatcctgacacagatatgcagctgggaaaggaggaggattttaatagcctattcagataactgaggatattcttttttttatattatgccagaactcaccaagtcatggtttcagaatagtgagttgaggtgttttcagaaaggtcagatgcagcgtgtaatctgaaggtataccagtgaagttggcctcctctgttacagtgaatccatcagtctgtcttccattttgaatggacctttttcctggggatgattttgtaacagcaggcgttggtcattgagaaaaactgattcactgagttatgcaggttttccaaatgtgctgtggaaacagcacttcttgtgagaacaaagaaggcaaactgcatcttactgtttattatggcctttctttctctttttcttttttttcgaggcagggtttgctctgtcacccgggctggagtgcagtggcgttatcttggttcactgcagccttcacctcctgggctcaagggatcctgccacctcctcctcccaagtaattgggactaccggtgcatgtcaccacacccagctaaatgcttgtatttttttagagatgggatttctccatgttgcccaggctaatcttgaactcctgggctcaagtgatccacctgcctcagcctcccaaaatgttgggattacgggcataagccaccgtgcttggcctagttttgacctctcagtcccttaatagggcctcaggattcctggatgtctccagattacactttgataaactccacatcaaatcatttacagataattcaaaaatatgcaaaattaacaatataatgtttgagatacacatgtgctaaaaatagagaaaagtaaggggaaaacgcatggcataaaaacctcttgagaggaggggagatgtgggaggtggatggggtctctaagggatggcagtgtgtaggtttcattttacgtctttctgtcccttacttctacatatattatacatatacatatatattatatatataacctcacaattttcctgactgggaaagaaaccacagaccaattataaaagcataatatttagaataaaatgtaatctttaatgtagatgagggctgggcgcagtggctcacacctgtaatcccagcacttttgggannnnnnnnnnnnnnnnnnnnnnnnnnnnnnnnnnnnnnnnnnnnnnnnnnnnnnnnnnnnnnnnnnnnnnnnnnnnnnnnnnnnnnnnnnnnnnnnnnnnnnnnnnnnnnnnnnnnnnnnnnnnnnnnnnnnnnnnnnnnnnnnnnnnnnnnnnnnnnnaaaaaaaaaaaaaaaaaaaaggcaggtggggagatgtctgtagatgagactattaattgtggggtgaattagacaaatcatttaaagcaaatattggtgctgcatggctttttgcttgaggaaagtgtaacagcaaaaataatgcccccacagaccacagacacctctgtttgttttcttttctttttctttttcttttctttttttttttttttttttttgagacagttttgcttttgtcgcccaggagggagtgcaatggcgtgatctgggctcactgcaacctccacctccagggttcaagtaattctcctgcctcagcctcccgagtagctgggattacaggcgcccaccaccacgcccggctaatttttgtattattagtagagacggggtttcgccatgttggccaggctggtctcaaactcctgacctcaggcgatccacccacctcggcctcccaccgtgctaggattacaggcgtgagcccaggcggccggacagacgcccctgtcttaatcctcagccgtggcagatgggattaagtgaaggttactggggcggggttggggtggggtttgtcctggatcatctgggtagaggccgaagtcttcacaagggtccttatgagagggaggcaggtgagcatgaaggccagaggcagaggaggaggagagatgtggggtacccaccaaggcaggcgcccaagaagccgggaaaagcgaggggccgggcctgccccgcagcccccacggcggccctgcgccctggctttgactctgacctcggcagtgggacagcattggtgtgtgggtttcatgccactgaggttctggtcgtttgttacagcagcagtaggagatgggaaaggcgggtttgtttttctaaaggagacactcagctaacagggaggagttggtggtgggcgctgggaacctggttgcagggcagggtggtgggggcggtcgatgccacgggtgtagatgccaccgccggccacgcgctccagggggctcgcggcccccgtttcggctgcgcaaccacctccctggatcccagccacctgtaggcctttctgggcaaaaccagtttagactgagaccagaacgctggagcaggaagccgccagcaggtgtctcgctccccggtcccagcgccctcaggaagagcgcggccccgcagcccccgcccggcgaggccccagcggatccgcggcgggagggcgtcataattttaaccaagactggagacatttagggagagtaaaattaaaactttcaaaagtcagaaagggatgtgaggctcggaaaaagaggcgcgggacgggaggagaagccctctctgatgccaggatctgagctttccaaacacgtttcccggctgagggctcgctggcgcccccaagaggccgctgagagaaaacggcctcagcctcagctttgagtgtgtgtgtgggggggggggggggggttggggggggttgttgttgttgttgttgtttggttgggtttttttgtttgttcgtttgttttgagatggagcctcactctgtcgcccaggctggagtgcagtggcgcgatctcggctcactgcaacctctacctcccaggttcaagtgcttctcctgcctcagccttctgagtagctgggattacaggcgtgcaccaccatgcctggctaatttttgtatttttagtagagacagggtttcgccatgttggccaggctgatctcaaactcctgacctcaggtcatctgctcgtctcggcctcccaaaatgctgggattacaggtgtgcaccaccatgcccggctaatttttgtatttttagtagagacggggtttcgccatgttgaccagtctagtctcaaactcctgacctcaggtcacctgctcctcttggcctcccaaagtgctgggattacaggtgtgagccactgtgcccggcctcagctttgatttttaaagtaataagagggagctacaaccgcttagaaaaggatgatgaagtcaacctcacccgagattccacctcacaaaattttattttctttttccttctttttttttttgacaaggtcttgctctgtcatccagtctggagggcagtagcacaatcatagctcactgcagcctcaacctcctgccctgttcaaggggtgctcctgccccagcctccaaaagtgctgagactacaggcatgagccactgtgcctggccacaaaaagtttcctgaaagacaaattcaagtcaaagacaaatgcctgatatttgtaccttggggcagctttgctctcttatatttttaaagtgtcacaggagggagagcttttagttgacagattcctaatccatacataccccagatctattcaaacaaattctgtatgatccgaattagaggctacaactggaaccacaggtgggtttgtctgtatggtgggacaggggaataaagaaggctggccacggcgaggagggtttgggtaattttaggggtatttacattttaagttcccattcatgaggtcactgtcattggtgaatttaccattcacagcttcagcggctcccaacctcgaaggctcacaagacctagtaaccctgtgtagacccgaatcctgagtgctgcaagatctgtatgtggcacaagccactcagaaagaacagctcctggcctgtcatttgtactgggggcagctttgctctcatatttttaaaccattttgtggggaaaattctgttccggtgctgtttataaacctgggatgtgtagaggtcactgacttcctcctcccacccaggggggtctcctcccacccaggggttctgctgcatggctttgggcttccccatggagtccgctctcaaccctggggggttattaaaacacagaggtgctctgggaaggtgcccactctgccctcacttcagccatatgattctggtactttccacccagtagcccccataaaattgaaccaatgctgcctgcttctccattaccataactgtgttatagtgatgagatgagattcttttgtcaccaggtaaccatggtggcctccagggcgagtgggtccccaccactcatcagggcacatctatccactgagcaacggggtcctaaaatccaggccctgacgccacaccagactcaccctgagtccggaactgaaggcagatcagggacagatgcctcgtggctaattggacacagtcgtagtgtgtgcaaatgggtcctgctgaaagcatctctctatcgattagccacggagccactcacagaccttaaacagacacataggagaatctgaagctggcataagagcagagtgatgacgtgggagggttaggaaggctcctgaagcctgcccctccccccattgtcacagggcagccagnnnnnnnnnnnnnnnnnnnnnnnnnnnnnnnnnnnnnnnnnnnnnnnnnnnnnnnnnnnnnnnnnnnnnnnnnnnnnnnnnnnnnnnnnnnnnnnnnnnnnnnnnnnnnnnnnnnnnnnnnnnnnnnnnnnnnnnnnnnnnnnnnnnnnnnnnnnnnnnnnnnnnnnnnnnnnnnnnnnnnnnnnnnnnnnnnnnnnnnnnnnnnnnnnnnnnnnnnnnnnnnnnnnnnnnnnnnnnnnnnnnnnnnnnnnnnnnnnnnnnnnnnnnnnnnnnnnnnnnnnnnnnnnnnnnnnnnnnnnnnnnnnnnnnnnnnnnnnnnnnnnnnnnnnnnnnnnnnnnnnnnnnnnnnnnnnnnnnnnnnnnnnnnnnnnnnnnnnnnnnnnnnnnnnnnnnnnnnnnnnnnnnnnnnnnnnnnnnnnnnnnnnnnnnnnnnnnnnnnnnnnnnnnnnnnnnnnnnnnnnnnnnnnnnnnnnnnnnnnnnnnnnnnnnnnnnnnnnnnnnnnnnnnnnnnnnnnnnnnnnnnnnnnnnnnnnnnnnnnnnnnnnnnnnnnnnnnnnnnnnnnnnnnnnnnnnnnnnnnnnnnnnnnnnnnnnnnnnnnnnnnnnnnnnnnnnnnnnnnnnnnnnnnnnnnnnnnnnnnnnnnnnnnnnnnnnnnnnnnnnnnnnnnnnnnnnnnnnnnnnnnnnnnnnnnnnnnnnnnnnnnnnnnnnnnnnnnnnnnnnnnnnnnnnnnnnnnnnnnnnnnnnnnnnnnnnnnnnnnnnnnnnnnnnnnnnnnnnnnnnnnnnnnnnnnnnnnnnnnnnnnnnnnnctaaataataaatataaagaggaaccccattcattttaagaactagagcacttaattctaggtgatgatgactaaaaccagagccatggaggtcgtggccgggtttgtacagagcggtcacctagaccctggtgaatcacacgcctttgcatgtatctcctgtactcctgataacttcagcctcaccagtaatgtggcatgggcgtgtgtcctctccacataatgccagggcaccgtcatcccaaagacgaaggccaggctggttgcacagcatcccaggaaacagaacttttagaagacagactcctgatccagccatacaccagacccattcaaacaaattccatgtgatcaaaaggagccttcctgggtgttcctgccccataactgggtgccacccctgccattgagcctgggactgagagagacaccagcagtccctgctctaaggaatcagctgtgtgacctttcacagactccttaacttctctgagccttgcttttatcatctttaaatgagaaggttggtcaggcgtggtggctcacacctataatcccagcactttgggaggccgaggtcagcagatcacttgaggccaagagttcgagaccagcctagccaacatggcgaaactctgtctctactaaatatacaaaaattagctgggcgtggtggcggatgcctgtaatcccagccactcaggaggctgaggcaggagaattgtttaaccccaggaggcggaggttgcagtgagctgagatccgccactgtgagccataaccacaccactgcactccagactgggtgacagagcaagactgtgtctcaaaaataaataaataaacaaacaaaaaataaataaaatgaaaaggttgcttccaagctctttatgattgccagggctctaactacacctacttctactccagtaaatttaccgttgatccttaaagaactaacctctgtggagggagtggatgggagagtggctgattgcagtagaaaggtcttcaagtcgaaaagttttgcagctgctgccattccagtgccccctgcacgtccctgtgggcagggccgcccgtttctctttgagggtgttgtttccgtcccccgtggccttgacaactgctctgatttgtgctgagcacagcaaaggggaaatgccctcctctcagaggtctcctggcctcacctgaggtgggccagggtgtgtggcttctctgtggcctcagtttcccattcagagccatcagtggctgactctaaactacagtcactgtcatagtgttggagtcttgactcccaggagagcttccttttttttgtcttttcctttttgccgggataggagaaaatagctttacacttggattttaaaagttaggcaagagagttacaacaactgaaaaaggtaagatgaagaaagctaacctcacccaaaattccacctcagtgaaatcttttttctttttcttttctttttttttttttttttttgagacggaatctcactctgctgcccaggctggagggcaggggcacgatctcagctcactgcaacctcctcctttcaagttcaagccattcccgtggctcagcctcccaagtagctgagattacaggcatgcaccaccacacccagctaacttttgtatttttaatagagacggggtttcaccatgttggccaggctggtctcaatctactggcctcaggtgatccacccacctcggtctccaaaagtgctgggattacaggcatgaaccacattccaggccctttttctttttttttaagaaagagggtctcacactgtcccccaggctggagtgcagtagcacaatcatagttcactgcagcttccaactcttggactcaagcgatcctcccacctcagcctctgaaagtgctgggattataggcatgagccaccacacctggccacaaagtctttcttgaaagacaagttcagccttcttgttactaatttgtattctctgataaatccgatgacaccacaagcagccatggaactcacgacagcccccacactggaggcaccgcctgctagggaccctgttgtgggtgctgggggcagtgggccctcctgatgagacagctgcccaggcttggctatcgcatccccatgggctcagtcactgctgaatgtcctgctactaccttaggaagggaagggatttcagtagcagggcccctagaacagcccagcagccgaagcccaggacacagcacacctgtgcgggtgcggccatctgctccacacagagcttgccagccactcaacaagcaggccgcacttcaggtggctcatgggagccgtgcttcttgcggtggtcttgggccagcagcaagggggtcctcagggagctcacagagacctgctcctggccagacccactgccacggcagctgcatctgtgccagccctgggacacgtgcactctgagagtcagacagccatgctctaaatgtcagcctggcctcctccgagtgccttttggtggggggagtgaagtattcccatcctgtctgtttctcactggcccaaaatcccaagctaaagcctccccatctgcctctgccacaggagtctgctgcggttcctgtcctactccgcccaggtgacgggacagtttctcatctatctgggcacatacatgctccgggtgctggatgacaaggaagagcggccatccctccggtcacaagccaagggcaggttcacgtgtggatagggatgcaggctgtcgccggctcttgagccaaacactgtgtttcgtttggctcaatgacgaatgttgaagatgcttttatgttctgagccacatgcacttggaggccgctggtcacgctgctcaggagtggtgcccagaaaaggaaagggcttggtggtacatgaagtgggggcagtgggcagggtgccctgggggggaggcatagagggccctgggggtcatgggaagcgagcacgcagcaggcgtgcccaggagcgtgtgcatgtgtcagagccatttggtccatcatctcctgcaataaacccatcgcaagaatgaccttc

SEQ ID NO: 160 - DNA, 814 bp, Homo sapiens
cgcgccatggaggccgcccgggactatgcaggagccctccattttcaggcccctgacatttatgggatcacagactaagcgagtcctgttcaccccgctcatgcatccagctcgccctttccgggtctccaaccatgacaggagcagccggcgtggggtgatggcaagcagcctgcaggagctcatcagcaagactctggatgccctcgtcatcgctaccggactggtcactctggtgctggaggaagatggcaccgtggtggacacagaagagttctttcagaccttgggagacaacacgcatttcatgatcttggaaaaaggacagaagtggatgccggaggagtctgctgcggttcctgtcctactccgcccaggtgacgggacagtttctcatctatctgggcacatacatgctccgggtgctggatgacaaggaagagcggccatccctccggtcacaagccaagggcaggttcacgtgtggatagggatgcaggctgtcgccggctcttgagccaaacactgtgtttcgtttggctcaatgacgaatgttgaagatgcttttatgttctgagccacatgcacttggaggccgctggtcacgctgctcaggagtggtgcccagaaaaggaaagggcttggtggtacatgaagtgggggcagtgggcagggtgccctgggggggaggcatagagggccctgggggtcatgggaagcgagcacgcagcaggcgtgcccaggagcgtgtgcatgtgtcagagccatttggtccatcatctcctgcaataaacccatcgcaagaatgaccttc

SEQ ID NO: 161 - protein, 133 aa, Homo sapiens
MQEPSIFRPLTFMGSQTKRVLFTPLMHPARPFRVSNHDRSSRRGVMASSLQELISKTLDALVIATGLVTLVLEEDGTVVDTEEFFQTLGDNTHFMIKGQKWMPEESAAVPVLLRPGDGTVSHLSGHIHAPGAG

SEQ ID NO: 162 - DNA, 222982 bp, Mus musculus
  misc_feature (1)...(222982): n = A,T,C or G
atgtagaagacagaagtagctcagggtcctggggaactggaggccatccaagcccgtccagggtaagtatatctaatctttctccctgcaagcagacacggcatatatgtaaattgactaagcatctaacatgcatcacgtatgcacacacaagggtgtatgctcaagtgcacatatgcatatgcgcacacacacaaatgcatgcaccatgcatgcacatcgcgcaaacctgcacagatctctatgtgtcatgagtttaatgacagccagctttctgggttctttgcgtttatcagttaccatgcctgagtttatacctgttgctttggtgctaacccgaagagaaaccttttctcaaaccgcatacatgcctttacctttgccagcctgtggtcgagtctggcgggaagtcatttgttgcctttagaccaagtttatctagataaatcctaatatgcccagcacaggtgggcgtgagtagactcctgcgtaacactgaggttctagcattagtacaatgtgcacagtaagtgtgcagtgtttttcctttatgtccatgttactgctctaccagtcggccatcgaatatgacatctttaatgcagttctttgaagattctctacgcccagagcaggtttcataatacacatgcaatgtccccggtcagaaggagacctagcatgtttcaatgaacatccctcttcctgctcctctggctggcacagccagctgggaggggacatcttactgtaagtgtccccatccctctgctccgggggaagtctctgctttgtcactagaggctgaggtggcccaccaagctgccaagaggctattttagccagtcctacttaacactctgcacctgtccttggccccaggagccccacgctggttggtcttcagggtgtagcgggatctctaagccgacgaggaactcttttgagccccggagcagctgtcaagcttgacattctaatgcattctttggatgggcccaggaaatctttcctcctcctcaagttacagcctgcacttgcacaaataaatccaatcccttgacagcaagcggggatggcagaatgtccctgcattgtcctgctttcccaggctaccttagtctcttttccttacggacagttatacgcgctttggatgtccctgtaaatactgaactaaattctcgtagtaacttctcactgttaatttcctaccattagcttacttttaaattttgaaatgtcttacagcgtgtatctagtctaatatataactttcagttgaattttggcaagcaaagccagtttagaatcttttcaacttttaagcgtactttccagaaactgtgattattttttttttaattgagataaaaggcccagtgggatggctcaatgggtaaaggcactcgcttactgctatgtttgacaacttgatccctgggacctacagggtagagcgagaactgactccaagtcctcctttgatttgcataggctgcagcacacgtgcccacccacaacacacataaaaacaatatgtatagttaaggaaaaagaaatacattgttggaacctggaaagtaggtcactcggcaaagagtttacatacaaccataaggctttggtttatttttgtttttgttccccacttccccccttccccatagtgtgttattaagaaaaacataatccaggcatggtattgtgtacttagaatcccagcactaggggagcactggccagtcagcctatcctaatctctacatttgatacctgagtttgacttctggccaccacaaaacatgtaccattcactacaaacacgtaccacccacgcaagcaaataccatccccccccccacatgagtatacacacacacacacacacacacacacacgtgcgcgcaaatatatcagtacatatgaaactcatgctagtgaatgatttgaatcactatattataattcccatctccccaacccagggagtttcacagatggatgtttgtagcccggcttaaggggcccttgctgtggctcttctcaacatcagtggtggttccatcctctccactgttgatggatgacccattttaagtttgtagtccactatctcagctgaggacatttcataaataataacgagcagtatacaacgcctgggtgggtcttgaatggatgacatctagttacgaattaatgacctagcagggtgggattgcagtagcatccgggttaatttttttatacatgaaggaaggcaagccagaagagtgtttgtcgtgaaggccaaagtccttccgtagtgaggtgatctgactccatgttgttctcacagcctccatctgtgtggcaagactctgccgtttggctaacataccaacccaatgcctctgggtctatttggcttagactttatggacagttcaagcagctgagcagacactcccccctaccctgcctcccaactccctttttctcaacacttcatgctctttaggaggctgatatttgaatcaaataacagattggttttttaactcttcctttcacggtattgaatttctccattgaacttaagtgatcggaaagcttacaagcaaaatattaattttaaattctgggggcgaggagaacaatattatagtgaggcatttcttcaagaaactgtcccccttaaacttacttttgtggggcatattttgtttacctgcacaaatgctgatttatgctggaaccttcaactctgtgcatccttgttgtgtgagagcgtcactcccacgtcactgcccgtacgtaggagtcagagagcagcaccgcaggcttatttctttgtcccacttttccgtggatcctgcaggttgagcaagggtcttctggtgagcccagcaagaagcacctttcccctctgcgccatctcacaggccctgccttgaagctttgatgctcattcctagttcaagtctgatagttttcacacgtgtatgtgtgaattaccaatataatgagccattcattttgcagctgcaacaggagctgaaatcaaacattgaaactgtaatattgccagctaaatgttgcttaaacaactcaaccttgcctttacaagggtcaatcactgcaggctatgaatccgctctgcctgcttttttgccataggttctgagaaagaagaacttttgggtatatgccgtttacttcacaggtgacgttttcggtgtagtatttcatttaatcacatcaaaaattccatgcaatatctttgtatcaatatttcacagctatcattacgggaaacatttgaattctgtggattaaggagttctttctaacttactattcttaggaaggttcacgttcttacagtgagattgcatggggtatctgataaccaaccagtttctttcggtgggagatgttttagtattgaggtgtgtttatgtgtgtactttgaaatgtgacttactctgtcgttttacttacagaactatggagatgggactccctatgaccacatgactagcagggatcttgggtcacacgacaatctctctccaccttttgtcaattccagaatacaaagtaagaaaagttttatatcaacatatacttttggaaagcttatgttttgccaatggaagataattgtgcctcagataaacattcagcctttaagagtagagatagtcagtttactatagtgctcccaaaggatggaaatgccattcataaatgaataatagcaagatgcgtgtgaatatcgtcagttttacaaatgtggaatttcggtgatacaatatctttgtgcacttttgtctttcttagacataaagtgtcctttaacagtaagtactttcctcaggacacagtaaagaatattgtgacaaaatatttggctttcagagtaacaagacctatagtcagagtagctgcttcaaggtgagttggacaatcctgttgtgttttttgccaggttgtggatttaatgttgcctgctagctagctagacctaattctatttactttacaaaagctgtatagtggcttgcagttggagtctgtctgcagatttcttccgtgccctatacactggcttcactagcatagtcccctgcctttggctactcagtgggggtgttggtttgacagcagtaaccctagcaatgaaaggatgatccacaacggcttaaaaggtcccagcggccagatccttcattttgattggagacaatgatctttgttctagtaaatgtgagttcttcacaatattaggaagtctttcagactggccatgtgctattgtcaatttatcgataaatgaagttcaatttcatggacacaagctgttggaccatccttgaaggaaaattcggagcaataatgatatccttttgagactttaattgtaaatgcttttcaagagtgtcctggttttaagccttggaagctctgccagttacttaaggtgttgatggtcctttaatcacagttttttttaattgccatccaatcaggcatttaacacaaagttgttttgaatggataacatctagcttatgcctttgagtgtcttctcagagaaccacagaatgctgtttgatcttggtgcttgttattggtagcttctttttgacttcaaagttggtaaagttgacgctgacttcctaatttgtaactaaaggaggggtccctagctctttttaattattggtgaaaaataagtccagcctcagcaaattcaagatgtgtggaaatctgtgatgggtggggggatttggtaatttggattttataggacaagtttcaagtctttggccatgagtttaggatttctgtttttgcctctctgtttattttttcccctgactacatatgatagtgtcaaagataaagttaagaaggtggtctgagacgtaatgtgaaaagaatatactaacttcatttagaagagtccaaaattattctttgatgagctaaaatgttacctaaaatacacaagctactcctgtttagaagtttggtgtgtatgtgaacaggtttaaagaacagtctgatgggttcatgttttagaacataacaagtcgtgcaacttattcaaataatggctattctccacatttcttcgtggacagaaacttccccaaactagtttttttgtttttgtttttgtttttcttttttttaatccaaactatttaaatataagtgggctgacaccatagacacggttcttttttgcctggtcgttgtttaagtttaaaacccatgtcagcgtctctctttcatctgcctgccttccttcccattagactcttagtcatggaggccagaacagagtcctgcattgtgctggaacctctgctgtgcgggcgaggctcctgcccactgtccccagtgcaaaggcttctctgttagataagctgtctggtctgaaacatggcccttcattgtttacaaactgcgacattttccacctccagcagatttctgcacagaaatgaattgtgcttgggctaaatggtttatctgacattaacggagcagtgtcagactcgggttaggaaagtcaccctaagagcaagaggtcattgtgcagtgtgcaaaaggacacaaagagagagaaaggcatggaagcatatatgagatgccttacatttttagtttagagaagaatgggaaggtattttttagagaactgagggtgctggtgcctttaacattcttcgctgcctccaatttgtcgcatcccagatgctctcttgattggcttgggcatctcagggcctgactctgcgaacaaagatcttctttgagtttgcccagggtgctgaaagtactttttatgacaagtccttttgggtgttatgctttttatttttattttaaataataattaaaaaagaacatgatttcccaaagcaatttgcaaacagagataaagtaagagcccttgctatccagcaggttgaactcttagaaggcagtcatgttgaatccttttcctctgctaggagctctcagactctcctgaaagctttgggctatagtcctctcctgaatcgtgaactggtttccattaacgctccggaagatttctttctatttcaaaggctttattctgccatgtcacattagggtaaaagctatagcattggaaataaatcagccactttattggagcagattctctattgtcaaatcaatcaagtctgtgactgaattagatgtctgctacagaaataagcgacactaattttacgggaaagagttattaactgcggatcgcctgatttgttttgttttttaactgtttacttatgaagtttggttttatttcaatgaaagcaaaagggacagcactcactctcctttttgttgtctgtagtacgtggttatgatttatttcctttcttgtggcagtatactattttagtgacaggatacaaatacctgttggcatgtttgcccataaacttctttataacaaagtcttttttcttgtgcaagcctcagtgtttagaaatcatatgaatgatcttttacaaatgctacatttttttagaaaacaaaacttctgcatgataccagaaatttcaacacaatacactctattttttgctttttatcttaaaattccagccaaatgagatgtaactgataagcattaaagtgaccttatcaatcttttcctttagaaatccgtttgttaaatctgaaacgaatgccctgtctcatgcttgtgtcctcctcagtgtagacctaggcgagcacaggtttatatgtacatgagtgcacacattcgtccatgtgtgcctgttacgttgggagaagtaatgactctccttagctgcaggttgtctttaggagagccctggtctggctgtggttgttgtacatacaggttcagtaggcgatgctctataaacccggcaaagggcatataaccagtcaagaagcaaacttctgataaaaagtggcctttggtttttgttttgctatgcggcaggctctgagtgatggagagaccaatgagcaacttctcttcccttgatgtttctctgtgaactaacttatagcattccttgaggaactaataacctacttgccttacatgtgagccagtgtaccgatttgtatatagaggagacaagtcctgtctcttgtatttatgaaccaattcacttaaaccttcacaggctatcagttgggtaactttcagaacatgctaacaggacagagtctagtctaatgtctttaagattatttactcggtctagaattatatgaaagtactggtaaggaccacacacaaagaatatagatattttcagaagttatcagtttttaaaattttgttttggcctatattgatataataaatttggtcttgccaggcattaacctttttgcaagttattgtctgagtaggatttaatggcagccagtatatttttcagctgaaactctttgatctaaggacggatgggagcacatattttccttctattgttccagagtctcagttagaaaccacattgttggaggatgagcgagtctgttgcccagtgaggttaggttcatgaattggtgagagggggtggcggtgaaaagtgatacattgtaacagttgcctgtagcttccctgtcaggtgatacattgtaacagttgcctgtagcttccctgtcggatgatacattgtaacagttgcctgtagcttccctgtcaggtgatacattgtaacagttgcctgtagcttccctgtcaggtgatacattgtaacagttgcctgtagcttccctgtcaggtgatacattgtaacagttgcctgtagcttccctgtcaggtgatacattgtaacagttgcctgtagcttccctgtcaggtgatacattgtaacagttgcctgtagcttccctgtcaggtgatacattgtaacagttgcctgtagcttccctgtcaggtgatacattgtaacagttgcctgtagcttccctgtcaggtgatacattgtaacagttgcctgtagcttccctgtcaggtgatacattgtaacagttgcctgtagcttccctgtcaggtgatacattgtaacagttgcctgtagcttccctgtcaggtgatacattgtaacagttgcctgtagcttccctgtcaggtgatacattgtaacagttgcctgtagcttctctgtcaggtgatacattgtaacagttgcctgtagcttctctgtcagctgctgcagttttcacatgctccagggtgagtggttgggtttccgagctgtggtatttgtgtctagtccttagtcagactgcaccaggccagtgaataattcaccaccaaagacactgtttttaaactagctcagcggaacattttactgtgggattagatggaggattctgggaagaactgaagaaagctgctggcttataggatgacctttgagtctcatctgggttagccgttggtattttgatttggttactgtggtcatattgtgacagctgctggctcattataattcggttccactgctctgtttgcctagcaggaatatttaggtttgtattacttcagagtgtttatggctaccgtgagcttaccccagcagaaaggtgaagcgttgcgggcgttcccaccccagcggcggaggcaggcgatgccgacttcttgtaaaaaaaatgacatgttcttgaagatgctaatgtggtgtttcttttcagtgaaagatggaaaatacccaatgaattggcttttatgaggaaaactgttttttggaaatctttatgtgcaaagggaaacatgaccgcaaagaaacctcatcttttcaaagcctgggtagttttactagcccactcggacagatgggtttttactagcccactaggtcagatgcagaaatgtaaatattaataaacagcaaaagccaactctggaaagtcttgttcacttgtaaaatatcctgaagcaagtagttgagcaggcagcttttaagtccattagtgttctgtattcctccctgaagttttgcttattatttctatcattggcagcatcattattatgtttattctggcattgagctctgtatttggccttatatattctagcaagtgctccgttatagaactgaacacccagccctagtggtcaggtttgtacatatgtgcgtgcatgtgcgggtgtgtaatggcaatggcatttctcactgtctcttgttgtctggttgtcatctcttacatgttgcgctgataatatggaacctgcagttatgtatatgaggaacctttaatagtgtccttgtctgactttacttgctttgcctgagagtttcaattcttttgctattgttttgttttgttgttgttgttttgtttgtttgttttttgaggtgagttctgattcttttaatattaaaccatcttcaagaaatattctgaaaaatatgctgtaagttgcagcattagtgattttagcagctctagctgctgtggtaaggtttgggctcagaaagttccagtcttctccttgtttcctatattgcctagattgcttagcgctctctgtttttcttcttttagcggagggaggaagagtcctttggaaggtctctgtggtgattttgtaatctcacagtcctttcctcttactgtgtcattttgattatagcctgtatttgatcattagaggagtttgtttccttgttttaaaaccgttatccctattttatgagggcttgtattcttcaaatgtactttttttttttttaatttgaagtaatgtgcccgatggaggtctcagctctctggaagcagagacagacccatctctgagttgcaggctagcctggtctacaaagtgagtgccaggacagctagagctgttacacagagaaagcctgccttgaaaacaaccaaccaaccaaccaaacaaacaaacaacgccccccaaaaaagaaaattttaatgtgtttggtgtgtgcgtacatcggggcatgtgtgggtacatatgcaccatagtggaggatgaagggcagggtaaaggagttggctctctccttccaccaagtgcggtccagcaattgacttgttccgccccaggtgcctttccctgctgagcccttttcttggttcggaatgtatcctttaaagtactgtctcagttaaatgtttcttttatatctccacttactccagatctagaattaagggatgcatgaaattgcaactcgttcggttgaataccagagagtgttctgcagcaggccattatttaggggagccatacaggacctcaacaaattgccttgaatggtccaagataaaaataagatatataaggtttaaactctgaatgaaatacctatatttagattctagatcctactaaactagaagaaaatactgtactagaacctggcagactgaaattcaaggttcattttatagttctgtgtcctatatagactatgctcccattgttagggtacggttcacactgcggtttggtagattttggttttcaatatccacaccactgattgtttgatgtgtaagaagaagtcagtgaaatcaagactattttgaaaagccattgaagaagttgatggctgccagcgttcagataactcacttcctgctgtccggtcaacaatcacctctgctgctcttttcttcagtggtctcactgccttctcgttctgccatctcctctctattgcaccgagattcacactgtgcccgtgaaagactttcacagttagaacaggtttgcaaaggctgccttttctgaaagttagaagggctgataaccagaaaaatgtaccttgagaagtgtgggccacagagctatgtagttcccctagggactggagtggattctatgcaaggctggctctctagctgggctgtggtaaccctagctctgtgaagcctgaatgtctgaagcccaagtgtaagacagtttgcaccacatgctgagaccactgaagaaagagaaagaaaaaattactgattctgaaagaaacaaatagatataatttaagatttacatgcaagtggtgagataggaatatctgataagagtatttgtgctctaggtactggaaattttgactaatagtaggttatttttattattttattttattttattttattttattttttgcttcctaagtttggtgctagccactgctagaatgtgtttgcaggtctgtggtttcatggctggtggctctggggttctatttgtccttatcattgtcccggaatgactcataacttctgtgagatcaggaaggatgcgtttagcgacatctgtctgtccctttcctctctggttcccggattctctccctgtctctggatttgggaactggggtggggaagggctgtgcatgtgataactcgcagccacttcagtgcaaaagacaagagaaggatgctgagaagccccagcagccgattgattcgtggtgtccaatcttaaaggcatctttttaaaggtttatttaattgagggtgtatgaatgtttggcgtgcatatgtatatataaacaatgtatgtggcactcgttgaaggcagaagagggccctggatcccctggactttgagttaggataactctgagccaccgtacggatgctggggacctctctgccagagctacagttactctaaaccgctgagccagctcccctgtccccaaaatgtacattttataagtgaacaataagtacttcttcatgcccaaattgtgaaatccaagagcaaaacttcattcaataaagcacaaaagtgtgtctcacttttggtcagctaatgagaagaaaggacagatagaggcagagatcaacaggtacttcgatgagtttggtgctggagtttgggccagggtgttcatttttacccacgagcctgagccttcgttgtgccaattcctgagcaagtcagttggcagctatttacctggttgtgccccggcattgaccaacccttctcctttccggctctggcttttctattccccagcctctccagagcattcaatccagtagccagcctacagttgcagacaccaagtctctttggtgctctctttggtagagccaaaggccaatctgaagtccaacaacttcctattatacccatgccgcagaggttgggcaccctggagacaccactacaagctataggcagagaaactctctctctctctctcccgggtcagccatgctcaacctgtcaggtgcaacccctgtagagatcaaacagccctctcacaggagtcgcatatcacatacccagcacatcagatatttacactgcaattcacaacagtagcaaaattgcagttatgaagcagcaatgaaaataattttatggttggggtcatcataacatgagggactgtattaaagggtcgcaacattaggaaggttgagaaccactggactagactcagtctctagggtattcacctgcagcaagctgtcactctacactgaagcagacagagcagaatgcccaccctgtgtggtggggtgcgggatgtgtctctttttatttcgtatgtatataattttacttgctgaaataaagtgaaggattaggtgtgccaaaagacatttaattctggacaacatgccaagactgggtaaaattgtaaggccaggctctaactttttggcccaaagttttctaatcctgctcaagagtaccgtggcatgaattagtccggtggggtgggggagagaacacagacaatggaaaagtctttctgcctatgatgataaacagggtaggaaactgactggtgtctttatttagtatgaaggttgttctttacagtcttcattggaaagatggcatctcagaattttgtacatgacgagctcaaagaggtaactagtacactacctcttgacagactctggggctgggggaggattaaatactgaatttctttaaaaacactatggggggtataggtgtgccattttatgcctgtggaggtcagagaacagacggggcttccttccattctctccctcctctttgtgttctaggaatcaaatccatgagtcaggcttgcacacacatgttcccactaagccatctttttggcctcctacacactgaatttcttcaagcttttccattgcccctcatatccagagcagtctttagagcatcgtctagtaaaggctgtgtgttttcctcagctgctgccccatgaacacgtggctgctgtcagtgttctgcttggcaccacccaaggacccaggaacctcccattttaagcatggggtccctcaagagttgccatggcttctgcccctctatgggactgttagggcaggactgttagcctttcttgggtcctggttatgaattgaaaatatagatcctttgagccacaggtgataatagctgtaaaaacacctttgttttctagctcggacagagtagagggcaggcacaggacagccagggatactatgctcagtttccacgacatccgcaccaaagtgggagggtttctttctgagcctgcccccaaaagccttcatcctaggcagtaagtccctcatcatggcagctttgctaaactcaggtgtgccgcttcgtgggatggttggctccagctgttttcctgtccatcttaaaagttctccatttcacctctgcacatgactgagaggccctcaagctgagtcaaagaaaatggccagaaaacaataggttcatggggctgcaactaaacagtggaatcactgcttagagcaaggcttttcttcagctgtactttgacacctctcatgtgcttggggacaccccggacgtgtgacacctcggacggatggacggatgtctgcctgctgagattttcctctagagatgcttggcagggagcataggcccttctcttcactcctaagaggccaatggaatgtgtatgtttgagtggaacgcattcactgaatctcattttcttcccttttgtagaacatcagacctaggagccagctaggacaacgtgtgtggcgtgcatattgagccagccactgcaccgtgtatggggcatatattgagcgaggcaaaagatctttatagatgaactcaaacatctttcatcttttcaagtgatgactccataatcacttctaaatttcttgacatacgtttattaataggcatcatgataaatggtataatacaggttttaattattgatgctaaagtacagcactgaaggtttttttttttttttttttttttggtgtagcttggacataacacaaaacacccagtctgtgggaagtggtgggcgtgggtcaagcaaggactctgctcttggtgctggtgtgaaacaccccatcctatcatgttttggctgcctcactttgatcaagtctcctgagtgcttacgatgggacttgccatgtgaggagatggcgtgtgtccgagtgaagtgaaatgaaaaccacctggtgctcacactcagtccatgcaaatcaccgtcccagctactgttagtttacacgaggtgttttcccctccctagggctggcctcttgtaaccttgagcatcacatagcgaagtttggaagaatgaggaagtgataaatgatgcaccactcctcgtaggccatattacagctggatacaaatagagaggccataatacctgatgatatttggtagaggaaaagaagacaaaagaagtgaaggaagtgaagaaaggcacatacaaagctatttatttatttatttatttatttatttatttatttatttatactactctcatccctgaatatggtcgtccaggcatgtgctgtgaacagagactgaagttggaaactattctggttgctaaattttgtgccttttacttaccttggctacttggaccaactgtattcttaacagttcacctagcaaatctaactgcctcagacgcaagcgtgaacactttatgtgtaacagagtctgtttaattgggcagtacgcatcaaagacagagatctagtagaggcctcatctccttcagagcctccagaatgtctggaaacaagcctaacatccagttgcagagcttctgaaaagaggtatcctgtgagaattaactacacagtttctttagctgttagcgtttatttcactggagcaggtttttctcttctttccttatgattgcctcacaaatatgaattgaaagttaacgtgcagtgatcctaatatttcactgccatggcacactacttcagtgtagtgggtggtcatcgtgaactagttgttggaacaaactaacctggagaacagttaggatataaaatcatgaagatgtactagcgatggagagcatcttcaggatgaagacctactaaggatagggaccatcctcaggttgaagacctactaggaatggcgagcatcctcagagaggaactggctccacatattcatgctttttttatgcacagtcctcagtcacttgaaagccagtagacagtcacactaaagtgacctcccccacggctcaccgtcttcccaaggtatccaaatggttaatgagattttgcctctgaattttcacgactttcatttgcttctgaagtaaaaatttatggcttttctctcagctgagccgatggtagtttaccagtggaattgagttcacacctgctgtagcataaaaagaagtctctttgtgactttacacatcctctgagccgaccagaggaggccggtctccacagtctttactccacgaggtggtcccctgtctgtgctttagggaagctgcatctacagactggccctcattgctgaccgcctacagctcagtgcatctctggagatccttccctcctccaggtatgtgactgttaggcaggcatttggactgcagttggcagtgggtttacatgagcactgtgaagtatgcatatggggacatctttgcattcgctaaaccatttagctgctgcagacatggtccgttagtcaggcaacttccaatagcttcgtgaagagctctagttaaggggcaggaagtgtaaattggcgtacacttgggtggataattaataattagcatgggcatctaaggttgtaatagaatatataaaaatgtcagttgctactgaaagtcatagcagcacagattacttttgtttgtcgtgagtgttcctcccaccaaaacaacaaaatgcttcctgtctgcatgaaacatcttcacagttgaaggaggagtaattttcctgtcagttagtatttcccatggtcattatgaatttcaagacctctgctaattgagagcattttgtgtggtttgaccacatatggcaaatatcttctttaaaaaaaacattttttttagtttatttgtatatttggggaccactcgtttattcaagaaactagcttcactctttcattcataccccctgctcatcaacaatagagcttgttaatttggttagcctcagcacaagtagttatttagagacggaggcagggagctttttctagtggctaagttggaagaggtagagatgacgaaatggatcgcaagttcagttttgggcttggctgtgtcaggagcggattttgcacctcccggcttagctgtcttgattttcaggcacagaggaaatgttctctgacagcagcaatgggaagggcaagttctatatctgtgaaagcacagggcactgcctcactgcttgggaaacggcaccgacttctggataagtaaaatcgatgttatcacggtaacggcagtggccggatgtggtatcacccacctttcatcccagcattcagaaagcagaggactgtgagttccaggctagcctggtctacatacaaccctggcagaggactgtgagtttgaggctagcctggtctacatacaaccctggcagattattcaatgagaccctgtcttaaaacaaagcaagacaaaacaaatcaatatgcctaaaaccagtctccactgtgacatcatgctcagtatttagagttttggagagcatctgtataaactccctttatactagttgactaaagtgataaatgccaaccttcagttagactttggttcattcattcatttaacaaataccccaagggcttctgataaatttgaatgtctggttaggcattacaaacttgtgtctccctttcttaccttcagatggtcacacttgctaaaggaggaccagataatagtagtatgtgcttacgggggacactggtgtaatgatcagcatttaccccaaatgctgttagggcgtccagcctggccaccagtctcttaatgtggctacagtcttttaagtacttgcttttcacaaggcctcacagagtcctccacaggggataagcttcttggctgggcgttgcctttgctgttttctagagaacgtaggtgaggctgtgtgggaacagagtacctccccagtgctgtgtgaccactaagtgatggagcccagaatctaagcggcatctgctgaactccaaagtccttgtccttacctccctaggatccctcaatcaaagatcatatggaaatgatctttccagatgtttctagaaatcaggtacagctaatccaatccctgaacagaatacgttggtcgaataaagcctgggtttctctctctctctcctcgattgaaggtaacggaatggcaggaagatgcatccatatctttaatagtatccctttctgcccaccgtaacacgaagctctactttcccatccttcttcatttcttgcaaggtgactaagaatcctagaaagcacatgagttcatgaccgaaagcagatagtccagatgggggatatatacttgttcctccgtatatatcccacccaatcgagaaaaagcagaaaagttcaccagaaatgtagtttgtctggtcacagatgaacaggaagcagctagttaattcttgttgaatttctaacagttttctaacaaacacccagccgaaactctgagagaggctgttgaagtaagcgcctacaggatgggtctttgactcaagcatctgggtttagttgtttgactgagtcagcacagactttgagatagacacatggttgtacttgggcgatatcttaaagcctgttgagtactgtcctggtacaaggagagttaccagagcttacaaatgccattgcaaagattagtgctataggctacaagagcaggcccaggcctggtaccccaaaggaagggctgacaggctaagccataatagaattccggctctaggaaaagaaagggtatctaatactgagagtggaagaagtggccttttccttggaacatgtggtgacctgtctaaggactggtgttaaatggtcaataatgtgaaaaggtttgtagtataggacagtcacacatgcagatgtgaggactcttgagattagctggccggtgactaaaacagtttccagaggacgtggcgatagactgaactgaagtcaggaacagcgcggatctgagcactaccaagctgctggaaatggtgggaaccgggaactgatgggtaaggaagaggccatccttggcttcttggtggtctgtctgtttggcttaggttctccattggatgatagcatcacttgttaagatatacaaaatgcagattcattatggggggggggggactaatgttgataggtccagttttatacataaagattttttttaggtgtttgtgggaagacagatttgtggtctggttcaagactgcagatttggcaagcggcatcccatacttagccgtgaaatcacagggacagataacttacagggccagagaaaagtgagcccattttctgattaatcatgtggttttctacagacttgcagttgaaaaaaactaaatcctctgacttataagcctgcaaacaccatatctttaagtaaactagttaattcttgtttaatgggtaatcacttccagtctgcttaatctctctttgttagcatagtgttttcactgcactctccctccttctcctccttaccctttgttttaccttccccgtcctcccgcactgctcctcaccactttgttccttgtctctatctcttctccttaccttcaccctccccagccctgacagattgacacactcagtcttctcatcatttcgggaagtcatgataaattcttaaagaaaggcgttgaaacccctgttggtgtttttgatcccctgtagaagttttccttccactaccggaattattcttacatgaagctgcagcaccgaggtacacggatggcaccgtgactcatgtggctatgagcgaatgaaggaatgaatgaattaatgaacaaatggtcctcaaaaggcactaactcctctggttgggtgctccccgcatgggggagacactattgacatggtgagtcatcccatccaaaggtccctgcttatacgaagttctcagttccatagctactggccactctttttatacattttttttgaggatgaaaatcctagtttccttcaaaactataatgagaatacatttaccacattacagagcatggctttgccacatctggtatttttcctggtgtgctggctggtttttatgtcaacttgatacaaactagactcatttgggaagagagaacctcaagaaaatgctccctcaagattagtgtgtaggcaatatatactgaaggcctgagatcgatctatctgtctgtctgtctatctatctatctatcacactatatcatcatatattataaattgatgtgagagggtccagttcactgtgggctgtacatcccccaggcagatggtcctggatggtataagaaagtgtacagagcaagtcaagaggagcaagccagttggcagcaccccttcataagctcttctgccctgagccatgctctggcctcactctgaaatggtctccaagctgcaagctaaaataacccatttcttccccgagttgcgtttgggcatggtgtgtatcacagcagtagaaatgctaacgaggacacccggtcaccatcctctgctcgtgttccagtttcattttctctctgcaaacagtctaatataaatccaatctaatatttcagactcaaaattcacctatggtctattgacaccctgcgccccccccccccattcattagaaccaatgctttcttgtgtgtgtatggggtgggactttgtatttatccttttctgacttcttacatttggttttggtccacagatatggcacatttccatcctctcactctgttgccctgggaagcagatggcatgatgcctaacagtggctgttctttggtttaattccgtttactagatgtctaacctttctggttatccttgctggttagcttagctgatttgtgagctggttaaaccagtgctttgtgagattgtgttttcctcacgtatgtgttggaaataattacagaatcttactgtattgggtggagtaagtgaagggatgcccacgggatgcaaagaagacctggggcataaagaagaggcagtgcctggtgaggattactgtggcaggagatatggggtattatggaagtgacttctatgattagagataacttatccacctaaggcaaacagacccttcaaatcaagggaagagacacaagtagttctaaaattcaatgcattctccaggcagctgataaaataggagtaaagttttcagtgatcccctaattattaacttgctacattgttgcgttttatttaaaaacaaaaacaaaaacaagctgaggacaacagtaggcatgaaaccttaaaatcacatgaacaagttctgagtgtccctttgcctgtatctagatttagggcagaagtgtacaaagcaagtccaataggaaatggcaggttatatgaaaattgggctcatgttcacaatagtccttaccagggcaatattgttagattctaagactatgaaaattaggatcacaaacttttagcaacagttctgtagcagacagaatccttggagactgataggtgcgtttccagggagagctgtgagaagagtcccattgcagggccttgccctgcatctaggcaggcccagagggaggaaatggattagtctctaacaacctgttttgtaacttagtgctggaaccctgtatagggcttaggcatagttcagctaaggttaagtcaacttcaattattttcataataagcatcacagtggcgaaagttactggggacagcagcacatagtttgcataattagatgccccaccagacaagattctcatcgattggtttagaagcatggttagaacttgaaaacccccatcttcctgattcatctcagcattatgtgtgactcagctctggctccaatctagatttctaaagcaatatacccataccttcctgtgttcatttatatttggataaacttcttgacacatttaggaacacaaaaggccttcgatgtacctggctgcttctgctgctgctttttcctcttccttttcctcttcctctttctcttcctcttcctcttcttcttttctcctcctcttcctcctttttaaaatgggtcatttccttcagtaaggtttcgacttattgccatcaaagctagcagctatgagagttgaggtttcatgttatccaactacgtgtaagacatgagagattctgtattggtgaggaagcttttctcatcttcggtgtagcttttgaagaatcctcctgacttacgtgctattttttgctctggcacccattgctgatgctgggtcccagaagaactgtgccatgtggccaataatcccccgacactgacaggctgtaggatttattcaactactacctttttccagaccaaagtaagggtttttgatttttttttcatgtatgcacgaattagaatcttaaaataaaccccacttgtcctttctttttctaataatttatagaaaagaaaacgtactggttttctgtagatctgcctcacttcaaaaatcaatctgaagactaagttgattctgcctagagactaacactctctggcttttcagaaatctggatgggtaaattagaagtacattctgcacatggtttagcagttagtagcctggaaaatgacccaatagccaagatagtattttttttaaaacatcttcattgtaagtgcttgtttaaagtttaaggctgtaattgactattttgcacattgttcattgttaattcctttcagcctgttatagttttgtaaatgcattgcctgctaagttgtgttggtggaggaacattagtgctgtaagaaaatctagttaaatgtggtacttcagagcagttaccaattagtgcctgagagtagatcactttgatttcacgggtgcacaggatggcctgctgaagagcgactcctgtctccacttctttatgttcctatctgactcccttagtcagttccctatgacagcagcaacagcctttcttcatcgttttgtttgttgccacgagcttccttgagccagtctattttatgacattttgagttagagaaatcattttatgtttgatatacatactactgccctttcctggcattcgggatatagctgctcaatttccattcctccatttccgaatgcttgcgagaaggataacactagacattgtacgtataagctcttgctggctaacgatgagatgttataaaatgtgcggttggaaaggagttaaattctgcccaccaggtagaaaagaccacgggaatatgggcatagcctcaggaaataatggcgtagataacatgtgatttatctgtatatggcgaagaaagaaaactaatgattgtgaatgtgctgaacgtagcttaagctatttatcatcatgtacaagtggaaacttgcacaaaacccctcttgattaagttctatctgaaacaaaagatgtgattggaagtgtggaatgcgagaatattttaagagcatgatgaaaatccaactaggggctttagcaagtgagtggtcaaacttgacaacggaaagaatgagcaggcagcttgggtcggttatataaatttggatgcctccaagagtccggacctatggggttttgtgctgggtttcaccatcaaatttatcaattagtatatgagccattgatcgaaacacttaaaaatggaagatatgtggggccctttttatctcttaaaacaaattctaacaattaatcctgatgaattaggggctaccatgcagaatagggggaggggagaagtgaggtgggtaaggaggagtgtagagggcagtagtggatgaatacatcataatcagactccacaagcagatatttggaagttggtctgtgtaagaatcagctcaccatgggaaaaacccagctgtccattggattagaagttctccatgttaaaaatgtggaagaaagaacccccaaagtacaagagtgaggagagaatactcactcacaggtcacagtaaagagtgatgcgctatctccccacggacctagacaataggctgtccagacgtggtttctcaatctatgagacacaaaaaggatcatatattgataggtgatggagatactgttcaaacgtgagtcaagttttcacctgtgtctccacagaagacgacagaggacagatgctgaaaaggcacataaagttcccaagggagaaggaagaggtgtcaaagatgccaggatcaggctgaaacaggggagcagagggaaagagaaaaaatgcacaaaccccaaaggttggcagtagacacctgcaaaccttcatgggtttgaacaggggactgtgcctttaaacaaatacctgtggcttgctgttctgttgttctccttagtctttgtgtctttagaatttgtctgtaaaggaaattagctaggtatactttaaaaggctcaccatgtctgctctttgagtcatcagttacttactctgatgtatacagtctgttaagtctcattgtttctgaggtatcctgcgactcaccggtatgtccgtgtttaatggaggatacctgttatggacaggctatgtgctgggttctccgaaagcaggctgtaaagcacaggcatatcttaagggcctttgaagtttataaccccccaagtgtgttgcattgtggctaatggaagatggcgcatgagttgatcagaaaccacgagagaggcacatgtattgattgggacatcagtttatattgagtatcacgctatctcactatttcctaatgtcatacacacaactggatgcgatgaatgactcatttgtcagcctgtgacccgcaaattccttaaggaaataggactgcatccttccgttcttcacctatgttatacacctgactttattctagtcatgcgatgccgatgcctggcctccacctgcatagtgtaagttcaggggccataatttcagtgtagatctctgatctgcatactacttcaaagtattttccttttagtttccaaactgttcatgtaatgatttatttttaactcctcctatttctttctcacttagtagaaatgagtcaccacctacttagcacctaattatttaccatcaagatatttttaccccataaattaataactttttggtaaaatgcatgatatttaatatgctaaaattatgtatgctcccactgggggaaaatggaagggtgaatttatctatatttttatattaatgtgtcttcaaattaacggatttaacctgttgttcctacaggtttgcttctgtgcttcggcagactttaattatatttccattcacaagttaacactgtatgtctctcctaagtggagtgatttttcctattttgaaggaaggcaatgtggatagacttttctaattgaaagatgaggatagccaaattagaggaaaaatagccctatacatatttccaaatgaaatccattgtcattttccataatgcacagccaagcttgaatggtcttgagaggaagagctttgcttttgcaaactgttagagaaacagtcaactaaggatgctttgtagggtgcaatgtagatttaggttgtcttgtctttcctttttttcttggtgacgctgaaactaagactttcaaactccctaaacacttgctttatcactgaacctcacaaccacccagccccaatcctgttacatgttctagtattatttctgctgggctgtgttacatattttgcccactgtgggagtggaatggggtagacatgtccatgggtgtggaggccagaagtcaaatttgaatatttagatcttattttccttaggttctgaatcagatctatcactggccagcctggagctcaccgggcaggttaatgtggttggttaacaagatccagggatctacctactctctcttctcagcactgggatcacaattgtgcactgcctttctcagtttttaaaaaaatatcactgtccatccatctatctatgtatctatgtatctatatatccatgtatctatctatctatgcatctatctatgtatctatctatatatctatatatctatgtatttgtctatctttgtatctatgtattgatgtatgtatgtatgtatgtatgtatctatctatctatctatctatctatctatctatctatgtaactatctatagtatatgtcagtctatccatctcttttacacacacacacacacacacacacacttgcacacaaacactcgcacacacaataactaggtcattgggctggcaccaagaaccttcatgggttgccaccttgttggcccctgtctgccttagctcacataggtcctgggattgattccaagtcctggtgtttgtgcttagctgatggagccgttcttctgagtccatcataatacaggtctagaaaggaatcaggagctcaattttctgatttcattttcctgagatttttgtggttgttgtccaagctgcaggagagtgggcaaaaaagaaaatgttgtgctatttccctgcacccttagagtggtagagctgagtttttctgatgtgcattttgcgcatccatggaaccttttgatcgcacggatgtggagctcactctgagctgctcggagccacagtatctgagctggcagctgggagcctgatggctcacgtatttggccttggtaacagaaccacgttcacctttaggatttcaagactcggagctggagaagttgcccagcagttaagagtgattttgtcaaggacccaagttcagttcctaggatgttcgtgttcagtggcttacgactacctgtagctccagctctggaaggatctgaggagccaagcatatgtgagcacttgcacacacgtgtgtacttacacacacatgcttaaaagcaatcctaaaaggtttgcaaattttgtgttttatttcctttgcacttgtgctaaattttatgtatttaataaaattacaatacataaagtcataaaaaaaagagaaaagtctgtatttctttttaatgtgtggctcaaaggaaaagcaaatatgcattagaatagtatatgtaagtacgtttctcacatggatgcccctcctctcattgaaacttaccttgcctgcttttattcaaaatttttaccaagttgaaaatgcaacctttagagagaaccaaagctcttcattttaatgactaaagtagttggagcagtaatcatggtaaaattatttctcaggatattaacaatcatttattaaccatagctttctttactaatcacagaatcctgattagtaaagttttgtttggaggcctatcccactgttaatggcccatgaatgccggtaagttatggaaagggtcagcactgcattgctcggttggtttttaaatcattgtttgtgagcttattgacttgtatcacacaccgattagcgttgctcctctggatggaggtaaataccaccaacagttagcattcagtctttaagtcactcatgaatcccgttcctgagtgcttatcatacaagtgctgtgtgtccagtacacgccttactgcaggatggaggtcgcacggaggaaatccaggcagttgatgttgaaactctgatgtggaagagcatggagagacaaatggaccaaggagtgatgaaggaaccacatccgaggtgttagaagtaagaggaaggcacggccatctctcaagagcactgggagatgcatggtgttaggaggggttctaggtagacaagagattccgctcatgaccaaccactcatgccgtctgggttcaatattgtcattcattcctcaagggcaggccctgaaatgacaccaggacacctgacgacaaggcccgctccttcctgtgatgcttgttttcagacactagacatgaatgacagtagtgttgctagttgctttaaaatgggcccaaggtatgtgtgtcccaggatggatacagacataatttttgccatgatcttgagctaatcaatggctattaaaaatagtgtggtcatttttagtcttgttcagttgttcagtttagtattgattagtacgttcagttggtgaccgaacagagatttattgataacttgtacttattaggaccgtttatatttacccatctatagtttttagtcattcaagatgtctcatgtattttgggggtaggtagcaagaagaccacatttgaggggaaagtgttagagtttggtttaagttcatcagagacgtgtcaggcttctttgtaatttttgatgaggatatttaaaaggtgatcagttgggagaggtcggcttgtgtttgtggtttttcaacagattgctgaaagagaattcttccccgagacatgtgaccaatatcattacgcagaaagagccatttcatttcttgccatggaaatgataaacattctacatagtaattaaaagcagacattcacatatcacctaacaccagctatcgaaaataagcagactaatgagtattaggacgaaattcataagagcaaggaagacctgagaccgcactgtgtagaagtgggagagaatgcaggtgagagacatcttcagatttcctctgtaacgaatttatgttggtggaaatgtgaaaaagagtaaagtgatttcgctctggccatcttggcttgatttgtttcgtttctgttatacgagtagtcgcaagtggatgggcattatagttttatatgctcaactggggacgacttcaggtatcggctgaggaagcgacccctggcagagaaggtcacactggtggttggttgcacgaaggaccctggcagagaaagatataataggaagaggttaaaaatccaaagatatttctttgactgaagacagaataatggaagcggggagcctttgatactacaaagcccacgtaattttccttttaacattatagagcagtgtttccacctgtgggtcgcaatcctcttgtgggtccaatgaccctttcacaggggtcacatatcagatatatcctgcatattagatgtttacgttatgattcataacagtagcaagattacagttatgaagttgaaacacaactttaaggttggggtcaccacaacatgaggagctgtattaaagggtcgcatattaggacggttgagaacgtctgtcacagaggaccctagagttggatgtacccagtgctttgtgctcagacatttcacctcctgactctctagtctccatcaccaaggcatttgcaaaccatcctggtgaagatctgatctttttttatctagtacaatatatataggctggtcctcgttctgtcagcactaaagcccagcagtgtgggtctcctttatgcataaaatgtctgccatagtttcctgactcctaacaggggccgctgttgtctagattttagcatataacatataccgggtgggtgtttgcatatttcaaagttccctttgctcaaaacacactttccccatattttgtctctagggaaagtgaagagtggcaaggttagaatcaccttggttagtgatgggcatgggattcgtgcttaataaatctttgagatccaaagcagactccattttcatggacagcacaagttgatgtgaccagagaaaagattccttgtaaatgaaattgtatggaataatatacagcagaaatcaaggtttcaggacaccgctaatagctgtatgcttctctctctctccctctcctttcccctcccctctactcccctcccatcccctccactccacttcccttccctcctctcctcccctctcttctcatctcctcttctcttccctatttttatgtattttagcacagtatcaaaccccaggaataacacttttcaaaaatacttccccagagaaatggttaaaggtctcccaattctaaggaaaacaccatcttcattagcttttaatggggggcaggtgagagagatagggaagaggtcctggtgctttgatagaaaggaatggatgctgcatctagtaaggacttgtgtttgtgaactgcacctagtgggctccgccatggaactcatatgattttattctgaagcagctcacagcctgacaaatggaagcaaaacacttggaaacagtcagaacgttagaatcagagcaggatatagtcacagtggcaaggatgagggaactggaggtcctcagagattgttcgtctgcttccacactcagataggaacttgtacactgatccaaccacttaaaatccatggtctacctttgtgagggatgtgcaaccatgaggtccatactcacaggctgtgtgtaaggcacagaacccagcccaaacttggacagtctatgggaccacagtcttctcctttctctctaccacacatctggctaatcaagggtatgagaaaatgccaatctattcatcacctcagaggaagttggccacctgcaaaggcagaaggcccagcttttcatttgggttttctgttggcttttcccagtgttgactttcagcgactccgtggctcctcactgtctactatttttctggttgctgcatttcaggactcatccactccacaccctccccaacatttgtgctcctcacacctatgagtattttttaaattcatgtctgtgatacaggagaattgatagaaaccaagggaatgttgggcctggaatgactcaactaataagcctaacattaaggtcttcaggccatctttggagcgggcctgggtccagcttctctctctcttactactgcttcctagtggcctttgcttttggtctgtctttgctcctctgtcagactaaaacaccctgaatggatcaagcaatccttatgaaggggaaagaaggtgtcatcaaactgaggaagggagtctagaattcgagagagaagtgttttgtgatttgatgttgttgaccttacaataaccacatttaaacagaaatgaaccccttcattctttgaacttcattcttttggactctcccatttatatcatccagcttggtttgaacttgcctgtcatgaggtcatttcctgtggatcctttctgtctttcgtcacctccttttctgctctatcctctttctttggcttaagaagaggtgcatgaggctcagcgagtacaatcacttgctacgcaaacacgaggacctgacgtcaggaacccagaactaacatgaagtgttgggtttggctatccatgtgctaagccaatgttgggggaggataggaggaccctgaagtgtgctgcttccatcccaactctggtttcattgggaaactctggcttaagagaatggcacagattatggtggaatagaacacctgacaccctcctgtggcctgcacatgctttgtgtatgtccatacacactacacacaaacacaggtaaatgtttcttttttgtcctgccaatgataaaatgtgcttgaacttaagagttattcagacagtgtgaaagttgtggcttacattagacttacaagcccaggtctagtagattccccaaaactatgagggctagaaggatgagagagctcttctgactgactttacttctagtctcctttttctttcttgtacaagcagcctctaccacaatccattgtactacagcacagttaactcttcttactcagtttctccagctatggtttcattatcttttacctttgcaagtatagcctaggtgatcttggagtttggtcccaaactccagctactcctcaacttccttgctcagcaggtgtgtgttcttgggtgaccccttcatctccatgtggtcatcttctcaaactaggagccacgtggagttggtgctcaagaacctgccttgcgcagttcactagggaattacagtctttgctagtggttaacatctaggtgagagccaaaaaaggccagctgcttctctcttcatctcttctaactcctaccacattcatactgtgcctataccaaattagggtcattttggcatagcaaatactaggagatatccctgcgggagccagtgcacacagtcggacctgtctataaataacagtgacaggattatctcattccctagtctctatgccagaaaatgattttattttgacatctagaagcataacatgtcttaaattgtggatataggtaggctactgttctatctaatattaatactatataagaaatacaccacttagtgttcacattcaacacacacagcactttgtgcctagctcggtcaccaaggacagagagaagaatcccagcctacaggtcttcactctaaggagtcaagcagacattgccttcctgtaaagagctaagcaagctaagcttcaacagccagtgatagatcatatcaggatccaaacagcgagaccttcagttttggaggcaggaggaaggtcctctgggttggggaacacattctgatggagcctgacaagtaagtggaattttctagaagatcattgaaaaagtggaaggctctttcagagtgagggtcaccttagaattttgtgtgtcatctcttataaaaggatgaacatatgccttacggagagagcctgttataaagtttagccctcatattctgccaaaacttgattggctttctggcttctacaagggacccatttccccaaagggaagctggagaagaccctgatgttcatgatgctggtgttgtaagtagacttgggagggggctccaaccagaaagattcggttgatatgtgaggttgatatttgagcttgactacacactgatacatataacacttctgtgtgccttgtgggccttgtcaggttcttggtttatactgcaaatatgaaaacgcattataacagtttgcaacgttacagcttttcattgatatcagatgtcttggttttgccaattttgtttggatttaatctctttccatttatgttaattctctgtaatgtttcccctttgttaccacttactaaaatattgctatatttctccccgtaaatagacgtgtcattcactcaccaggcgtctcaccgttatggaacaaaggcataatgtttccttctaggttataaggctcaaagtcaggggataaaacgcctttcttgacactaagcacaatcccatcttcttaatttaaaccttgtagttggaaattatggtatacagtaaggccatttgtatttgagtttctctatgcttaaatataaagaacaggactggggttgcagctcagtggaacagtacttgcctagcatgtacagtgagtgtcctgagtccagttgtccgtgctgcaaaaaattaaattaaaaatgtaaaatatttactaatgttatgcaccttggtgttgtcctggaatttaaaagaaatcttcatgtctggtgtgggaagaagatgaaaatgtctcagtacatgttcagtttctaagaaactgtagggaacaagagcgggtgtacagccagctatccaggagatgactatgaatttgctgttaagtttgaaagacttgccattcagacaaagccctaaagtcggcaattggattcaagggatgaaataccgagacgtataagtggaaggtttaccttgaaggtgtgaggtggactctgagctcacaagcagcaggtggttcctgatgtcctataaccactatcaacacttttctgctgagggcagaaaagaatgtttacatggagagagagataggagccttttttttttaatcataatgcaaaagaagaattaaacatttctcattggctttaattacttaaattagtggttcacaattttcctaatgctgtgaccctttagtacagttcttcatgatgtggtgaccctaatgataaagtcattttcgttgccacttcccaactgtaattttgctactgttgtgaatcgtaatgtaaatatgtgtgttcttccagtggttctcgatggcctctgtgaaaggctcatttgattcccaaaggggttgccaaccacaggttgtgaaccactggcttaaatagtccctgttcagaggaagttgatggtagaaccataaagtaggaagagtgcctttctcatccctggagctgagttccctgtgctctggcctggcagtacttcagttttctacgtgtcttttctagacgatttgtaattgtagttactagcctttcctgaagacagatgtaacacaaaataccttagacattgtgcctaccagctatttagtagctcattagaagtattgctttccccggagtcttttgttcacccattcctttgtccattgattcccgaagagtcactcatttgtcggccccagcacaggtccaggcagtgttttagtctctgtgaacatggcagtgagcagaagatagcttcgacacaaagaggtcacaggtgataagtaatgattaagtatttcaggggctgcacttgacataacaacttcacaacattatcaccccctttgtttcatcgatgaaatcgttgcggtaccaatacagtgactggcccaggtcatcccttcggtcggagtgggtctctagttcaggcccagaaagtttggctctgaaatgtgttctgacaatcaccccactccactccaaagtatttggcctaaggtaaatcatcattatcacttctgatattattaatagtaactattcctctcactcagatgggcactcaatacctaattattggtcaagcaaatattagaaatcaagggctactcatatttacacccagcgcgtgctatggcgcccagcacagtatctgtagaaggtaagagctctgtcgtgagaagggctgggggaggaaggatgaagagatgggatgatgtatgggagagatggagggagggaaggattaagctcgttgctttcaggattttgatgtagttttccaggacttctctactcctgggtgcgaggaagcccatccttaaaggcacatttccctgtcaaataataacatcccgttttattgattaaaaataaaatagttcaggagctagaagacactaactaaaataaatgacttgatttttttgagaacacatttcaggtgatggtaggacccatgcttaatttgattaagaccattacaattgacgcgtatttcctgagtctattcattggatcacactgatgaaacctttgtttacaaacagccaggtcttggaagagtataaatatgtgtgtattaaagagggagagggtgtaagtaggaacacatatttatttcaataaatacctgtaaggtgggctttattttgtatatactttttgtagggtgggatattgaaacattattttcttcctgggaagggaaagatttggtgcttgcgtgtgaggccgttctaacaccaagcgccatatttaagcatcacaaatacacactaagcaagggccagatgcacaaggaatttaagcagagtttttctaaatggcaaataattagaggggaacagatgcctatgggcagcaaaggatgaaatgaggtaccaggaattttaaaagggagatggaaatgcatacatagaatgtagttggcttcaagggtgtttaagcctagcgggcgttctctatcgagttttctgttgttgtgggtttgagttaaattctcttctctctttacctctattccccaaagaaatagatcatgctaatcacgccaagtggagcagattttcttccgaacctcagttttggacgagtgtgtgattggagccctttcttctctctccccagggtcttgtccttttgcagaactgccaagatatgacatttcataacagtgtcactcctcccttattcataatttataccccatctacctccagaagaggtgtttgggcagccttacccgtcaaggcctcataccaaggcaatattttctctcggtgtgtgtttcggggcagtcgagtccctcctttgcagccactgtgctgagagagggcttgtgtccatctcaaaaaccgttccgtgtcgtcttgatgcggggaggaaacaaacccccaagaataaagaggcgatgagcacggagacatttcccagcctcctgtagggtggtagtttaagcagcaggggccctgtgcacagctctgttgctacccagcaaagctcagcagcagcacctgatcattatccttaaggttcacgatttacctgttgtgctcatcgccacagaagaaatgaactctctgtaattatatgggaagggggaggagatagtgttttagtccctttgatcttgagatacaataggctctgcttttggaaattcaattcgaaagagcccaatgtacacatctgcttttttgtactgcaatttctgttgagcttgacaatagaaatttattaatgcaaatgtgtagggtctgttccttaaggggaaaaaaaagcaacaacattcaaaaacgcaaggtagacctttctgcagggttatggaagcttttgatatatttggtttctgtgtgtgtgtgtgtgtgtgtgtgtgtgtgtgtgtgtgtgtgtgtgcgtgtgtgtggtagggggagggctttccttgttaacaaggactaaacataaaaattctaagatacattggggagcagacagactcatgattgattgaatattttgaagtttctcaagacagattcactggtaaagaaatggaaacaaacaaataaaatcagaaaaccaaaaacatactgactcttcagaataaacaagcaaacatgcaaatacaaaaccaacaacagcaacaacaaaacaacaaaaaacaaactccaaacaagtgtgtctacaagcaattttgagaatacgtttgatttgatggtagggcccatgctaagagacagagcttccatttagatgaatctaacctgccaagtgttctgtaaaattgtctctgcctgtaaatggaatggcatggagatttgaggtagggtgctgtcttactgattcaccttgtacaatttctccccgcaaccgtctcacaaaactgtaaataaatgattcttaatcttaagagtggctggatcacacagtagtggttttattcattttcagtgtaaattcttcattaaaatctaaaatgtcacgggcattttggaacctgaacttgttaagctgtttggtggttatgttgttgtcgtcgttgttctttggtaggctttctggctgcttccctgaaagcaccctatacatctgctttctttcttttcaataaatggggaaaataaatgatagattgtgcatcaattagaagcatgttcatctcttaaagtagggaagaatgtccattttccatatttgatcaaatgaacatgattgcatatcacgaccatgccttgtcaaggatctcaccaagtttatttcgtgttatgtaggctcaagaagacattcgaatgaattacaggatttattggatccacaaagccaatgcttgttttgggggtgtaatctgatgagtgtggttggtattgttcctgtgcagtagctgggctttggatatatatatgtgtgtgtgtgtgtgtgtgtgttacatatatattattattacatacatatatattattttgtttgccttcttctttgagcttttatttatttcattacttaggaaggagggaggaagggagggagggagagagagatggagagagagagggaagagagagagagagagagggagagatctatcagaaggacaggaagtacagcccagagctctgagtttggagcaggaactggagtctctcttgagtgtgtattgaacttcttccaaaggttgccattctaaacttacaacgctgcttgcagatgtgcagcttcctttgggttcaaggattcctggatgaatttgtgccaaaggccatcatgattatttaagacacagaatcttaagacagatctgggtcctacaagcttttgggtcactggggtatcatttaacacatttagggggccacagaaactcacagtgaccaccttgtttgctttctgacacttcgttgtagcagtgactttgtgacaccccattcatctccctttcctcacaagcaaacaactcccagagagtgtccattcccgatagtaggcacttggggtgccacaagcaagcagtcaccctttaaaattaatgagcttaatattggtcagagaagctgtcctggagttatcagagggaggggccatggacatggcagaaggaagaagactggactcctaagtgacaatgatgtgtgcccctgtcctagctagctcgcccatcctccccacccccagccaccaccaccccttccatcctgtctcttctctgagcctccacagatagaaagacagggtgattatgaagacgtcagttggagcgtaggcaggcgagaggggcacagcgccccagatgaggtccggggggagctgaggagggtcactcatggacgaccgtgtgtgtgtgtctgacagactgtgaaatggtgcgttgttgcacggctgcgctgcacctgggcccttcatctgtgattgattggtttggtcatgtgtaatggtcccatctgctctgtgttgtttttctttttttacttataaacaccgttcccagcggctgagagaggatgagctatgttttgtcatcttcacttacactttagctcaaaaaaagtggtcaagtaggtaagctttaaagtcggccccaggaacgtgggaggaaagtatggtttccccttagcttgatttgtgcctgcatgagtgtatgtgagaggtggtgcgtgcgcatgtgtgcgtgcgtacaccctctcgcgcatgcatgtgtgcatggagttttaatgttgcctgttaaaaatctgaatacttcacgaaccaataaagatcaaaaaattacataaattcacaaatctgtgtatttgtgactctactagagtaaggagtaggtctttctgtctttctttctttcctttttttttttttttgtaacggagccaatacttaattaaaaccgctgacatcatggtgttataattaagcatggcattaattaagctggaataacgacttttttttttttattaagaactgcttctattgtataagaccgttatcagctaaaaaccaaataattttagagcaaaaattagctccctttaacctatccttttccaacttccccaaagtccaccctcaggactgttgtcagcaagtctctctctctttctctctctctctctctctctctctctctctctctctctctctctctctccnnnnnnnnnnnnnnnnnnnnnnnnnnnnnnnnnnnnnnnnnnnnnnnnnnnnnnnnnnnnnnnnnnnnnnnnnnnnnnnnnnnnnnnnnnnnnnnnnnnnnnnnnnnnnnnnnnnnnnnnnnnnnnnnnnnnnnnnnnnnnnnnnnnnnnnnnnnnnnnnnnnnnnnnnnnnnnnnnnnnnnnnnnnnnnnnnnnnnnnnnnnnnnnnnnnnnnnnnnnnnnnnnnnnnnnnnnnnnnnnnnnnnntaataattaatgacattccaacaaagaaaaatatgcaaatgaggactcattagcattttcatattcagctttgataatgcttttgctgacaaggttgtaattaatgaaaattcatgtcgcagtcaggagattggatcggtttcattccgttcacaattcccaaatgcttgcattatggaaaatcggcggctctgccaacttttcagggaagaaaaaaaaacacacacacacactaaaagcaccagatgcaaattaatggtagggagtctttttaactctttaaacaacccccctaaatttccatccgaggaaacacgtcggttggagtgttagcctaagagcaagttctttatgattattatttttttttaatgacagcaacgagagtgcttttatttgtggcccaagtatgagatattctaataaactttttttaacattaaaaaaaataaagccccatatgacccctccacctttttgtttctttccttttcccttttaagactatttaaatttacatagtaaaacacgtcaggacagccaagccggcgtgttctgttctgtcctcggctggcacagtgacaccacaacactttattcctccacatgattttggcgactctgcctcatgtattagtgctggtgcctccctctgcctgccgcccagaagcccagaagaaaagcaagtaccccgtttctctttagggtgggcttttgtttggtcttgttgtgcgtttagatacttgtttgcccacccacccacccccatgctctttactttctaacctgttccctttgcggtttagctagaggtttggagaacccgcccttcattctctctcagtcaaccattctggttaggttgtgcttcatgtgtcagtgtggagactcgttgcatcaaaatggattcccaggtcttccaaactgagatggtgacatactatacaatgtcctgactgtacaaccttccaaatgcggaatcttctattggcaaagagccatttactgtccgctcggtgccacgcttgccccggagcctagactagaaacagaaagtcctctgtggccctcaaggttgcagggtaatacttagtagctctggcattatttcgtattttctctttaggctaaaaaactaattattagcaaagcagatcttttggctcccccagagtttgtctttttaaaaaatgatttggataaggagttaggagaagaggtgaaaatgtatttttatagattgtaaaatttataagcattttcaatttgataggatacaacttccaggagttgctaaaacacagcttcctatttactgaaagctaaattgtaattcgtagagtcactacccccagtgtgaatatatgatataaagaagctcttctgagagggcgataggaactttgatatgtttgttgtctcctcttttctccgtaaaataggacatctcaccagttactcaataaggactttacagggactccttttccccggcttggcacttgggaatgggtcaggttttattccttcttaatctcctggtggccaggatcataatttcagtccactctgctttgttcgggctccggtctgtcacactttatccatgaatgcgtgtgcgcacgtgtgcatatctgcctacgtttggcaattttcatggctctgcccccttttactttaaaatctgttgtgttaaaatgggaggcagagcaaagcttcctcccatcccccccttagagcccctctctctctctctctcttttttttttcctgcaggcaaactgcccagccagatggcaaaatttcacctgtaagcaatccgaaaggagaggttaattctgctactttatggggcttttacattttcttctcccacactacatctaagttcagagtaactgctgaagacaacccccccaacttctccacccccagtacaaacatcatgctgtgattggctcttcctcctcaacccaaaatctgtatttggggggcacaatgaaaaaaaaaaacctgtggcctcaggcactttgctgttactgtccagagcacatctgatgcaatctttggccacttctgatgtgtgtaaacagggacgggatgggggagtgatggaggatggaacagcaggttcgtaggagctgagaagcaggtctttctcagttcacttgtgctgctttgatagcttcacccgtggctttctccgcccaccaagttcactagtgcatcccaactccgaccttcctaaatcccacccagcctgggtctggcaaccagaaccctgggttagctttttgttctcagtgtagttaactgagggagctggagagatgctgagacctggcttttcacctgttagcaaggaattttccccttgtttccaaacaagttctgaggatagtttttctttctctttctttttctttttctttttctttttctttttctttttctttttctttttctttttctttttctttttttctttttctttttctttttctcttcttttcttttctttttctcttctcttcttttctctcctcctcctcctcctcctnnnnnnnnnnnnnnnnnnnncctcctcctcctcttcttcttcttcttcttcttcttcttcttcttcttcttcttttttggtggagatttgaaggcaggggaatcatacttctgtgagattgtttccccctgtagtaattgtaaattataacagtgctgaaatgaccacgtatttctcagtgtgccacatcttggttttgttttgttttgtttcgttttttaccttgaaaactttgttttcaagaacagttatttccagagcgaaaggtgacccgagagaggccgctgctcttgtgtggcgctcccctgggacagcatcactgttccatgggtcccccttctgggctacctgttcagacctgagaccaaaggcatggctgctttccatcccctgccccatttgactcaggttaatatctttgggttttttcttctgcaagtgcctggatttctgctgtccagaagcaggccacacttactggagctactgaactctgaaatcggaagcctgtgggtgggtgatcagagtttcctagcttggaaggcatggcctcagtcagagcacattatagccccagaacagaggattcgaaagcagtcgttcacccgggcactggaagattttgattcaggtattgccaccacagcaacgtttgtttgtgggtggagacaccagggtgaccgccagtatcctccctcatccagctgcctcctctgtctcccttgcaaagtttcccttcgcttggggtctgtgcagtgatttcagggagtggaaatagttgggagaacatttgtgtatcaaagcagcctaaatatttgcaaaaaaaaaaaaatgtttgcttgaggaaaaaaaaaaaggttccactcaggatgaagaagcttaaacacctctaaagcatttgtgatttcttgaagtctgttattcatgagcaactttataacctgaatttaggcggagggtcaaagtggattccaaaatgttacaaatcttacatgatagtaaatgtttttttgctttatggtgtagatgtgaaggccatgctcacacgtgaaagaacacagaaatgtatttaagacataattggttgctaacaaatgtttcaaagaaaagatgaagaccacctgagatggtgtgacactgggtgacactgacccattcctccctgttccttccttccattttctctttccctgtgatgaattccaagcacattgctatgctatgatttcttactgtgaccatccataagctttttttaaaaattgtggtggtttgatggttagatcccccccccccagctctgaattgaatgtgtgcattttaatgagcaaagttttagctgcctcccacctatggtttgggagctggagaaagctttgtcgttgagggcagttttctgagcctgtgagcagtggagtggcggagtggctgacagtcagtgtaccgagaagccccttggatcaggtgttgttttaccatctggccattttaattagtaataaaaacgtaggtctagatgcacaggaaaagggtctgcagtacacaacggcccagtgccctgtactgacgctgagtctcgcacggcgacatcttacaagtgtgaagcagtgacactgtgtgcaattgtatctattcctcttagctttggattcaggcttcatttcccctttgcacggctatgtgcccaaaatgactatttttattaaatgataaacaatagtatacaatataaatacgctttcattcttaagcaatatgtatgcttcattaatagtcaaactttccttagtaatgcatggtgtgatctggctaaatacagtgtaggcatgagaagaaatcttgggccaaggatggcaggtgtgtgtgtgtgtgtgtgtgtgtgtgtgtgtgtgtgtgtgtgtgtattggtttttctatatcattcctgtgtgtagtgatgcaaatcagttaaccacctagacatttctttatgctgcacacattgaatgaatacttgtggtaacagttctgatacatatctattaatattataatgaaggtcatagggcacaattatgaaagtgatcaatattatatagagttgtaagaattgatggttgttataaaatacagattaccaactcattacccacttcctcgcttccataattcaatattgtctttgtgttaataagagaaatgcaaatacctacgtgcactgagttactatcagaccaccaaaaaggtgaccagagttttcaacagaaagtatggatcaattttcctaaagtatatgtgctcttagaatcaatgtgattcttaattaaggcagaagcgcgtacatttggtgaaatagtgaccctctggagagatggggagtgagcatagtttagggaaatgagtcttaacatgagtgtgatcttctcttaagcactgtgagtttcctgtttgcaaaccaccgtgaataccttaaacgttaatcagtcctgttgagaaccaacccattattactcacacacacacaaacacacacacacacacacacacacacacacacactcatgtgtgcacacacacatgcatacccacacgcatgcacatacacacatgcatgcatacgtatatatacacacacgttcacatactccatatattttgcttaaggatgtgtcacttggagaaagtgagggtgcagataaaattcccacgggggggtcacccgagtttgggtccttccttaaaaagcttttccagctttcgttgtggaatcatttcttccttgagaattccttgaaattaactaagagcgtctgctttctttatatggtagactgaggaagctgcctgccacgggacagtagctgtttaatccattttatcacaccttcctcagccgtaactcaatactaccctcgatgacagcattggcacatttcagatgacattgtccctaacaacaagcatgctcttcataggggctgcatagcattaatggtgagtggcttagattgctttcagacttgttcatgggacctagtgtgttgttctgtgtggtgacctttgagcagaggccgtccatgtgagtcatttggtggatgttcaagtaagccccaggagacatggagacatgcccattctgactgtggagctttgtaagattaatatatatattaatatatattaatatatatatatatatatatatatatatatatatatatatatatatagagagagagagagagagagagagagacttaaacatggaaattggttgcattttgtgctgtaccagactcatttacatgttccaacctcatgaccggtttcatttaaatagtctagcgaacagctagcgtctacttgttatttgtcttgaaactgaaatggttgaggccacaggcctgtaaggttttctgaaaccctaccctaacttttttccttctgatccccagaccatcggttgtcttttcaaagagactctcctttttcaaaggaactcaaatgaaaaaaaatttggggaggggggcaacatttacaatttgggggaaaaaaagtaattcaaactaaagtgtgtagccaaactccttaatggtgatgcatttgcccggctcttcccttccatcgtcgggcctgctctggtgccatatggcctaccatggaacatttaacttgtcagatataatggattgtcctggaagcagatttttgctttgagcactcggctcctttcttgcatctcactctctcggctccaggctgcgggatgaacgattgtggtggaggcgcaaagaagagacacacagttgattcccccgaagagagtgacctgcgtggcacagaattttacccatgtaaagaggcattatccccatcactggccttggcgggctgcacgtcggaatcagttaaatctgcctggacttaacagattgtgcaaacagttcggaatgagtgcttaggaataacaaaaaaaacctcgtcattttaacttatgcagaaatggaagagccgcatcggctaaagggcgcatatcatttgccaagacctacgtgtcaccgaagccacctggtctgtagacaccgtggactcggttcatctctcaagtctgcagagatttgatttagggggaaaaaaaggagtcacttgatggccatgtctcagggcttcactctttttgtttgagtagcagggtttaggttgaaatggccattggggtggacggacaaacagcagtgaattatccaacctcgcttccagtttgagacttatttggcaactgtccctttattgtaaccaatttgaaatcagaagccactcttcgtgcgggttatttaatctttttatctgcaaagaagaactatgtaggatttgacatttctttttattttgtactttcattttttttttcagaaagtgctgggtgagatgggtgggtgttctttacattttttaaaaaagactctcttaaataaacaaggcttgtcaattgatacagcattcatatagctgtgagcaccttttcgggaataactttgtaaacacacccccccccccccccagcaaataaaagatagaagcttaaagaagacagtttggcgctaactgatagaacacaaaacatagaaaacaatagggaacgtatgcatgtggatttagacaggaaacactatgtaccgggtggctggaaagccacaaagatgaatggatttgtatgcagcatatggatagagacacactaagagagatgctatttcaaagagtaacttaatataattcacacacacacacacacacacacacacacaaagtaaatgttgcatttacttctaaaaatacatgtattgtcgagttcctaatataggccgcgcaggcctattaaaaccacagtagccttggaaagtaacataagctcgcatatatgcaaagaaatctacctctttttttttttttttttacagaacggctctccttgagcagccaagacgcccttgttaaagttgctgttaaataataatgtacttgtgtctcttagtaatcctaaattgagattagttttgtgactagcttgctcgcccctctttcaaatttggtcaggttttaatgcttgaaataggtttggggagtgcctgcctagcccgaggctgctgtgttggggcatgtgcgccctctgctggccactctcgtaggaactgatttggaatgtagaattcttaatttcttaaattcttaaggtgttgaggtgttgttgggtttccatttcatttcaacttaaggcattaataaatattttttgcaactatgaagtcatttaagactgagtacggtcactaatttgttccttggcattgaaatgtgagttccagtttgggtgtagccttgccatcttgaaaggacttactgacagctcaaaggccacataaggtatgcgatgctcttagccatcctttacttgctgttcgcagcctgcttctgtctgcgatgagccctagtttgcctgagttgggaatagaatttcatgggggatgaaccctgaaagtcagactgtgttcacaaagtgagggtaacccctagaagagggctccctgccggggcacgcagtttccccttgcttctaggaaaatgagctcccgtttgcatcctgatgccttatgaaggcttttggggttttcctagaaatctgaaagccatgctcacctgcagccggtgagaatggtagtctgagtggaaccattcttagtttgctcggcttttcctattgttttaagacgcgtgggatgttaaaaggacagctcattcttggtcccactccacagtatgaaactgttcaaggacagctaagaagactctgcctcactgcattacatggtagacaaacccttgcgagagagaattcttccctgcaacgagagcaggagtctctataaagaaagtttctcttaaagcagtggggtctgttggctcactccattacattttctataataaattcatttgtgtaaatgattattatacatctctgagattgtgcgattgaatcagaattatggtagacgaaacttcagagtattgaattggggtgggggggatgcattgcaaatttcgccttatttgtaggaaattctcaaaccagttctctatacatggccccatggaagggcttagaccacgaagagacaacacagcctgtgagcgtctttttggtggtctgtcatcccagttttgggttccagggaccttttaacattagttttcaatacatcatatgagtgtcatttttagaatgttgttttcatgtatttgctattgccaaataactgttttctgatgtgcagtcctcattccaacctcaacacctctgttgaccggcaagtgtcctctcttttgtcactgtggtcttcaatgaggttttgctagtttttcttgctttgggccatactcttgtgacacatctcccttaagtgtagtgtcccagatactctcttgagagtgacatccatcacggaccctaccctccagcttctggcacatggtgtgcacaagggctctacaaaatatttccccattacacggttcagatttattccaaaaacattcagaggataatttttgccggctctagccctgaagattgctgtccgtaaacactgacatattttgtttcctgagtgctttggataagatgaagtcatgtttctggcgcctcccgtactctctgcatcatctccctgatcgtccattcctctcttcctctctctgccatcctgtgctcttgacttcctcccttgaccaagtttttctgtaaacaggacacttcccttacatatcacgttacaggaatagatgctttgtgctgttggatcttgcacctcaagttcggttggcggtagctagtgtcacatggtagctggccccttctatttgagagtgtggttattttctccatgttaatggtcttgaagaggacacagggtatcacccttcattaattctaatggctgcccatctttctgatctttcttcgctctatagataatctcaaatacattttgaattcagatgtttttctcaattcctcaacataatagagattgactgtgttccaatattaaaactagagagacaatcttcccagacattacagataaacagagaactggagctgaaaatgttcacatgtagatatgcctgcgtatgtatgaacagtagctatgtgtattgaacatattttcattatctaagttggaaatggaaacttaaaggagataaagtatagagatttaaagaataaaggtagagatgtgggcacacgtatgtcatgcgtatatgtcatgtgtgcactcttcagattctgttcatacataaatatttactatgctttaaaattacccaacatctatttctcttatatttgtagagccttgaagagcatattaaatatgagacttgggaaaagataatcataacaccaccccccacacacttttgagaaacattttcttagtctcgcctatgcttgctcaaacttgctatcctcttgcctcagtctcctaagagctaggctcaaaactaaagtttctttaatccacctttagttcactcagagttctggcgttttaattttgatgtttactgttttcattgttagaccttattgtttattgaacacaaaataacttatctggctaagtgattcatgcggtgaactgctacaaccaattatcttaaactttgctaataaagtctaagtaagtaaataaatacattcaaggcaacacagtccaatttatatgatatatatattttttaacatctcggcagaagtgtgacacatcttctcagaggagggacaaggatccaaatgctcatgtttagagagtttgggtagaggggcgtgtggggtctttaaagtcacacagccttgtcactttgtggagtcccatctgtgtctaaacatgacaccactctagggtcaagatggagagagggggtgattagggggcattgggccagaatctgatccagagcaacaaccttcacaaaaatccaggggtcctggggttgcagacacaattgcttattgagtgagtcgacttgatcttgtaaaataacttcctcacaaccaatgccctttggggatgggttcagtgaacttcaagttcccgcttgctgacagaattagcttgagttgtcattgtctcaagggccatggctacaacttgcttgtcctctgaaatgtggttcaaatatggtggatatgtcggcatctccatttcgttatctagcaggctgctgggtttgttggtgcctgcccactataacctgcagagctctgtgtacctgttaaattggtggtcataactagtgagattttattaaaatcgaaatcaaatgcaagactggggaggcggctcggtgagccaagggacacagtaacgtgagtataggagtccagagcctcagcacccggagagcctgacgagccaggactcacacgtaaccttggtgctgggggccaaggctcgcagttcctgcagcttgctgcccagccagcctaaccgatacagcaagctccggactcatcgagaaaaccaactcaaaaactgaggtagaaaaaagattgaagaagccattccaatggtagcctgggacctttactcaagcccgcataggacgtgcacctgaatatacaagtgtaccgggaccctgtacacacacacagacacacacacacacagacacacacacacagacacacacacacagacacacacacacacacacacacacacacacacacacaatattctgaaccttattccacctgccccaagaactagtttttaagaagggtcctcctcttgattgttaagaattcttagtcatagataaaatatttgaggaaatattgtttttcctcacacacatcccaagtctttttctacataagaatgtaacatttaaaataaaataaaataaaataaaaacatattttttagttttgcttccttttgatatatgtactgtaaaataatgctttccccattaaaacttcttaaaaattcattttatgtgtataggtgttttgcctacatatatgcccgtgtaccacatgtgcctggtacccacagaggtcatttgaatccaacggaactgaagtaatggctgccatgtgggttctgggaatcgtaccaaggtcctctggaaaagcagccagtgctgttatctgctgagccatctctctagctctcaacgtttctccatttttacttttatttttacttttaaaatttattttattttatatgtatgaatgttttgtgcgcatgtctgtctctgcgctgtttacatgcgggttccctcagaggtcagaagagagccttagatcccctgaaacgacagtaacagatggttctgagccaatgtgtgggtgctaggagttgaactcacatcctatgcaggaacatccagtggttttaaccactaggccatcttcctagcgctttctcctattgttcgacagaaatgatttcctaagaaatagaaagttaaaaaaaaaattcaaacacacaagctggttttttttttgttgttgatgttgttttttgtttttttgtaagaacctacaaatcccaaattgctatagttttatccattccttggagatgcaaagtgccataaaaatataaactagggcatgagggacatggagatgctatgcacagaaagccagtggtaacttactcattagaagtaagttaaaggcttctggggttgcccttcatcctcagggtctctaggggacccttgtacaaattgctgattcagaaaatcattacttggtggttcaagtggtcctttagtggccttaaggagttatttgacacacctccccaaacagctaagttagcccagtcattatgttgattaattgcacactctgtggaattagcgttattttcaatgaaagattttcctgcatttggaaaaataacacgtagaagtcacacgcgttagctcgcttaagccccgttgcaaggcagtggatgggaggatcagctggctggcctgttaccgtctggggtctgtgacataacccaaggtaccatttctcttctgcagtgagaaggtgcttcttgacgtatcagaggatgttcacttgaaatgtattcccatggatgcctttttatttattttttccttcccctaaccagggacctgagaactcttagattttttctaaactgagtgaaattatttgggaacctagctgtggccgtgtggagacagtgtcatctaggatagtcccaagagaggtggcatgctgtagacaaagctgcagtgaaggcttccgtcctgacctcgcctctcatacctgcatagcttcagtgccctttcttcatttccccaaccgcatctgtataaaatccagggcctggagtccatttactgaactcctagagcgcttctgttacatggtataggttaaaccagtttccatactgtttgagtacagcactttgccactctgtgttctttaaggagaatggactgtagatgctgaaccagaggctgttcccaaagcagagtttgggtagagcgtcaggcattgtgtttgttgggttttattgtacacagctctgaaggcagtaccttgcctgaaatagaacagtcgacgagaggttgtccagatctaccctctctgaaaggatcagacagcccattgctgagtacctttgtgccttaaggaacatcagctctgggagagatggctggctctcaattcccatcagcacgtcacctttctcctgtgtttgtttctgagggagggaaagacttccttggtacccagtgactggtctatactctgaaagtgggttacgattctttaagtgtggaattttaaatgcctccgagagacgatagggctgtcctggtgtatagtcacctgtattctcctatattctgcaggagaaatgagctctcatctctgagattttagacatctgattgacattgtctctttctgttttataagactcttgctctcacctgggtatggggtcagggataagtagagttgaccagccagttaaaactgtggaggggtactgatttccatgaaacatagaagcctactgagttatcaccaagtgaacagttgagataactgtatactaatttcaggaagatgaaaacctttaaaagatatgcctctatgacccgagtgatagaaaactatagatgtgccgtcactgcaagtgggcctggtatacttttcatcactgtaatccttataatttgtccggactcatattaacacacaaaacaaagatggatgcaggagcacatgttccagtcagtttactacacaccacagtaaacgacctacacagctcttctgcaaggcttctaagaacctttaagatataagttgagtctataaagggaaagatcatagatcgcttgagacattttctgtatccttccaatgaggttcccatttgatgtctcgggcccattgttggatcgctttcccatggaagacacttgagcgatgccgagataccctatgttataattatgtctttattctcattcttctctgcgtatttaatatacagttatactctccacacagagaatgtggataaacgctgttttctgccatgtttttgttaattacttgctttgagttaacatggagatggtggcagttaattgtgagacgtcacaggttctgtgtatgtcatttgtacagccgtaaagtatctagagaccctttaggaataaaacaccatgtaaatgtaaattatcgccgcctataagacactttcattaatttcatatcaaattcatgagtgttttgagctctgggacttcagagatttcagtgatggcctctggtttatttgtactttcttgtccaagactttaaagatcatcaacaaagcaggcacagctgccaggatttgaatcctggctccatctatagactggcatggcttcagtcatttttctgtgcctcagtttcctcgtctgttaaatggtgttcatgctgtctgcctcaccagttttgtgaagtttagtcagagcacacagtgcatagagccctctgggtagtgtggctcctgtagggtgagccctgagctcctctgacttaggtagggcgtgaagggagccattcggacgagagaggaatctacatattcaccatcatgtatttccatcacccccgtaacttctagccaccgttcagtggactaaccctctcactgtattaggaaagaaggagcagaggcgaacaggttaaagcacagagattggagttgggaccgagacagaaattgattctgagtcaagcaggtttaccctgagttccctagtctgatgctgtggaacaaaaggcccattcttcagttcccagaacgaggattagccgggaagaactagctgctatcatactaggggatccgatcatttttcatcaaggctttgaacaggaggcggtgttctatcttacaggtgctcctgtttcagtgtttttttttttttttttttttaaatcttccacctgggtatacatgttagagaatccctttacaaatcaggggctccacaccccaacatgacacaattatctcgctgactaaccgcccaaggatggatgtgctatgccccagcttacttctagaaaccctaaagaaaagttgcccgtatctgtctttggagctctccacctgtctttaaactctcttgtgagcccaggggcactgatccaccacaggtgactccccttgtgagtggaattggtcccggtgcccattttcattgtcatccattctcctcgtgacaggataccatgacatgttggaaggaaaggcagacccatccaatgacaaatcctagattatctaaagacctaatctgggtcctttagatagttgctaactgcagggtctccacattgcaacaacaataataacaacatttcctactgcttttgggaatatgatgttaagagattaccgtcagggtcagcaaaaacactggccctaaaaattgcacatggctgatattttctgctgagaattggttttcaggggcaacagaaggaaggaagtgaatcctttattgattgccatgtggtgcctttttttttttttttttttttagtaatcacatttaaatattgatttcagccataggctaggcttcctttggacaacacccacgttgacttccgggatcacttgctctctgtagacaccgacctgtcctagacaagagcctgcgtgttgatctcctttgtctccagggttgattgacgggtgtcgtgtctgctcatttacagcatccttcgtatttaattggtggcgggggtgggggggtgacattgtgacacagcattacatgttacttatgtacatgcaacactgctggagaagaggagttgtttagcatgtggacttagctctcagtcgctcccattcagccatctcaacaaccctcctcaggtcagaccatttgtttcttgcacagaaattgttaccagcagcaaaatttcacatttggtcttcctaggtttaaaagcgacccaaatgcctgataagatttgtccctcatttctatttcacaagcctctcccctccccaaccctccccccaatttatggccatataacaaatgtcactaacgggttcttttagtttttaaaatatggacaacggtactccgtgcagtaaaagacttgagcgattaatgctacccttatgcctcttttgagtagttttagccatggggcttggcaccgccaccgctgtctttgtgccaaaaaatatccgcagcggctgtcacattctagtactggacggttgtcttgaaaactccgcagtgagcgagcgtggcgggcgctgctcatcaccaatatctcccttcttcgatattggagcaatggaatcccgagctccttcaaagcatccgtcgtggtctccgggctgagggaggctggtaaataatggggagagaagggactgggctctctgtgccagccagttgatgtaagggacaaaatccatgggcagcatagaggagacacagatatttagggccctttgtgttcctgagcacacatagttacctaagggccgcactcagatatccttgcagtgagcttcaaagtttcattgtctcgaaaccaacaccccattgaatttggaacagaaaattcatatcaagttcatgcctaatttctaatgggcagctgacacagagtacatgattttcttccctcctgcaaactgaggtgacatttaaacatggctgctctttatcatttgaaatatgatataagtaaaaagatgtgatgttttcgaggtcccgaggctttgtccgcaatccccgattattttgcttccaaccagggttttgggctctgaggacagatttatagttgaattggggaacaaaaagctgcaataaagttaaaggcttacgctattacaatgaaatgtgctcgcccatgatctctgccgagatctatttgatggtaaaaaggggatgctacagatgaaaccttcacaaggaacataatccttgggaaaaaaaaaattagtccacctcccagcctcccgctggctgtgccgcctctttggtacctcgcagacttcgacagagtcctggacgggtgcccattgatgtcatggaaacactcaaattacgggagaatgattcgtgtctgtgctggtctcttatcctcccccacacaaacaggagtagatttttaaccctgacaacttgtaatttgcagtgggtttattttcgtatctggataaatattttttaacaagcaaaattaagattaagcagcctgtatctgatatgatagtaaagaacgctgggcctatgcagccaagagcgctttggggactctctgctgcatggattcatattttcctccgcctgtctctgggctccttccctcccttccgagcccattgctctctcttttttattcttcctgtctttcttctccataccctatttctcttttgctctctggttcttgcatttctcctttctatatgcattgtcctaatagaaggagcagccctggcttgtgtatgtgtagcaagacaaacgttggaagaaaaattgttctctccagttctgtgtgttacagagtacagaggagttctggaaataatagcaggtgctgtcattctttttgaaaaacaacaacaacaacaacaacaacaacaacagaacaagaaggggccatttttatctttagccatattttatattatagttcagtatttggaaattatccaatctggacattagattttcatattcctacaaggtcaaagcactttttttttcccctttaacttttctgtctgcctacctgtgtgtctgcccatgagatgatgaaaatgtgaatgttgtgtccaagtacataggtcactgtatccttgaagatttcttggttataagaacttaagggagggcatgggatgttgctttcctggttgtaacagttacagtgagcagttaaagggtaggggtagcttacatggcacaaatggttaggaatgtctgtgtggacacatgtatgggggcacagtcacgtacaatagagttcctgctgcctatctcctaagactggtgctctgtgtacaggctgtgtctcacttctggatattgatgctgatatgggcattgattttgcactttgcactgaacaacactatggccgagatacagttttcctaaatttgagttttgttaaaattcaggagaaaagctaacgtgggggtggaggtgggacagggccttaaggctcagaacttgttctctttgaaaaaccaccctccatccattgtgttattatagtgacatagacacagggctcactttacaccagagacacggtttctgaaagacaaattctgtgtgtgctgtcaagaaggtttaccctgatcacactgatgttgaagccaaagggaaaatgactgctgtccctttcagtgcttctactgagtgaagaagagaaattttggggtcgtaaactttaacaggaggttgcttcagctcctcaaacaagctttgaattttccctctgggataagagaagagtgtactgccatttataaagtacaatatacctcaaagctatagtcttgatgagagattgtccctcagccttagatagagtgaggttctgagcactggcctgtccccctagcctcttgtcattttgtatggtcagtgtcctagggcaacccttagaacaacatcaactggactcctgtatcccttttggaatgtgattttgattaaaatattaacaaagtagaaagtgcagccttgggttcacacacacacacacacacacacacacacacacacacagggctcacttacgggggagatcccctacctgtcctgaccagtctagagaaacatgtggagtgtggagttagaaatctggacaagacattcaaaagcatgatcctaggaaatgctcagtgtgcggggaatctgaacccggattctgaataggtaatttccccaaaccccctttcccaaggggggccccatcactgctgctggtaatggggatcactcctggggaaagggagtttttgaaagggaggagagagcggtggggggaagggtcttagaattttgaacagtttctttgcgagattcaccatctggagagcccatgattgattagctttggcctccctgttaagtgtcaatataatcaatgggaagtaccaggctagggtcattacatagatcatttgcctgctgtgtaaataaagatgaaatggtccaaattttgcgagagagagagaacgtgaaaaacaaggagtgacaatttgtttgttaagagaaagtggaggcctctggaatgacagtttttggaagtgtggagcagtttggctaagaataggaatgaaggatattttttttccagtttcttgtcgccagagtgaggaagcgccattccctgtcttgcttgcatacattgccagttgtggctcccctacgtatgtaaacatcggagctggggagtggatctctgttacctgcaggggaagtttgctttagaggaaaagcacgattcatcctgttctgttgtttctcttggcaggtaaaacagaaaggggctcatactcatcttatgggagagaaaacgttcagggttgccaccaggtaagtcccacattgggctggggacgaggtgagagggctaaccatggaaatgattgcctgccttgctttcagtggtgacactgaaggccagggagggttgagagtctcctgatggctgtctttaaggaatgaggcaaaccggagcttggaacaaacaaacatctcatttctagggctcggcggggtcaaagctgcatccattggctcctttttattcttttaaccatcacccagtaaccccgggtgctgtttgcaaaaccagccatatcagcgaacgagggtctatcaaaagagttttctgcagttgaagaacttaacaatttctcaccaaagaaatgctcagggggcagcctcatgtcagatgctgggttctgggtggcattgctctaaattatagttttcttcggggttagacggtgctgtgtgaaaagagggtgggaccgagggataaaaatgtctgcggaaatatgatttgttatccctttttgtttctggattgtttttggctggaagtcaaggccggcaggctaacagtaaagccatcgtcgcaggggaagcatgcatgagttagaggaagaggagagagcaccttaattaaataataaagtgcaagtgtgtgcgtgtgcgtgtgcgtgtgtgtgtgtgtgtgtgtgtacatgcgtgcatgtgttgcatgtcagtgccctctgtgtttgtgtactagtaactctagagaacccatttcggaaaatgctgtctgtagagaaaagagaaagccctaaatttttataaatatttttctttgaattttactctcattaccaatcataattaaaagacgtatcataaggtgtaccttaaaagagcaggaccagtttagtgctttccagagccctctctgagatttaaaaaaaaatgctctttaatattcaaagccttgtaccattttagtcctcacccagagatggcagacattcgtaggttttgtttttttttaattatttttatttttgcagaaaaagggctgcttcatcttctgagccttcttgcttttctagtttttttgaatgacgtgggggaaaaaaatccacttgggattgaaaaaaaaaaaagcaacctgtttattatatccttaaaacccatgtaagcccacatgtgcttcagtaactgggcggctactcatttctcatgaaggtagaattctggaggattggttctggacgggttttctttcccctccccgctgctgtatatatttgcattttaaaagttaactcctctggcccagttgccaattcagtcatactccagcatctaaaagatttgttgcgatgagcagcgcagctctgggttgagaactctcgcaggaggggcagcccatggcagtctgtgtggaaagaattctgcaggaaagaaacttacagccattccagtgcaacggaaacatctttggaatgtgagtgcacatgttcggggcagatagcctgggcaaccagcctgacagagctgggtctcgggtgtaaaagctctcgattcctgcagaaaagccggttcctgtgggtctggtttctgagggtcaaggcagaggtcgccagagttttggggagaagaaagttaacaacagcatccttcctctttgcagatggccgaggcacaggtctctagctttttttccgctggggcccttttgctggtcattgagagaataggcttcctagaccctgtatcctttcttactaataggcattggcatgattcctcacagacacagagatttcctctgctgagtaagccagaggtccctgaacttgggaaagcatcatccagaccttgggagtaaatgtgtgtacagagcgcagtcccttctccctccgtttttctttttttctttttgggaatacttccttcggtgaaactgaacttttttttgtttgtttgttttcaaacacaaggtgagagtggaatgggatgtggggggatttgaggtggttgcctggagtgtgtgaaggctaaaatgtcgggagcttgactagctgctattcaggaaaactctttttctatatcagggctgttgcttttcttgagaggccgtcagaatcttgctgggggagtgtggcgcagccttccttcttagttctgcttcaggcatgcgagtctttcgagcaatggctatctgtgcgctcagctaggtcttagctgcgtccacctagaaaccgtgtgatgctcaagggtatctcgagggaaatgctgagacttccctgcgtggggaaacagggcttgagggtgaggatgcgtacgcagtctggatttcagcgttctgtggaattcgagaaaagagcagagcagagtttgtctctcagggagtcggtttctctggagctgccttgttctttgaacccttgtctactacttgagctaaacaaaccccaaagaaagccagaatccccgcgtcttgtgctcggagtctaaatagcagatcacagctgaaatgattccccactgtggaacaaggtgagtgactgtctctcttgggaaggggagcttttgtttgctccgtttgccaactagtgagatgctggacagaaaacctttagatggagtaaccccaggagctgcaaaagctgccttttcatatgataacaatgtagcctgtgaacctaaagggatgagctgtgttctgtgggagcttgcctattctagtccggtggtgttttgctcttcctacacaaacagtggcagtaagcaacaggtagtgagtgaaccaatgttctggagacatacttatcatcttgagatatacaaaagcacaccactctagtacatagcattgattgtgtgtgtgtgtgtgtgtgtgtgtgtgtgtgtgtgtgtgtgtacacacccgtaagcaattgatgagtttctcttaaagattcagtgttaatagtattagacatagtttcctaaaaattgatattttagcaggaaaataaaaaaccacgaggttgtttattatcaatttgtttggattcattaaaaatgagaaataatgtaaataaacgcaccaatatacttttgtagttaccagaaatacatatattgactgttttttttttttttcaactttggaaactgtgtagacaaaggtggcttttcaaagctctctgacgaagtccagagaaactgatttacgttaaattggtgtacagaaatcacacaccccggctttaaactttcctgccaaattcctagcttcatattacttctactggcagagaaaataaaatttataatggaaagtttgacagaaacagaaatgagtgataacaaactttttcacctcttggtccaaccttaatcccgggagagccagctcggactcctaatgggtaaagtcataaccaacagaaaggggggtggggacagtcactcactcctggtgtccttttcttccccgtgttgaataagatgcttaacgatgtgcagactttaaaattttgtcaaattctactagttttgtatacaaggtgaggccaacagactctgtaaccttgagtgtgggtgcattcgttctgaatagaaattgggcaatagtgcctaggagaggggtgtgtgtgtgtgtgtgtgtgtgtgtgtgtgagagagagagagagagagagagagagagaaagtccagtcagtttaggattgtaggagtcctcctgagctgcttacagatcccccagtgactcactgtgcagccaagtttgaccctgtcagagaacgttctgcagaaaactgatacattttcaaaatgtggcactcctcctgaccttgatgaagcttttcaacttcttgccttaattagattgttcaaggcatggatctatattacatacgacctccgtttcaaaggccgtgaaaattagtgatatgttgaaatctgttggcatccctgtgctgggcaggcaaacatagagctccttccctgtcgtgaagtagttgaggcccacggtacactcagccatgctggtttcatttgaacagctactgacacaggactgccccggtagtttgagatgtgtagatattaaaactgatggaatggactaaaatttatatttagttaacctaggagactcaaatttcagaagcttgaaagctgtggaggaaaccagtcatttctttgtgtaacttagtttgtaattccttaaaactgaacatgactctgaaatgaattatttaagaatggagttttttttcctaattatatgattgggggtgatgtaaaaacattacaaccgatgtgatcgtaaaagttggattttttaaaaaattttttccctcttcctaaactgaaaatagaaaaaaaaatagagataagttgaaaagatacagatctcttttgctgtgtcctgaaaatggctccttagatcctgtggagcagacgcccacattgctttcgagtgggatgtagtgtttgaatgcgtgttcttggttctgcctggatcatctggatcactccgcggagtggctcctaagtaggctactgtcctatccggcggccctctgctttctctttgtgacatttctgctaatttggcattatttacgttcattgaatactggctaccacgggggctccagagactcctggagagcaaaggcctcctctgatttatccctgcttgtgtatcctgtgcctggcaggttagaaccagaaggcttcaaggttgtttgctcagagtcgctgttggcaaacactcggggtgggggttggcggggtagatatgaagtttgaacagcacttcttgtgacccgtgtagtgggcatctttttctgtgcctataatagttagggaatggtatgcggccttccgaaatgttaacacagatcctgtcattttctggagagacactgcaaggttctctgggctaacatcaacctgtgcttcgttgacttattgatggattattattattattatttaatttctgccgtttcttctgcatggatagctgacattcctctgtcgggaaggtgactgggagggttttgtttctggtgggaacgtcactggaaccaaagatcaaaatcctgatgtgatcatttggctatgccagagtgaacaagtggactagggtgtttgtaacccggatggctttggacatctcggggtctgagttggacgtcatgactgtcgctgaacagggaggattaggcagcctattcatctggggcgtcctaataggtgtaatccacttccaaaagatacccaagtctcatcaaagtcggagaaggagtcttttctttcattgtgcttctcagaatctattgctgaccttttagggatgagttgggtgccaaggaaaaagggaaggaaaacccctccccccactgacttcctcctgttgggtgttgaggagggttcaaggactcctgctctcttccatattcttctatgaatatatccatgcatgtatgatgtaatatctaccacctacctacctgtcggctccatgtctgctgtttttctgtctgttcaccatctacccatctattgatatttgcctagaattgtgtcaaactcccaggcaggcccactggtctcccctcattaacgtgagctaacgaggagtactgacatgcctttggtttttattttgcatctcacatagtgaatgtttttttgagaacccagaaaatacaaaactaataaaatgaagtaccatatatccacatcagaaatagttgttaatattgattattttttttgtgaacataatacctgcactataatttttagaaaaccgtttttaaggaccagagctaagatttcttctctagatctttcaggatgcatctcttcaaattagggcaactgtcttgtcctaactcggatattattacacctcctaaagaagttattgattgtttcttcctcctgagttcatattcaagttgcttcagtcatctccatgaaaatgtgcccaggagctttgtaaaaagtgctgcattgatacagacatttggtttgggtgcctctctatcatctctttcagattggagcaatccctctttttattgttccttcggctgatcgttgcctcaagacgaccagtgtgcttgccttatagactatcccctttcctagagatgtgggcttgttcccatgtgatgatgcccaaatcggttcctcacttgtttgtctgcacactgaaaatcacatctagaccttcgctgagattcaggccgggtgtagtcctgggatgacggggagtgcgtcacggtcatcccaccagcaccctggagtcatagcagtgctcaccggatcatctagttaacctgacacgttctagaccagtttgttataaagaaagctttcctgtcttgtaaagagaccctttgatagtagctaattatccgtttcctccacaagctattcactgagtggttttagcatgtgttgatgaaacctgcccgaatcactggatttcaatcgagatttattttaatgaatcaattcaccattgtgtctgtggtgaatgaacctgtatctggaccagtgtcctgacttataggtaccgtgtggaggccagagggcgacttctgccaccttcctccatctccctctgtgttttggagagactgtctcttgctaaccctggagcctactgtttttgttaggctaactggccagtgagctcccaagagctgcctgtctccacattctccatcactggggttaccagtgtgttctgccataccctgttgtgagtgtgtgtgtggagtatgtataatgtgtagtgtgtaatgtgtgggaatagtgtgtgtgtaatatatgtgtatctgtagtatgtatagtatgtagtatgtgtgtatagtatgtataatgtgtagtgtgtgtgcgcatagtgtgtgtgtggtgtgtgtgtgtgtctgtagtatgtatagtatgtagtgtgtgtgtgtgtatagtgtgtatagtgtgtgttgtgtgtggtgtgagggatacacactcgggctctcatgcttgagtagccagccctttgcctattgaacagtcatcccctgcactcatcccgatgagacctcacagtctacctgtctgactgacaatcctccttacggaagagctctctttcattgattttgtttgttttaatgtcactacatttaatgttccctgataataatggtgtaaggtcaatggcccatagtttaaatatgctccttatcagtgggttattgcctctagtaaagcatccttctgacctcctatagtctattgataagagaaacagttctggcccaggagctgatcagaaaaaccctacctacaggaggcaggagtaaccagaagtacacatctttgcaagagaaaccccagtatttattttttagctgaaatttgggccttcaaatacaaatctctgtttctgtaactgtaagatcagccttgctttataagccctctcgtttttccaaagtcttgtcttgcttttccattactgggggtttagttactactaaatgcccccagagttgactgccaatgactgacccacccactcttgtgggttgctgccatattctaggctctgctctgaagaaccagcaagatagagagagtaacccccacctggatcaatccagatgtggttgaaaaattaagtcaaactgtacatttctgaaaggttgtttaggtccagactgaaggaatgctgggaactaacattaggtgctgatatcaacctctgaggtgactgttaatcactcccattcagtggtctaggtaatagaacccaaggaaatgaaacgggaagattccgagtcactctaagtgtcagagacaggtttctcactctaatgtgtctggcttcaaaaacagaatccttgttccctgccattccaggctatgactgggactctaagttccatggtctgcattagctcttatctaggaaatatgcctcactgtgggtttcatggtccctacaaagtctccattagcacagtgctcaaaataaaacaaaacaaaccttcgctcagatcttttcagattggctgtgtagtttatcctgccattcctgactgccctgcattgaaaaaaatatattgtatgaataatctatttagtaacatcctcagacttcgcatgtgcaatttcctcacaatcaacaaggatttcctgtgaaaaaggctagggtaggatatgccaattcacatcttagcaacagcacagcacttcctgtaaatgtacagattctctgttggccttggttttcagaacgaggggctggcagactgagctttgccatgacgcatttggagtcacagaaaaatcgcgttattgttcccaaaacactagaacggtgtaaggtaaaattcctagacaacagctttagcgggctctacaatagggtcctagtagttttcagacaatgacatttggcctacttgtgcagggtattcaataacaggatgccagttaaggatatagggcagtcttacacagttcaggatgggcacatacacaaagccatcaaatgtggtttgagatgatgtacgactaccaaagaagtagacatcctgtatccagattgtaaattcatgacgattttggataacttctttttttcttatgtaaagcattgggagtttttgaaaattattagaaattgggacgataattgctcattttatattctattgtgtatagagagaggaaaatcagctaatattataatattgatataattctgctgtgtgcccaagaacattccacactgacatatatcttatagaaatgacaaatttaggatcaagataaccttcaaacgtgatgtagctcagatgtatattctcgtgtctaaactcaggtagaacaccaatccataatcaaggaaatgtttacttaagatccttaaagtgaaattgaagactaaagtgtccgcaatgccaaaagatacggaataaaccctgtcagctgaaagaaattctccagaaagctattgaatttgccgtggggccttatctcagtaacgtgcctcggattgacacgctcttcctgtggacctttcttccttcatttctcacttgtctgccgggtggttccctggcctcactcatcaatacactaaaggaatgttctacagtacacccctctgctcacagtgagctggggatgatgtattggaagtagatcatggtggcacagaagcccagcagaaagtgctgtttggctgtattcacttccatgttgctgttatgcaaatactgtttttgtggtccccccccccccccccaatgccagagcatggctgacttgtgtcagactgtccttgtatttaataaagggagaagtcacattttggtgggactgagactttaggctggcacttcaccagatctcctgaaatgggatctgttatcagtcatggtatcaagcgaaactcccctggagccaggctttctactgccctcttgattcaaaagactccttttagtaaaaaaaaggatttttgtgacttgaataaaatctatcctcttatttggagcccaccacaaagccctgcttatgtgtgtttgggacaacagcgagtcaatgctgcagtataagggaggggtgatggcaggaatacgctccaccagtgaccatcccccgagtgctataggcagcggtctttgtgtggtagtgtttgactgtgcatgtatgcaaaataatccaagctgatttgtaccaccataatgaacagcaggccactgaatcttttcagttttattggtattgtatacagtaagttattaaattccatccctgtaatacacctgcagtaaaagaaccaagcattgctgtacttgaagaacacggtgtgtgtgtggtacaaggcccatccctgccttacacccccaacagctgcttttcagattgcaggatccattgtatatattcccttgagcccacctctaataatcgagacacatctgccatagcagtattataggcatatgtagttttattgaaaactatacctgtaaaaaattaaataactcctacctcaattaaattggcaaggtaccttttgtaaagatcatattgcagaaccccagagaccccgggagttcatcgtacacttatattacaaatcaccaagcatgttatttttatttagtggaatagctggtatttctcaggcttcgatgatgaggtactttgatcacttcttgcttttttttctaactttccttctcactgcaacatataaaccaacactaatcacaaacatggaatatgaagaaaatatcgggaattttcctgctatgcatacaggatgaacaaggggatgagagaagcccgccatgcccctctttgagtgaccatttgagtaaacataaaggttattcaccaggaccctgcttgtcactcaccttagggagtggctgagactgctccctaaccttcctaacgaggccaccctttaataggtgtattaacaccctttaacaccttgtattatggtgacccccaaccataaaatcagttcctatgctacctcataactgtacttttgtttttgttttttgttgtttttatttgtttgttggtttgtttttcttttgtgtgagacagtatttctctttgttgccttggctgtcttggaattcactttgaaggccaggctggccttgaactcaaagaaatctgcccgcctctgctgagattaaaggtgtgtgccaccactgcccgtcttgtcaggaatcttgatgtgaatttttgtgtttttctatggtgacctacatggaaaaggccattggacactaaaaggggtcgtgacccacaggttgagaaccactggctcacatacttccttgagacctgtgaggtcttcatcacagagcagggtgatcaatgggtcagtggtcacatcaaacatatgctggtagattcagtctctcattaacacttccactttgtggagtatagaggggaccaatatttctttgtttttgttttttgagacagggttcctctgtgtagccctggctgtcctagaactcactctatagaccagactggcctcgaactcagaaatccacctgcctctgcctcccaagtgctggggttaaaggcatgctccaccactgcccggctgaccaataatttttatacaaaagaggaacattttgtgacattttccttcatcagtgtggctgctggtaggttcttcatgcctaggtgaatagccaccaccccagtatccatagaggcagaactaattagggtaaaaaatgaaaataagaaagggtacagtgttgtgagggaactctgactcaaggacttagggaagtggtagaggagaagcgaccgaggtctacacgtgataaagatgcatagcatgcagacattatactttcaaagaataataaaccaaccaaacaagctatattcagccgtgtgattggtagtctgtgctactgtcattagagagtagagtctataccttgctttggtatcgagtttcataaagcttttctaactgtctaagagaagtctagactattttagagtaaattttgatgagttattgtgatataaaatagtaaaacaaaaccaaagttttaaaataatagtgattaaaatacctatggctcacttaatgtatgtgaaccgcctatctaggtctttgtgtcagcgggtattgccaatattatggtgagttaattaaaaagaaagtttaatcaagaaggaagtttataaatgagtctcaaattatcatagaaaacagaatgcaaaggcaatatacaaattatacagaaaatgtcaagatgggtaaacaagttatgccttacagttttttagcaaaacctttctgtattactccagatgattgtaagggaacgggctgctcaagggggtggtatattctttctccaaggagagcataggctcaggggatagattcttctaggccgtcggaaagtgaatgcttcctaagagcactatggcagaggtcagaaaaatcaaatattgataagcatccctggctaaacacagttgcacatttaaatcatttccccccccagtagtaagattacttaaaatcagtcttcatttggttccgcttgggattacccgctaccatgagatttttttaggcaaatcttcattctattaggatattttctgccctgttcatggttccctcccaggaatacagaattctgtggaataaaagagggctattgcttgcagttaacacctagagcttccaagtgtgagattccaagttcaagatttaagtgtcacgaagaagtccccaccccacatagtgaaaatgcattatgaattctaaacaagctttttaaacataattgatatgctatgtgggcagtatgtcttaaatcagatcccagcatattttgaagcactaaacactgagtattctacccatggctgagatgtcctcctataaaaatgtctattaccagttcttttgagctgtgaagtctgccctgctaagcactgtagctcagaactgtcatgtgcaggcagagtgtgtggggtgacatcactggtgctaaagatttgctatggacagtgacacgtggcaaagtagaatgtcagcagctgccacccttatgagatggtccctcaaggagttttggcatcattgccctttaactgtcttagccaacaaggaagtgatatagatctgttctttcaggcttctctaccagataccatgtaagctttgtctgactttgttttcaagacaagagacttggatctattttgacaatggaatcaatatagccatcaggaggaagttctatatgttaaggaagaattattctattatttatttctagagaactcgtgttagattttagcaggtaacatatacttattctagttcttgaactcgagactcttggcttcattacaaaggagattttcatctcaaggtgtcctagctactctctaaaaatccatagtttgcttcttagaagcgaatggatgtcaaggttggtggctccttgtcacttgatgaaaatgattttatgtttgctatagatggtcacaggcatactctaataatgacgaccacataaagaatccagctgtcaatcagaactttctggaacattcaacaattagatgcttcagtaaacttccatgtttcaattcttccattatgaatatatagggttatatgttgtatgtacaatttagtcactcactatggtgctctaatgctcagagattttcaaattaatgttgataccttgatctggatctctttttataaagggaaggtaaaatttggaaccttcaggcatattagcagaaaagtagctaattcactaaaggcattaaatttgaattccactggtatgttttgccttggaactcatccatttgtgtccattggcagtcactgacaagcttcaaccccaccatcccctgtgacttcttgatccccttcacctacaaaagcccttagttcctcatcaagtcatttttgctcccaagataccagagactctgctgttcctctgcatccgcagtcttcactgctgtgtccctgtggctgccctgctctcctctcctctcccctcccctcccctcagcatgtcctttcccattgccactggaaccttggctttgctcagttggcttcagagtcctacctctagtggatgggacaggctattggtcaactagatcctttctcaccttccagcctcttcatatgccttgctacctgtcaagctctactgaaccaacctgcttcatgctctgatattctctctctctctctccctctccctctccctctccccccgccctctgtctacctggataattttcatcttatctttctctgttctcacccaacatctctttcatcagatagtttaaatcctctcttcaaatttctacttggccatggttttctcagaacatttgatgttagaaccttgctagaataaggtgctatgctgctgtgttttgtttcctaaaagccattccactgtccagccagaggccagcaaagccaactctcaccatctctgtttcagcacttaaaatatagagtggatggatttgtaaacagtcctgagccaacagtagtagtaactgcacacaagtgcccgtgccatattgaaatacttatattaattatatcactaaccctttaaagtaagaactgtcttttatctcattactgattcaagaaccaagactttgcgaagcgttcaccattaatactaatgagagatgggactggtcagtctgggttctagattagctgtggcctctgtcacttctttagccgtggataaagttgggagaattttcgaagatgccatctcatagaggtcccagctctccttttcctgaccacttggaagcatccttgggcacattcatcatcctgggacttctctctgccactaacgagacagagcgtcccttctaaggaggttctgaagctcaggatagccacagttggtgcctagaacaaaaagagttttggcagctttcccatgtttctcataggcacaaatcgaaataacagtgcacatttccccagctgtaccccctcattgctactgactccctgttaacccctgggagctgtgaggaggaccagagccccggagagagggccacagccctctggaaggtagaaaaggccttgaggcagaagggatgctggctaaaacttgtctcccaggctatgtgccttgtgtttttccttgttccattttgcttgacagaagacggagaacaaagaagaaatggatgagttgaatagatcgagatttgcctctcagtgtttcttcatgattatgatttcaaagtagggcatgaagaaactgataacaaatttagcccttttttttgaaaattttattttgaagttcttgaatatagaatgttagtcagaaaagacctacatagcctaaacccattttgtagtaagtgagatatgaagctcagaaatgttagatttgcctagcaacagacaagagagcttgcccatactgaccatagaagaccatattctaatagcatcatctgtaagcttttcctaaacggcttggctttctttcttctaagagtcaagggccacctaggctaagaagtcatggccagtgtcagctggaaatgcagcctgaagaaatttctagatgagtgtccctttgttcagctaccactgaattgctctgtcacagagccagagggtgtcgtttgcttgtaaatactgagtttttgaaatgtcactgtaacactggaaaaatgttgtctcagaaggttgccaaagtgacagaatcccgacattgtaaataccagccaacacaagtgctcataaatgacaggaataaaatatacttgactaaatccataacaatcgctgataaccctgtttacccccagtgaccaggagctgggaacttggataaaaagcacatgtgtgcagctatcactaatgtgtcggagcctcgagccattccaggaaggctccctaaatatgtaaaagctttataataactaagaagcaatgtgtgagataggatgtcagcaagccctcagaggagctggctagagccctggcagtcttcagcaccctagggggctgataagggctccattgttcagctcagaaccaaaatgtaagccaggctgggcgggcgggtttagtgaactattttcaatccatgtaattcatagactatcccttacaagccagcactttcctgtgctgtacacagcaagggtggagataaaagtggcaggattcagtgcaacccacacttagacttgttagggttgggcgcgtagccagaccttcctaaggtctagacacatagccagaccttcccacagccctgtgacttctgacccaggccttttcttgaccataattcctcccttctagaagggattgcttccttgctttttctgctacagagataaagtggcatttggaagtcaaaccagcactgccttttagcctctatgatggacccactcttactgctcaagtggagcacccctcaaatgaccatctgcccagaaagcctcaagaaatggtggatctgaatggcatggggttcagctcccctggccctcaaattaatgagtacaagatcaagtcactagggccatggaaatgcctcccaccccaaggcacccatcgttccctaggctatacaggaagaactgtagctgcctggagcaagctcttcaacttttctataggcacggaatccttgtttctcaacggattcttgtattttttgagcttcttggttaagagttgcttttataactaaaattaagcagtactaagtactagaaataggcctgatgagaatgtgtgtgtgtgtgtgtgtgtgtatgtgagtgtgtatgtgtacttactaatatttttgaatcagtttcatgtagcctaggctagcctgaactcatgatagtctgcctttacatcttgagttctggaattacatgtatgcatcactagatcaaactccaataacatttgagcaaaatgttgtgtgatggttatatgccttggctatttatggctagggaagaatctacagggcacagtgatgttttgatccagcattagctgggtcggaagcgaggattttaagactgtgtgatgtttcaattcttcagtgttcgccatgggagtgaggagatgggcagggcttaggagaaaacagtagtgttgtaagaccttagtagctccgctgatgggcctgtatcctggtaacagggcccttcagccttacagcatcaccatgggaattccctggctagggacccagtgtgtctctcctggtacctggtagttggcaggaggcagaggaggtgctggattggctgatggttgtaggtgttggtatgggggatgacagccagtctcaggctctttcccgacactgcacttgtgagcctgaatagcctctctgattttgctcagagaaaggcaggctttgtcctccagtcatatgttggctggcagtcgccatgtgtactttctgaagcctgggcagcaaggcatgatggtcagactccccttgccctccatggccttgacctcatagacattcttttgtttagactcccaaactgtaagcagacagaagtgtgtttaactgcgtctccacttctccttccttgggttttctaccgattctttttttttttttcccttctcttctgcttatttacaacccaaaggggagaggatacaggatattttgttgacattgtaaaaacatgcaggctggccttgcacgagctgcttagcaaatgatggccttgaacttccaatcctcctatctccattgcactgatgctgggattgcaggcatgtgccctcatatcaagtcgaatatagggtgttcttggaatgtacaagatgactgctaaagaaagcaagtatacagtttcaggattccatatttcttctctgcagctccctgggcttcttctcttgttttctgcttcaccccaccccaaaccagcagtgtttaaaacttctgaaacctcaaagctgcagctgctcaaccaggaagtatcccgaaagtgccccctggtggcaagaataggaaaaagcaagactggggggagggggagtgaggcagcatgtgactttggatctgattttccagtaacatctctagctgtctctagctcataaatcacccttcagtgtcaacgtgaagcggttttgaatggatgactgtgtcactgatagtccccatttgcagcttattttgctatagaagattctccctcctgttctcctccttctgatctgagatttgtttctagcaatatcccattggccttggcctttctaacagtactaatgcactgctgagagaggagagggcagggagggagcccgtgtagaagcgcaggcgtactagaaacccgtgcatattgtcacctcctgtgttggcattgagtacagggaggggctgtgatttcatggcatgacaactagccaaacactcgtcacctttgtcactgctcattggactaccaagtgtgagcacaccatctgattgacagctgtcctttgtcagaaggccatctttttcccttttcagtttgactgaatccagctgacatctgcagagctctcgaagctctgacaggagggccctgcctgccagcccgccggctcaaaggcagagagtcagagacaacctcagaaagggatattaactcactgaccattttcaagtgggatatactggcaaagagaacaggtgcaatagcaggtccctcttttgaagataactagaggtccattttgatagagggagacacatatcccatatcaggatgaatcacaggcactgagagtacagtttccccagaagtctccggtcagaagcatatctgttgatctggatcatcaaagtaccgcaatgggttggggagttcagggtgaagccagtgtcgtatgggggcactgcacagatgcagggcaggaacatgtcattagcagcatgtttgagaatctaactgacagatccaacttggataataatgatacagatcatgtatgtgcctttggggagttcatttttgttgttgttgctgttgtgttgttgctgttgttgttcccatccagaatactgtcctttaggggagacggtcccttgtctctctgcagacttggatttcagaggatgccttataaacgtggagaaacataaccctcctccttaggacactgtcctatgaaccagagacctcagtctggattttgtgatagaaaagtaattgaaagtattgtagagatctcaacgctgtaatttaaattttgaaatttctctttgctgtagcatttttgaaggaattcagcatctgcccaggtttgttcagtgtagaggagctggctgggtctgggttgagtcccatgagccttaggttgcagttatttcctacactgggaaatgagtcagtaccttctttaagcataacaggaggtgaatattttattgttttcaatacaaggtatattggttttgttccatttttgcttcacagagttctgattacatatttacaatttaacaaaatttggccacggaaccaacacgaaaagtctgagatttgcttgaattttgtaattcaaatgttacatagacacgctcttgtttggggctaagtcagagagcaagacaacgtttaaactacacgagacaggaaaggtggtggcttctaggcttctgtgtacgatcggaggacaatgtttagacccagttggctcctagaatgggttcagctaagattcacacatggcctgatttaaaatgcacttttttaaaggctacatttttttttgtccttaaaaagaaggtttagctgggccactgttctagtttgctttccattgccatgataaacacatgaccaaaaataactcggggaggaaagggtttgtctgggtgacaccccctgaccacagtccatcagtgtggggggtggacaggacaggaactcaaagggaaacagaaccaggaacaatagatgactgctgatcagagactcgctctcccagccttccataacccactttctcatacagtccaggatgacctgcccaatgagtggccccacccacagtgggcggggcctcttctcccatccattcttacttaaccaagacaaggcaccatagacatgcacacaggccagtttgatagtggtggtttctcagttgaggttgcctcttcccaggtgagtctagtttgtgccaactgaacaaagcgtaaccaggacaaagacttatgggatccccgttagctccaagaattgtgagcatctaatagatcctgaagaccaagggtagcttttagccacgatacccatgatacactcccagaataccacacaagagacggaaattctgttctttaaaggaataataaatacagaaaaacccgagagcaatgcatttaatctatgatatttttttcttaacttcttgtagtataaataatgaatgtcttcctttccttcagtgtttaatggctatggtcagagtggagagagctggttggactaagtagggtatggaattcagtggttagcgttgctcttggcagatagctttgtcttgggtattggaaaagccaggtgccaaagctggtttgtggccatattcacttgattctgaaggctggcctttgcctttcagcaccttggaaatttataacgtgccagcttaactggcagcttttcttgtcttggtgaaaaccagttaaagatgactttacattcagtgctcccttgcatttgacaaagtgcaattctgacattagaaaataatatcctattgtctatctgaatatatactgtactgagaaaagaccagtgaaccccttactgggggctcacttcagtcgtgagtggctgtttcaatcacggtgacagatccaaattttgccaggtagacaatgctcacacagcttgcccttgcagaatgctcattggaggacagaggcatgccgatgtggtgtgagagtaatgttctgatgctgaggctgtgagtttcactgccagccttgtatcatctgtctcaggagaattatttgggtcccacctcatcagaaatgccagatagctcctttcaaagatgatcaaggccttcgccgctttttgaatgggaactctcctcaccaaatccactattagtcagccatgtcaaggagtcatttggagtagacagtttctttccccgttgttttagagttggctcacagttgaagatcatctctgtcaactttacatctcaagtacgaacaggccgaggtggactaggtaggtcctggctgccaggtttactctgggtccagttcatactgatgcccatttttaacatccttacctatgaacgccacgtgtcatagagaagtagttgaaaaataataaaaatagggttaagcataaagcgccttgtcagccccttagtgcagtctccaagctgcacacgcgcacatggaggtaggcacagggttggcctcctttgcagtgttcctgaatgaactttatgctttcctcacgccccactgtccagtttctcgggagctggccttgcccctcctggtttataatggaccacaggttatggtatagtgataacactagatacttgctttttcctggttaagcctgtgaagaatgctaagcagtaagttcacaggttgcaggtcgcaccaataccgggctgaccataaaccctgtctgcccaggtactggtacggatgctaaatgatgctggagccctttccccagacccatcttatcactttgacaaagcaagttttgattttactggtatctttaaaacaagacagactaagactataaaacatgctttcatcataaaaaattaattattaaatattgatgaaatatttttaagtttaagtaccgatttgtcagcatactgtcctttgtttaaaggataggtgaagagatggtaggcctgtaagaaatgatcgtctgcttcaggctgttgaatgctggacttagaagtgtgtgtcacagagctggagagatggcttagtgttggggagcactggctgctactccagaggatctgggttcaatttctaatacccacatggcagtttgtaactgtctctaactgcaagtctatggaatctgataccctcacaccaaatgcacaaaaataatattaaataagttatcttttaaaaggcaaaaaaaaatgtgtgtcactgtactcagtcacaaagttttatttttcaccttctgttttggtgctaagagtcacatctagaacctcacatggactaagtgctcattcagtcactgctgagctaacaacactcttcaaaagcagataatagcgatttctgcgtactgtgtgtggagacaggcttgcatatgccagttaagccacaattctctctgtccaccccacatctgtatagaaatgaggcaaaaagtatgtcctgggcagaggagatagatgcggcctttcaggtccttctctgcatcaccaagtgaagctcacggccacgaaaaagtgacacacaccttttgagccccagtcttgttgatattagtggctctcctttatgtataagattatgcaaagattaaatcttttaaccatggcgaacactttacccaaatagtagtgctaacaagccgatgtggtggctctcctccttaaccccaggactcatgaggcagaggcagacagatctctctgagttcaaagccagcctggtttacagagtgactccaggacagccaggactcagagaaaccctgtctcaaaaaaaaaaaaatcaaaacaacaaaataatactgttaacatcttctcaagtaacgatatatctttcttttgggaaagttttgggcaaatattaaagatatcatgtctgaaagacacaggagtatgttaagcaatgaagtatatccaataagctttggccattactgtaaaatcaatggctggggagctgggttgaaacacgtctttgggtttaggtggactgccgtgggctctaactgaatagtgcactgttgggaaacctatagagtgatcatgtgttcttagtaaaacttttcattttggttcagctcataactctttgtaacattaatttgtttctgaacagtcaggctgagaatgtgggcttccttggtttttgaagtctccaaagcctgttttcatattaaaagaaaaatatgaaaagaatatagcatattaaaagaaaacatattaaaagcaacacatctctcttaatacattaaatgaaagccacactgtcacgttaatatatattaataaaaagttagtttgccttttttttttaataaggtataataaaaggaagaagcaaaatagctctcctggaactcctaagtggctaatggttgccagggttgggcaccctgccgcaaagtcccggtgtaagtgtcgtaaaatagtatccaatacatacgggcttgtcctgggttaaattaatagaagcactaactgacttgcttttatggctatccagtatcacacagaaaatgaagtttctccttaaaagggcatcgttgggtcctcccctctggacagttttaacaggtggggcttgaagacttttcctggggcacaaacagaggttttgaggtctctctaggctccatgaaaactttatgtagcatgcttaagtagctgtttgtatgaggtaaatggaagccccgcccccttaccacctttgtttcttctaaactcaaacagaacaggggattaacttctcaccagcatctctctctacactgccatattgtcagtctcaccaaatgagtaggatcctatggatcaatcaaactattgtgggaagtcaaaccattaggaaggatggatgagaaggtggatgagatctcgtaagagctggtctgtggccaactctgaaaacacatgactttctatttcataggtttctaatgcctacagcttggtgccagcccttctctatgtaagcctcctctagacaacttacccatgactttaatagaaagctagaacatataaatccctgccaagattatcctcaaagaagtactgatcatgagatggacatttgaacatctgatttctctagtgtctataataaaattaggtttagtgttttcatggggaagcctacacgctgtgttttaggttaaaaggcattgtgagatcctggaaggtatcttgttcactattatttccatttctgtttttaattagttagctgatgaacaaaaagtctctctttctctcttcctgtgtgttgtttttgttgctatcacagcacagaactttctagcttctggggtttgcttatttgtttgagattttctagggggaaattactgatggtatagccacaggtagtatatttccacgctttttgaatattacatttctgaggcactgcagtacacgagagcgctggaatggatatcatgtctgccttctgctggctcaggaacttccgcacaatgattcatccttaacttgtttcctgttgttgcttctagtagattgggacaacttccctaccgtcatctcttctcaggatgaattggtgtgttcgaactgaatctgtatctttctatgaaatgtccaatttacagccttatagtcatctacacaaaattatgcatattgctcacttatattaaagattcccagttctatgtctaaaatttttatagagttatcttttaaatactgttgatgcatttcaactctttttggctctttctttctcttacactagccacagttgtatatgttttgtatgggcttttaaaagaaactttgatattattgataatctatgtgtgttcaagttcttttggatgtcctattcttcatatttatccttagtacattgatcctttctttagcttttcatattgcaagtctagttcttttaattttatttttacatatactaatatatgtagcatacatatgtgtgcatgtatgtatttggctgtgtacatatggaagttagggggaagcctgcatgtgggagctccctctctttccccatatgggttcagggagtgcaacttgggttatcagtccttttactgactgagccatctcttccacccttctctagtctcctaaatattattcttaaatgtctttgtaacccaagagttattaaaagactttaatattttcacttgtaataaaatgtttgtcatagtagtagtgcagctatagttttgcttttcatatttgatcatatttctggtggggaaatgacatagaactttcctcccaggagagatttagttaatttcccttgtggtttaatgcattcatgattttagagaacattatacatatatagctgaaaagcgtgcaaaatccatttaccctatttgaagcaatgtcttacctattgcctgtcagttgggtttgactttctgagaggaattcctgtggatctattagtctgccatatacttgcatctgtttatttgttttgagacagggtctcactctacagccttggctgacctggaacacactgtatagaccaggctggcctctgcttctaataaaagtacctgtttattacatatatctcaaagatatgtcataaattcttataaggttatgaaagcaaaataaattgtggctgggcagtggtggtgcatacctttaatcccagcactcggaggtagaggtgagtggatctctatgaattcaaggccagcctggtctacaaagtgagttctagggcagccagggctgttaaacctgtgtgtgtgtgtgtgtgtgtgtgtgtatgtgtgtgtgtgtgtgtgtgtgtgtgtgtgtgtgagagagagagagagagagagagagagagagagagagagagagagagagagcgcaaaaacaaagcaaagaatgtgaaggagttacattttatcatgaatgtaagacattttcttctttcattccttttgccttgaattggctttcaacttaatcatttttttttctttttgttgactttattttatacatgtttcttacctttcgttttcacattttctgtctgttgatcttgatggtcagtcctatacagcactctgctttcccttctcatgacctggctcgttgtgaacgctgccctgacttgagaataaacagacaaaatgagcatatgctatggacagccatgaaaatctagcggatttaccacatgagatttcacacttcccaagtttggtctgaattccttcttttcccttggcttgattacatttcctttgtttcatattttgctgacttaaatttttttcttttgtttgattggcatggcaatgacatattcttcgtgaagattattcttatgtttaactgatgaaatgacaattatccacttctactaagtacagaattgaatagtttctatgtcattcctgagcaaggtaacaaattttagcatacttataaagcttatttaaacattgaatcacatctatctatctatctatctatcctctgtgtgtgtgtctgtgtctgtctgtctgtctgttatctatattgaagtgtgttaggttgtacaatgtggggttgtcagttttctttttggtttcctgataacaaactcaggtgagcatggtcaaggcaagcatctttagtgctgagccgtctctgcatgttccatggcacactttgtgatacccagtctccctgtgtccctttccccgtggtgctaacatcagtatttcattcttgatatttaaaatgcacgaacaatcacctagaccctggactccatagtttccttgtcctgtaattcaaagttttgtgtatggtgcctttctttgggcagggaatagcataaccttcatttctgagttttatatccttatgtaattcagaaatgtgagggtatacatttttaaaattctctctctttttattctccttctaaattgcatttgtttgaccaccactttgaatgttctctggctccgtgtaaaatctgagcgccaaagccatagccttcccctctaccttcttctgccctggcttacccatcagttcctctgtacactgtatcagatctccttgattattgactctgccacgtcagctccatgaatcttttcagccaggaatggtgacatggctgaattcggctcttttttccccctcatcatcttttaacataactcatgaatcacgtttaaccctgtagcattgttgcacctatgatacctcttagaaactttatagtgcagtgaaggttgtatgtatgtgtcttctatattctcaccctttttacataataccacttgtggtgtctacacatgagattgccaaggctaagaggagtgaatgttcaagaactcccagctctctagtttcctatttccaccaggaggcaaacctctgttttagtgatttttttttctttagttgccttgttgtgaatattttaatctgtcctttcaaaatctttcttgctttcagaatttcctttccctacagagtcctcatgtcaaaaccaaagaaggtgcgactgacaagatgccttcctgaggagggtttcaggaacaggaaatggccagggttgaactgaaataaaattctctcaaaacatcaaccacaacagaagagctgggctcccatacaggaggaaatgaatactgtctttttatgtagtttataaatttggtatcaatatagcttgaaccagggcagggaatatcccaatgtcaatttgaagcacaggtcattggaaaacaaactcctccgttcaaatccatcacattacgaagcatttcaaatcatttgtaaacactcttggtttcactagaaattcttgcgcccttccttctgtctgtgttcaatatgtcctgacttttcaactggcctttagtgagcagtctgtatgactcatgtaactttgatctggttcttctgagaattgtaagactttttttttttaaatctgtggatgagcctgtctcctatgtgtgtgtgtgtacacatgtgcattcacatatgtgtgtgcatgttttgggtgtcatttctcaggagccttctaccttattttgctgagacaaagccttccattgtggtcaggggctggctgactagcaaggccacagatccacttgtgtctccacccctcagagctggggtcgacaaggacacatcatcacaccgggatttgtgcttgggtgctgaggacagagtgcaggtccacatgctagcatggcaagcaggctccctatacccatcccccctatcttttcccatcagctctctgacttctaaatattcccttcagggacaatgcttcagttggaatggctggttttgcactggatacttagtaagcaagcccatgaaagctagttttggttttgtggcttgattgctcatcctaatgtagttctggggttgtgggggaggtcagcatgtgctcgcatggatgagtgtcctcttgagtcatggggcaccctgcttggcaagctctttctcctctgtgaagggtcggtaggatgagacatgagctcaggggaggaggcagcagctctgctttgatccattgcaggatgtgtgctagacctttgatgttcactttttaattgcgagctaaaagcacacagctcttttctacagattgacaagctgatgtttgagccgtagccaaataacccagtttagtgagcggctgagttttgactttcataaacatttaatgaatacatttttatttatgtcagtttaaaaaaaaatccagctgctgtttgcaaccccccccccccaccaccaccaccaatttttttacgctaatgccaaaattagagtatttctggatttctggatttcctggggagcacctgcacaggtgggaaattggcataaactaaaagggaggactcgctgcttccctgtgtgcgtgtggggcatgcgtgctgttttaggaggaacccaccatgtcaccttctctcaagactcagccatctctgcctttggatttcagaggaaggagcattgtggtacaggagcaatggggctttctgtgatggagccccagatcagcggggacttctagttccttccctgaccatctgtttgacctttagtctacagtgtctggagactttgcctttctgccaatttgtaaaattctattctatagggagtggaacggaatataaatcttgggggactctgaacttcacagccagtattgaacatgtgctctgagctttaataccttcttcagtctgaaaatgagcagaacttgcttcatagatatgtttgtctccaaatatttttatttggaaggtttcaaatacaaaaaaaaaaaaaaaaaaaaaatcagtgttaatgtgtaaaaccatgtctccatccttcagtttcaacagatgacaacatttgctccgtcttcctcagcatcatcctacccacttgatgttttttcaagtgttttaaaggagattgtaggcagcatatcattttatgtataaacacatagtgtctctgactatagatactataaataaatagcatctctaacaaataatctaccccattgcttaacacatccatagtgccatagccaaagctggcaaggctctcagggattcttcctgagtaccccagaactttctccagctgcctgacaaatgtcttttgtctctgggcacagtggctttcacctgttaacccatcttgtgagagtaagaggattatgaggtcaaggttggtctaagctacacagtcacagaaaaacaaaacaaatatcccaaactaaaacaaagcagcaacaggaaaggaatggcgtttgtcccgtggagcatttggacggttgcccttgggctttgcctctctttgatctttggaaagtccacaacctacctcctttaatattaaggctaggataatttccttgtgtcttgtctgactttgtggatttgactgattgatttctgttctggtttgctcttctcttactttgataaataccgacgaacaccaacttggggaggaaagggaatatttccatcttacaggttcattccatcgttgcgggagacccaggcagacttttgagaccatggacgagtgcagcttactggcttgctctccccagttcgctcagcttcttttctcgtactacccagggctagctgcccaggagtggcacccacgtgaactgggctctcctctattaatctttaatcaagaaaatgccccacagacatagtcaaaggcagatctgatgggggcaatttcctcaaccgagattccctcttccaaggtaattttgggtcaagttggccccctaacaccctccccccaaaaaaagaagggaagaaaatctaagtagcgcctccttcccttccttaatttatttttataagtgagtgtagctggcctttgctacttggtgggttctttgttctgcccttttattccagcctccccactacatttcacccctatcactagataggagagaaagaaggatagaggggaaagagagatctgtggacctaatttcttttatcttgtttccttctcttgttttttctttgaggtctaacaaacgtcaaccaatcccagtgaatgtccaccaaccctgcctttcagaatcctagcctttctctaccttctgaaaagttcccagaattccaaacctcacacaatcacagaaactgtctgcagccgactaaaccatgcctctgttagagcacgaggcaaaccatagtcagctaaaacagccccatatctcagacacctgggattaaaatgaaaaaaatattcttagaatatttcttttttctttctttctttctttttttttttttttttttaatttaagaaagccaaaattccagaattgtcactacaaacgacttcccactcacggtacttctgtagctttagctgcccatgggctgttgatttctcagtccttcgtttcctgagttctgggaatagagtgttattgaccagtcctgccctcactctctacctccatcccttccaccctcccctgtctgtagctttgcatctatgtccagctacaaacagtatctgagttctaattttcaagatgcctagattgttctgtgagtttctctgccgtctatccctccattgtagacacttcctgtcatctctcgcttagattgcttccccggaggttgtaagactcacagagtaatttaataatgctctgccctataaataggtatgagtatgtcatgcctcttacaggcgcttctagtttttctttgtattttacaagtagccttcttgaacatgtaaggtactcagatctaccctgtctcccaagaagaggtgagtgattaaacttcactgacatatttatcttgcatatccatgaatctgcacagggagctaggcccagaacccaatcctgagcttactaaagaaatgactgcttgtgaggcctgctcctaaggacaggaggagagcagagcttccaccagacaataggagcctggatcttgattgcaccatgcagggcttcctgacgcactatcacttcctcaactccttcacccagtattggcaatccaggtaaagaaatagtggcaagtgtatgtgagttagccgaaggaaaaagggtagcaaggtttgtgtgagctcagttagagcctgtctaatagtaaacaaacctacacacacacacacacacacacacacacacacacacacacacacagacacacactgtgtgtgtgcaagatggtttgcccctggttgctttgacagtttcagagctgcagactggaaatttatagggaaccttggtttcaaatgcggagtgaactttgcccggcacagcgttcagtgggttctggtggaggtgggtgtctgcctcatgtcatatgaatgaaatgcagatggttgacccattttgcctttgagtgtctagatcttccttcaggaagcatgaaacagctagtgagatggctcagcgggtaagagcacccgaccactcttttgaaggtcctgagttcaaatcccagcaaccacatggtggctcacaaccatccataaggagatctaactccctcttctggagtgtctgaagacagctacagtgtgcttacatataataagaagcgggaaacattatctatctaagtagctctaaaatccaaatacctaagcgtaaaaagataggattagtaatcttgagaacgaagattctctagcaaaccaacaaggccaacgtcaaggccggccggctctgtctgtgtgggagacctaggcttccataaataaacacacaagttcaaatctgtgcagttatcttgagcgagtcatgaggagtgttctgtagatatctaggtgtgtgcacatttcaaaataatcaaaagatcgttattgtgatgtccctcaatgcaggagaaggagttttatatgtggccatatcattctgaatgtgcctgatctcttctgatgtcagaaactgagtagctctgggctggcttagcatttcggggggaggggggaggaactttcatagagcacactgccttccttagaatcattggaccatagttattcagaatttcagaagtacatatattttgagaggttaatgtgacacatgcaaacagtatgtactgggcacttccccccccagcagagttttaggcagtatctaagaattaaatagatgttatttccacagctaatcttgtgactagtcatacgtcataagataaaaggcaaacaagcatgctttcctattgggtcatgtgtaatcacaaaactacaagcagttacctgagctccaaggatctcagaagtaaggcagcgagactgtggaccttctggttaacgaatgaacatatactcaacttaaaaaataataaataaccaaatatcacaaacagcttttaagtccatcacataaattccatttatttgaccaaagagaatgaggaaatacagagtttacatctgaaacggccttgacctatcagagcctgggtaagttgaaagatagacagtttcccaagaggtttactattacgcaggaaggaagattcccctttgcctgtgtgttctgccattgtggtcccaaaccaccctcatcccacagcctggaggatacttacccagtgcaattgtagacgatgtccaaatatggtaggtgtagccattaaggaagtgagctaccacagaaagggcacccaaacgtggacatctctatgtatatctgttagttctagcccttaatgtgccccaaatattgtaaatgaggacagaatccattgatggaaaacaaatgtaaacattttgctcttgtgtttcaaaatgagtctagaaggtggagcccgggaacacagacttgtaatcttatctacctgagagtcagaggcaggaggactgcaggttcaatggctgcctgggatcacagagctcagggctagcctgggaaaatgacattctatctcaaaatgcagaagcttgaagtgcgtcattaaagtagagtgcttgccttgcacgcacaagccctgggttctgcaaaggaaataaatagtcaagtagtgtgtcctggtgtgtgcaggcatgtgtgcctgtgtgtgtgcacggatgtctagctaaccattaatatttccgatgcacgtcaggaaacttttagagtctgcattcttccaccgtcgtctcctttcccgtgttttaagttcatctggctttgctttcggtctgaactgaggcactctgaggtggcagcttaagttctatgcaagcccttttctggggaatgttttgtgtgaaaagttccaagtgtttgtttctttgaaaaattgataccccaaattctttctgccctttggaagtgtgtgttccacaggatcgtttcgtggattttgctcaactggcgtgcgaactagttcatcaagtcactcccacatgctcaatatctaaatatatttataatgaggtgttatgtgaacaggcaataaaaatatacctgtcctacatcctcagggagagagagaaaacatttatatgtgcaaatgctctacagctcctccaagaactcttaaaactcgtgtcttattctaactttgtaaagtttctggttgttggttgtttttgtatcacctttctcatcactctaagggctgctcagaaggttgtgcgcagaaggttgtgctgggtaaacggcacaacaggttggagtttcttcactaagcaattcttccatggagccagcgagttctttgtggagttttcatagggaggtcgctgggactcagaaccggagagtgaaatgcatggctgcgaattgttcacactgaagcttgctgctggtgatggagagtgaagtgaggagaagggaaggctcctgagcctatgatttaaagatgagcgggaggtaattgttgaaaatttcagatgcgatattaccaggagcggcatgaatccaagaggcgtaattaccgtcagcaaaatgacacaatttggttgttcattggtttttcaaatagttttcaagtaatcttgggtgggtagttaacttccttctaccccaggccacctcatctgtaaagtgggattagtaagattcccctcaaggcgtctcgaaaattaagtgggttactctagccaacagagcttgagctacagtgagttctgtgtggatatttgctgctcaccgcaggactggcatcgttgatagagtggcatgttcgttactgagaagtctccctacatctgtctgaaatcccaaggctctgtgataagggaatggtgctagggcccaggggaggacaagtgacttaagggtcccgagaaaaaaaatttccaaggaggtgatgtttgactctcgtctccacagtttatttaacatagagtagaaagaccggtcctttgaggagactcaaggactcaactcttgtaaagctaagctgaagaagtggggattaaggccggtggttgggaaaatacagactcattgtgctgaggccaccttaaggaatggccatcacctgagtgttctgtttactcgtggcccacgacagcagcgggcacatagcaaaggctgagtgtagctggccgactgtaaagggaaatctggaagatgcattaggagtaaactggcctagggaatgcagtgaggttgaaagtttgtgagctcagaagggttttgtacttgaggaaatggactcagctttgagtttcagaggcctttttttttttgtgggatgtttcagcactctaggaagggcccatgtggtctgaagagaacaagatgcctttacctcacatgaagaaatgcttcagaactttgtctcaggtttccatggtgatcccatttgtttccaaagtctgctctagccatttctctggcttcacttctctctaagccaacttgatttcagtagtcgataaagtagaacccaaagcctaggtatctaagatattagagcaacccaaggagagccatttctttgctagccacctcaaattctcccagactgtttcctatgctgtgttcctcagaggaaccattctctttaaaagatgccacgagtcaggtgtgctggctcattcccttaatctcagtgtttaggcagcagaggcaagatgatttctgtgagttcaaggctggccagggctgtgtaaagagactgtctcagaatgtgacaaaggaagccttctcaagcactgcttctccgtgctgtctgtagtcctctctctctggtggtctgttctgctgtaggaatccagcaaggtgatgcctacatttcccctgctaccaggttctttctcgagaacctggcccttttattgtaaccagtggactatccaacaactacatacctgtttcaggaactgtatccattttcattatatgaatcgtgtaagaaaataaaggccaataaccataggagggatttggtaacgcacacaactaatttcttcatgcacattaccaattctgattcttcgcctcttcttaggtggactggattgataaccagaaaacaggggcaggttttgcagaaaatattccatgagacctttgtccatcaggaaccatatttgcttttgagtgaagctcatctgatgtgggaggagaagaattttaggatgataccacaagtggatgtttagggactgtgtgtccactggcatgggatagagaatatgttcataacaataacagctgaaatcctgtaagcgcactccctggctaattagttaacttaatcagttgacattcacttttggcacacaatgtaccaggacccactgtgccagatgccaaggtcacagagacaagggagctcactttctgccttgagggaccacacagtctgtagtgagaaatcacagacgacaagtttctaagctttcccccagcatctcagtaattctcaccgtgggtgtgatcgtactatcatgtcccagacgaacctcacacccactatgatttcatatccaggttacctggggcttggtaccgttcacttgtagccctgatggatgctgctgtattagatgatccctctgcaggaagacgagaggtacttcctaagtagtggaagttcatagctccaactagtgatgagggacttggggcagaaagaacacagaaatagggcataaagggcaagcataagtgtcggtttcaagtcaaacaggcctcagtgctcgctagccatgtggaatagcactctaaatgtccccatctgtacattggaggctacagtatcggccacgttactatccaaaggatctgtatttgtctctggctgtggttagtattattagcagcaataccagtaggaatgagcaaaggaacagatttgtgctcgctttctctctctctctctctctctctctctctctctctcacacacacacacacacacacacacacacacacacacacacacctggagttgacccacgaaacagttattcacttactttagtgtttatagccctgcctctccttgctgtctgtgtttcccctctcctgtggtctgttctgctgtaggtctctatgttaggcactatagggagtcaatcattgaataacttaagtaatttcctattctgacatgtatatcacgccccacatttctttctgatcacccacacatgcaggaaagaggggatgtttggtagcaaagagttaatgcacatagagtgagaggttgtgtgtagttttggaagggcagttattcagaagaaagggtttcgggatgatttgaagacttcattaggcatttgctattgtgctggatagtcccaatttccccgtggagtagaatgatctcatcaccctctacacaggtggggatcttattgctgctctacaataggggcagcttgcagattggccatgagactagaatagagccccctgccaaggttcaggaaggagatcttatcccatgtaccccattccccgagaggctagtgccataagaatggattttctatatccttgcccagagaggcaaacattttttacaataaccttggatttgaattctccccatccagtatgccaaagattgacatgtgacagactgacagtcttttattttacttaagtagcaacgtggtcaagtgaggttttcagcatgtctattagagccatgtctttataggactggtggtggtcaagtgagggtttcagcatgtctattagagccatgtctttataggactggtggtggtcaagtgagggtttcagcatgtctattagagccatgtctttacaggactggtggtggtcaagtgagggtttcagcatgtctattagagccatgtctttacaggactggtggtggtcaagtgagggtttcagcatgtctattagagccatgtttttataggactggtggtggtcaagtgagggtttcagcgtgtctattagagccatgtctttacaggatggtggtggtcaagtaaggttttcagcgtgtctattagagccatgtctttacaggactggtgctaattcctttgtatgcttccatgtcatggcagtgtccctgttttactttggtacactagtgctagtgaagagcagttcaaggcaaatactgcttgtactgctctttggtggttttatataaagttataaagtaaatgaacttcctgacccaacctgagagttttaatggacaagaaagtagttttgttaatttctgcatgctctacataggaattttcaagtcatatttttattctaaattactggttgttttggtaattttttttcctcccaacaaccaaattaatcctctttttaatatgtattacatggcccccgcttccaggatgtatttttaccaaacactcagtttagtatatacaataaataatgggttgttgttgttgttctttcattagagaaataatcaaataggtggatgtatatatctcatcaatccctgtgcagttgtaatttccattaaaaaatgcatggatttttacttcactattacctcatgatacattaagttacagttaccatagcaacctttgtatggcattataacatttaaatataaggtgttttgtttctttacaaggaaagacaatgtagtcgaatttcgaaatgtttggtgaaatctaatctgctaaaatgagtaatttgttcaaggttacttggattctttgggaattatgcaaatgcccaaccaaaaacccagaagtttgtttgtttgtttatatcatgttagaagaagaaaaaggaagaagaaaagagtatccaatacgcagccaggaaaagcccacaactgggcatttgaaaagggagaggataagattgggcccagggaggtcactgaagtgtgtgatgggcactggctctactggacattttacatatgggggacatttctagtcctaataactctgataagccacttactagtccgtcttacagaggaggtgagggtacttgtactcagtcagtctctatgcctctgagctcctgttctgtgccaaactctctggtccttttttcatactgtgcttgagtcaatcatcgtccctccctccctccctcctctcttccctctctcctgcttttcctccttccttcctcttcccttccttcatttattatatatagtaagggttgagcctgttgccttgcatagtctagggaactgctctaccaccgagctatatcaccagctcttttttatttattttatttttattttgattttgagacaggatcttgctaagtcacccttgctggccttggagcccctacccgccccaactttcacaacccttttatctcagcctcccaaatacctgagacaacacgactgcctcactaggcctagcttgggttttatttctgatttcctatgagacacaatgtgcagcatacatttaatatagtttatttcttgggatgtctagaatttcttacaagaaactacttgcaaaggtataacctccataatttgtattttttctctaccacccagcagccgtctcagcctggggttatctctgccatcccatctttccttttttttttttttttttcctttttcaagttttcttttgctgaaaccaagcccaggacaaacatcaaagttagcggcctcaacagtgtctttctgcaccttcagggatcagggataaaggctgtccaaggtctgaccttcagccgtgagctttgaagttcgaaagtggacaggtggaattactgtgttcttcattgcccttcggtgcaagatatattctagttgccgagtaagtgcgaacagcagcaaaattatggccccctcctgctactaagtaagtcagcaatggcccttctgtggtcaaaatggcaaattcagcagcggctattcgatagggatttgcaaaaacttccccatggctgttaggaatcttgttcagcagttgtctttgaaaacctaattctgtgcagaattaagccgggtagataaaacctcagctgcgatcaatgttttaaatacatctactttgtaatttctctccacgtctattttgtacccaatgctcgcaaagtctattaggtacctatctggatatccaacattcataagtttgatagccgtgctgaatttgatttccatattccgataacaaacccaagcctgtatggagtcagctcgccatacaaagccaccatacatcacttgggcctgtgatgaaagaatagactcgcagctgtgtgagtgctagaatacccaaacacgaattagactcgcgcgcacttggcaaaagttcagaaaaggggcttaatctggtttcatctgagcctgcttctctctgtgctccggtagcctcccccaagatgttgtgtctgatatcagatcacaacgtaatgggaatgacgcaaaagcagagaacgcctgaaaatgaggggcacatttttccctcagaggtctcttaaccccccaccccacccctctgttggctttcccaggtcccacctctgaaattcaaggccattcccctattagataaattaatcatatgccccaaaccagtgtgcatagctctctgatctcactcatctctataattaagggtaaatataatcttcctttttagaaatgaatcacccacccattacacttaaagtgctgactgaaatggattaatattttgaagcaagatgattttagtttaagggggggggggagttgataatttaagcttggaacagttatttctatttttgattaccattcagttataaatctaatttgagatataggccgcttctgtttcccaagcttaattcgtggtttacatccttcgctgcctaggcactgcttggtagttggtcaaggaatgaaggcagtgagctcccagtacgtggaataagggcggggctctgctgatgctagggtgagtctgcaagttcacaatgctatgaaaggaacaaccatttgattgactcgaccctcccagaatcctgacttccatgtatgaatggctatgtgaggcatggctctttgctggtgtgtggggtctccaaacctttactcttactgaacaaagtgagtacgttctattctttggtatgtattctaaggcttgaaactgtttctcgttggaccggaagaaggggaacggcttgtcccctcacatgtaaacagttaagcaggcttacaagtatgcctttaagttgtacgggttgcctgtatgaggcaccttatgtcacttccagtgtttccaggctgactggaggagctaagtactgtggacccaaaagaaccgtagaacacaaagtggcccagtgttaaagaacaaaaaccaaaagccaaaatcggacaaaccaaagcaaccaaccaaccaaccaaacaggaccctagaacttttctaatcttatttcaggcaaggatgtgtttgcccattttgagagtaggcagctttgaaacttaacttccatgaaacctaagtttgattttcaaagctctacatacttggaggcaattttacaaacagatgaatgccttatcttttatgtgtactttttatttaatttgccccaatcacatgtcattgactcttaaacattcatgtacccaagtgtttcatttcagcaatggaaatgatttttaatctctctcactgccacagagggttaggcgtctgacataaagaccaaacaatagtaaatagccattgttcattttacaagtaaacgctacaatgagagcacatatatttttatcttcgttttccccgtgggggtgattagggccctttaagtttgaggaaatgtttgcttttgtttctttagaagaatgttccattgtccaagtggaaaagccaaggacacaaacagatcgaaaagaaagaagcaggagtgtgctttggtgggggggggggggctgggtggggagggtgagactgccaggagtccttagtgggaagtgttctgtggcttttggtcctgggacccacatagctcatgtggctgcatagacaaattggatgctgctttgcttgactggtgcacaggaagactttctttgaaatccacaacaaggaggtcagccacaggcagttagctgggctatgattatctttctttcacagctctattgtgaatgctactaaaacccgggtcagctctctcatttgttttttatatttgcctactatataaatgtctttttctgggactgaaacctttactaccaggaccaacaggaatcaacccatggctagacccagggaaaagaaaagttaacatttgggaatatttaatcaaccctttctggaggattttatatattttgggggtggggtggagagaaaaagggagaaataatagtaatgatggccaatacagtgccagcactattggcagataccaagctagtctgacttcataggctgtgaatgaggtaacttcacagtagatcctttgcctagaatgcaggaggctcagcatactggaaaatagtcaataacaacaatatattattgtcttcaaactcctttcctaataaaatgaagactcagttgtagatttaccaatttatggagaggcagtgacttcataccattcacactttaatcagtggagattttgaaaaaaaaaaatcttggattaatgtacaaataaatgtagattttggtcaataagaatttctcaagtggaatttcaggttgagattctcaatatttgaatacctaaaatgatttttaaaacgtttgaggttggacctctaaacccccaatccctggaaaagttggtcgtattgtgtgtggtgctttagcttgcccatgttaatatttctgcatcttcgagagaggcaatagctgagtgtgctcattttagatttttttatctggcaaatgacccaattttcatccttagtcgctgacaccaaaatgctagcagagaactgataactggctactcagaaatatgttttcactcctagaatctcttcttcagtctttcttttccttttttttttctttctttctttttttttttttttttgaaagtgatgtttattgtgtatccctgaacatgttgtaagcttgaagcagcaaagataggcatgccaatggctgattatcctgttacatagtgttcaccaatagcacagaaaccccaccatggtcagctctctgtataatatttatctatatagtggtagctaggagagctttgaacttttatttcccagcttatgggtcatatttgaccaactgcttgcactggaagacatgccactttgttgagctatttaggaatcaaaaagactgtcttaatttaaaacaaggaccctttgttttaggtggtgactgccttgtgaaatttttcagttctcagcgggttaaccagggaacaggggcagagtcataattggcctatttagagtattttgcatgtgaatagtgtgttagtgaagcatccctaagtctgttgtgagtgacatggtgattagaatttagattagggaaaacacgttctgtactttatcaaggacagtaattagttcagtcagtaaaagttgattacaagtaacgataaagttagatttttagtacttaattttaaaatttctttattaaatagcaaatttgtccttaatataaatggtactatctacacttgttttattgcctatcagaataatttaaagaacaatgtgtccaatgcagagtataatcaggcggtttgtgtattgtgggtaagttcctatgtagcttttaggaaatgcaatattatgtaatctgtcttatgtcatcatttttcaaaagcttagcaatttttcacaccgtgacaacttgatgatgttgtgggaatgttctagtgttcaggtaaacgttgactccgcaggggatttgtttcagtttctggtagtcttcaggagagcttcccggattttttcccccgtttgtagagaatccctccttttgctatcacattgaaagtttgccctgggatttgaatttcttctgcactcatctggcattctgtgctctgcgcgagccttgtaaagtcctcggtggtcaggatgtgtcccataggaagtggactgcccacactgtcgcccagtgtgtgcagctgggaacaccgtatgtgttcaaaaaatgagattcaggttggtcctgtcaaaacacaggtctgaatagttcccagaccggagcctaagtatggagaaggaagacatccatcttagagaaatgacgctttcttatgaaatgaaagtttgtttgttttttttttcttaatcatctaaaatgctttttaaaaatagatttggtttaagggggtaccatctaccttctttaaagtaaagagttgagaaaacccagtttgatggtagcttctccggagctttagcctttttggcagttgttttcttaattgtcttggctcagcaaatgctggtttctgtattgctctgctcacaatcaggtgcgaggtggtaaatgcaaaaaattttaaggcctatgtttgttttcttttgcttttctccttctagcagagtctcctcggaggggacatggatatgggcaatccaggaaccctttcgcccaccaaacctggctcccagtactatcagtattcaagcaataatgcccgccggaggcctcttcacagtagtgccatgggtaaggtcctcttctgtttgaatgcatggagtctttattaagttcacttaaaaaaatgctacactacccctactttggcccaaaggacacccccccacctccatcccaaaatatttgagccagtcctcagcttgatgcctctcctattcccccaggggatatggtacccatttacacagcaccataacttttttaaatgtttgattattttggcatgtgtcacttgactgcacacacaagaaacctgtgtttaaaaacacaaagtagtcgcaaggtagatcctgtctcttccttttcaccagcaaagtgccattttctctgtggtagcatgaaaggggagatagttgctggagctacttgggatgtcgattaaagaaagtccgctctaagctctgtaagatcctggtttgacatcttttcgtttggagaattgggcccgtgggaactcacggcttcttcgttatctttcagaggtacagacaaagaaagtccgaaaagttcctccgggtttgccgtcttcagtaagtactgcctggtttttgctccgtactctctgtctgttgtgttctgtttggtgtcagtagaaggctaacaaagtcaatgaggttccgtgcgcccagagctgctgtgtgtgccgcatctagaatgtggagaaggtaggagcgaccagctttacctgaccctcactgtggtgattaatggcccctgccagaaggctccaggcctctgttggtactcagcaagttaagctctgaagagagccttgaaaagggtgcctcaagttgcagagatttacctgtccagggctttggagagcgagagtattagtttcctgtgtcagttacattctttgtcagtattatgatgatttatggatttgcatgcgaaaggagatttgtggagcggatttagggaaaaaattacatgggtttcagcccagggtgcagggagaatgtctctattttctgaagaggttgatgaataagagctgcaaaggtggtcactgtttgcaaaagtgaggctaggagaatccagctgaaacccaagcattctgggaacctgtgatacctggggctgtggagggggcacgctgatgcgatgccccaggtcctgacctaggaaaagttggttatgatcacaggaaatgcatgatatattgatttgagttcatgtatttgcaaattttaggtcctctgagtatttaatttgtttataatggatccattgctagtaatcttctccttatgtaaaataaaaatatgatttcctctctcttttccctgttttttttttctgttccttccagtgttatacatgtaaaggcagttttaatgtgatcttctaatgtgttaaaaaaaaaaggctaatgggccttataagttcttatactttaagacaaaattatatttagatttctgaaaatgtattaccaatcagtgcgctcattggttttatttcatttttagtaaattggaagaataatgggttttgcaaatgtgctagattaacccacacacctgtgtatttgacttgatttcagttcagctcatccaaaaaattattaaatgaatatatcagaataagtcgtatcaaaagaaaaacctcacaaattttgtatgctgattatcagacttgataatgttgaagaagctccacaaaattagccataaatatggaaaaatattgtgtaaataaaactgccaatggcatataaaatagtcattttagaatatcaatatgtcacttaaaactgtaccgtgttgttatttcttgagttcctatatttcattcagattggctgcttttggaggcacaatttcagcttgaggttagtggtagagctaacatagatagaattttagatgaatagttttaaggacagcttcaagcgataaagtccttgaagttgtttagattttgaacataacttaaccctgataatattaaaaacattcaaaggatggctggttgttagtgacactgtaactctgagcaggagccactagaactcgagttatctcattttatctatgcctcaggtgaaaataaactttgggctttctgtatttgtttgtgatttgtttttttttgttgtttgtttgtttgttttgttttactgcaaaaaaaatctacagaaatcttcacagtttcttaggagttatttgaagtggctacaatattaccaattatcagtaacttctcttaactcattataaatatttaagtataaatataaatatttctctctagttagctggcctctacaaaaacattttcaagagctttttattgctgtttgtggcatatcgcatcgcactatgctaagaaaatctttttcttctaacatatgactattagaaattagaaacgtgtttatattattcaagttttggcttttgatggacaatcgatttagaattatcacttctgagagaacttttttgtggctaaatgtgttagcagtcctaagcaatacattgatgtattatagcccttcttcaaaagactagaaatatgataaaaatccagttaaggtttaggcagaaagaataagataaatttgagcaatttccggctcccatcactgcttaattggtagttctagagcatctccatcgtcttggggctggggtttacatagcatccattagctttgttgtattctactactgataggcagatctcatgccttgcccccatcacgtgtgtatttttacttgatttcaggaaactgtgctagacacagtagcactttggctctagtagatctagatttctgtatttttagatctccatctcccttattctttttttttaagttcaaaccaaattatgcaacgtgtctgatacaagatccttctaaaccttgtttcaacacattcttgagtatttgtgtagcagatagtagaagattgggctagcactctctgatggtgatcagattaaagatattgatgttctctttaaatacacatttaccagtataaatagtagtaaatctattacaacctatcaatgtcaacccataccctagccccagtgaaatagcccctctctctttcatagactaagagaggaacatttacagtgtggttggtatcccacagacacacgtggtaatacaacagtgagagagatgggagatctctctctctctctctctctctctctctctctctctctctctctctctctctctctctcggttctttcaggctatctgggtcaaggaggtggggagaattgcctagctttgtttaaaagctctgctttgcctacagagagagggaaggtgggggaggctgagatgagagggaagggactggtagtggggagagggagggaggagagacagacagagacagagaacttggctcagtatcgtgtcatcgttttagtacaaggcatgaacaagcatttgtgccgtgtgccacatctggcgaccttgagtcactgtgaaggcttggcacaagatgatataaagcatcatccacaaaggtctttagagccatggaagaagagaagacaggctctctggagggatgacccaggtactttggttaaggaaagactgtgggaaatgatacttgagctccctctcctgctgcagaaggttgtcctggtttcttcccacacggtaactcgctacccttgcagccctgtcccactatctcataccccttctcgtctgaagggacttcagcaatgaagctgtggtggtgcttgaagccaccgatcactccccatttccagcctttggaatctacatgtgaacttcttgtctgcttagatctctggatcttgatcgtctactttaaaccatagttccttgtgatcttggcacttggcatctctactaccctttccagcaagtttcttgtttgtgaatagcccaataatcacaccaattgagccatgtattaatgcagagaaaaaatgaaccatattaaattacagcttaggagaaatgatccacacttaaaaaaaaaaaaacctaaaaattaacatagtagaattaaagtctagaaaggaacaaattccaaagtgtaccacttaaaaatattcttatcaaatgcacagaaaaaggagcagatgccgtttggaaattgtatcgtgcccactaacatgtaaacattcaaagccttcatcttcaaattgtaatcatctacattttatcagaaagtatgaagagttacagctttggaattcagacagttgtggagttggtctccgcattaactgtgaaccttctcataggctccttcagtgtttctgaaacattgtaagaacctggaaatatgaaggtttaccctgtgagctattttatggtctctgtcatcgccagtgagattttttcacaaactaaatttttcagtaaaatctaatttccgtgttgaattgtagttctggtttatttatttatgtttaattcaggaggaactggcaagctttaagtggtccgagataattttggatgcgtggatcctgaggaaaagatcctaaaataaggctggagcatctccaagaaaatttgaggcatgagtgggtccttaggtggatttgagaaaacaaaaccgtagcacgtatttgataccatgataccatatgatccccaagcatcatgaatccttaggtaaaatacaatctttctgtctggacttaactctatttttatagaaagattatcagatacatcagtgaaagtggaaaatattgacagtatttattttcttggatttttaaaaaatcacattaaaaaattgaagattttaaatatactagtaaattcatactttcaagtgttttgtctttttttctcctcagatgcttgaagaaatctcaaatgatttctcaagagaaattgctaacttgtttatttcttagtaggagcccagaagttatatggttgaaaaatacactattttaaaacatgctggccatcatgccttttgacagttgtcttaaggaaattacagacacattgttctgtatcgtgtgacacattttcatatcaacacattttaacccaagcagaaatacaatcccttcttagtatgattatggcaatattaaatgtgacatgagtaaactatctatcagctacctggactagggcttgtgtcgggaactccagaagcagctggtcttgtaagatagactagaaggtgtcttcaaggttattttcttgtagtgatgcacacaaccgtagtgatgatgcacacagccgtcatggtttacattaacagcaggtcagctccaagcatcaattttgaacttggtgtgctcacattctagctaaaaatactaaaatatgagatttgattacataaatggcgtcaataatttctgaaaagatacagtaaggaaggagatacaattaaatcgtgcaaataggacaagaaatatccacccagtttatacaacatatagaacacagcaccatggattctgtaagagccgagaaaatcattgtcacgaactatttattttttcatgcaggagatgcagaattcactaatccactcttaagctttaagttcagtaatgtgtttttctggacaccaatctcatcctctctattgcttttagaggctaagtaaaacgttaagttttgtatgagcttctggggtatgaagtaaatacaggaggactgtatactctttgcattggagactcagtatttcagaaagcacagacaggaaatatgcaccatttggcatttggcattccaggcttccagaagtttccttaaaagatttcagtattgttgggaatttcagaataatctttcctgcaactttggaacacactttctccccttcttctagagactgccggtgtgcatattttaaatctgaagaggaaaaagaaagataaaagtcggcaggacaaaaatgaagacttgccacagagggcagattcctgtatctgtctactcagagcttgtctttgcaaattaaaaagttatagacttcagaatctccaaggaagccagaccatttcattcctcctgccagaagagagtatgtgtgtgtgtgtgtgtgtgtgtgtgtgtgtgtgtgtgtgtgtgcacgcgtgtgcttttcgcgcactcacagtttgggggcaggaggctgcttttttcttctcagttgcctcccttaaggtaggcgtgcaacataatgccccgagccttctccagtgcacatgactctttgtgattaagttttcagactcagtgttacctattaagatttaccaagatgtcctttaagagctcagcagcgagaacaatacatctgtgctcccgtgttgagaaaagagaaatacgttttagggaactgtcagcttgcactttctttctcacttccactgaagagcagcataatttggtgtggaaatttgaactcttagcggtttaattacagacactggctgcagggctcctttacctcaggaggaggatggtcctgggactttcatgtagtttgcaatgttaaagcttgttttggagcatctggcttctctatggatttcttgtttatggacatacagagatggggacaggatatttggttgggagccatttccttctagctattaaaagttcacagactgagcagtgcttagattttaacagcaaaaaaaaaaaaaaaaaaaaaaaaaaaaatccccttccagtcggtgacaatttcggcatatccaagatgtatttccttcctttcacagaatttgaaaggttttatttgaagtcataaatcagagacggacctctgggggggctaaatgcgatttcatcaaaaagagcaaagttgtattttcctaaggcagactaaccataggcaggctgttgactggcacctgctttgtttcattttaagagtaaattgcattgaattttaagtccgtatttcaaaggaatagcctgggtctgtactgtccagggcgtgtctgtgtagccactgtgtcccctttcaaagagcaggaactttcctaagacgcaggcagattctgtagttttaaggaccggattgtttgatctccgaacagcaacacgggaatgatggtgttctccctttcaaagctgcttcctgggcatagcaagccctgccggctttcacttgagcacacacgcccccttcatggaagttaaggtactgcagacgattccctgcatcccacctcagagccgaaagctgggatgagctaaattctgtccaggtgtttagatgtcagtccgaaacaaaagcgaaagctgtacttttgcaatatatatatatatattttaaagttatgactcagcctccggggcactcaggagagattctgggtgtgcgaagcttcagtagatgtgttttgattattcggagattattttgatgatttggagaaaaataggggcgcgcctcagctttatagacctgtcttcaaagctaactggtggggaaatgtcgtggtgtcctgccacgctggtgctgactaaagggcacatccttgtgaagtatggattcatagtagaaaggtttattttctcaaaaaaaaaaaaaaaaaagaaaaagaaaaaagaccctcatagtacactcagtcacgaaaattggtaccattctcattcgctctctcacgcgcacagagagggagagagagagagagagagagagagagagagagagagagaggctatttcatcactacttgctgttaacattttagaaattttcagaaaatgctcttttggaacaatgattttgatatcctctgtgaaagagtatctgcctgcctgaagcatcctcctccctcccagcccatatcattttaaatatgcctcctggattatacttataataatattgtaatggctctcattctcctgatcggcacagtatatcattatatcattagctgctaggagaaagcggtttcaagtaggtggctgattcttggcggtaatgttttcaagtaaccctgtttggggaattgggccattgcacaggtgcccaggtgtgctaacatggggctcaataatattttctggtttgctcattacgacatgaacttggaggaacaaaataattcaataacaagtagtgtctaaagcctaggctgccgtttcaacaaactctagtgatttggaacgctaagcaaagggaatcaaagcctaactgaggtggtacctggtactcagctcatcgaagcgaaagagctgcgtgtttgtgacttggtaatcaccatcatcaccggcattgaaaataaaccaaccgcagtaacttccgtactagttgaaaataaggttcgaaatggctatgagttctgccacttaatacacaggcatatactttatgggtaaaattttgttgttgaaagtacatgggtccctcacatggtaccttgaacatgaagtttatttgtataagtacccaagatagcaatccatattatctatagtttcattgatacatgaaatgaaattcagtgcatttactgtaggtcagaagtgttaaggtttgtaaaattcagaccacaataggcaattgctaggcaaacaaagtcacattggtatgtttgttcaaggatacccaggaactccaggcttctcagtgggatggaaagtgcgtgttctcccacgctcttgttctcatacattcctattacatttgatccattcatttacatatttttaaaagatttatttgttttgtgtatatgagtacaccatagctgtcttcagacacacaggaagtgagcatcagatcccattacagatggctgtgagccaccgtgtggttgttgggaattgaactcaggacctctggaagagcagtcagtgctcgtaacccctgagccatctctccagccccttcatttatattttgtcagatttgctgtaactcaaactaaagactagacggtccatgagctgttacacatgactgtgcccttactagtccttcattctttatgaaattgggtgtggtgtcattgccttttaagcatggctggccttataaaggaaggcttgcattaagaaaactgaaaagcccatatgacatcacaagtagacttctgtcacttttaacctcttactgtcccatcagtcacttgttcccaccttgagtcaggtaaagcatgagcttctggtctgtcccatacaagctgagcacaacacctctgagtgtgacttgcaaggccatctccgtggaacgagtccagggttaacaggagcggagcctgataggagctccggcccttcctaacttgatgctggattttcgcgccctcagcgcccctattaggtggcaaacctgggaatgtgcgtcgtgcctgtgagtaaaggtggcagtgcactcatagcaacatcctgagtgacagtatgtcatcctgcagaactcattggcagctgcagccttacatctgggtaaagaagctgaggcctgcatataggagaccatgcagtgtgtgtgtgtgtgtgtgtgtgtgtgtgtgtgtgtgtgtgtttgtgagagagagagagagagagagagagagagagagagagagagagagagagagagaggtgcttgagagctacacaggctgtaaacaagatgctgtctctgctgcctacagccattcagcaccctgtgtagggcaaggacactctgcactaagaatattgttaacacagcatttggcaagggtaggaaggtacttgcccagcatgcacaaggctcccaagtttaatccccagagagccatctctgctttaaaagcatttgactacccagattaaaatatcaaagttttcgcctccctggggactgaccacccatgtctccatgtggtcctgcgtacaacccctgtggagcagctccaaggggggtaaaggcaagcacccatgagagcattgttttccgaaatacagagactaggtgacagagtggttgagacatggggactggtcagcttacctggagttcactgcactacttactagctacacatgacatgagtatgcaatagcttggttgtggtatcaccattgcacgatgaactggaaatttcagcagcaaggaagctacccctctttttgccatttgatgggaaataatctaacagggtggctgaggtcagagcaggtcacgacagaacagagactcagctgcacacaggatgttggctcagcactggtcgcttgcttctgtttcgggcgttgcttcggatgctctttgggttccttcatcttggcctcggtcagccttctttaatgacgagccatacagctctgcataggtgctgccgtaagtacagtaggcctagatgtccacccaacaccactcctgatatcttgcttttatagtcaacattagtttgtgtctaagtcagccttgcctccaattagttgagaggcgcatggtctttccttcattgtgtgtaagtggtattctcgaaccggtcagaaatctgtttcctcacgagtgctgcccaggctacctttgtaggtgtggctcacattcctagcccaaaggaagatgatggccaagtcttttaatggcatctggcaggataacggtgtgtggatcagccagggcttggtggcctccttggcttgtatttatcacagaaagaagagctgactgtctttagggcagtttaggtccatgtctgacattaaatatgttcatgcgctcacacaggcactttataggaaagctgaataatttctggattccagccactgctgtattgtagggtgtgtgtgtgtgtgtgtgtgtctgtcctcagtgccactggtgaattcttaaaagaaaagtaattttgctcatcacctatgggaaactaaaaacagttcaaaaaaaagcaagagccggttagtgaactcttcttgcttttaaagaataaaaggatccttgtacaggtgctgggggttgggaggagcctgcgctcaacatccctagcaaccaggcagcaggttcaactcctcaggaaaagtccttggctggtgaccgcccccacccccacccccacccccaggaagctgccgggtccagggtagccgccccctcttttggagtcctggccaccttgtggattacaaaggatattggctttctccaaacttcattgcactttgtctcttcatggagtgaatgcactggcagtggagggctcgtgctgctcccccaaatgatccccgttttgttcagcaacaccaaacttctccactcgcagttcatttatggctctgatgagagtggtgtgtgtgtggttttttttttttttttttttttttccaggaaacacacatttcactttttgacccaggagcatctgctaggatttttttttttaatactactttggcattccgaaagtgttaatgtctttcatatctgtttaatgctatttagggatatttacgatcacctcttggttactcggggtaaagtatgtcgcaatttttttaaaacagacaggaaagcattcacatgaggaaacagattgctttaaacatgtgcttcctgtgacagtaaaaagaacaaattagatttaacactgtgtaatgaatgcagaaatgtgtacatttaagcttttaaaaagctttatgttcagttttggtcacaacagaaagtgagtcacctgaacaaacaaatcaaaggagcccccaggcccagtgtccccagacttctgcagtacccagcagttgtaccccttaccttaggctccttcagcactcacaaaagggagccttggtgccgcaaagggcaggagagaagcctgaggcattctgtggtttcacaagactagattctgaccctacatttttagtgcagagaaacccaaatgtattgggaagaagaaaagaatctgttactggcttgcccccactcccttcacaagtagtaaagaaacacacatacacacacacacacacacatacacacacacacacacacacacacacacacacacacatacacacacagatacacacacacaccaacgagacaaacaaacaaacaaacaaaaaacctttctgaacccacctacccccctgcttttcctggaagaaaaagaaaacctgatactcactagctagcatttactgcaattaaattatggaagaaaaagcttccttatataactcccttccttcatgaaagctggctcgcagggaggggctagaatctgagttcatagttctacctcgcttcaaaatgctgaacagagggcacgaatcctgaccccagcagaggagacatccatagccacttctgcctgcgcgcagcaaacggtgcctttctgttccccgtgttctcatagctaagggtttgtggcatgccctccatcgctctggccaaggagggccaggacagaatccctcaggggagggcacgtagtttggggacatctgactctcttacagcacacactgaggtactaatatcaaaacagactgcttgtcgtcgcgcggcggggcggtgctttttttggctgccgtggtcgaaatgaaatgggcaagctgtagtccgcttggcatccgaacgggctaagggaagctgggaaatgggagtcagactgtgaatgcaagtaacagccaatggttaacttcctttttgtgtgtcacttggcagagatgagactgatggcgattttcttttctttcttttctttctttaaaaaaaaaaaaaaaaaaaaaacatgggttagagttcagtgccctgggaagagcggtggaagctgttattgtgtgtgtgtgcgtgttttttttttctcgtacagttgacttgtcttgatttcttgaggccagtacagatgtttcagcagccagcatcaggagatgaatccatggcagtcagaggcactctataggtgcaaaggtgatcagaggagagtgggtccacggaaagtcttgctgctgatcagtcctgggaaagtccaatcctccagaaggcagtcctttgccaaaacagaatgctcccaagtacacagacacccgaagatattttaaaattatcacgagtccacatccctcatttcacattaaaaattcaaatccattttgaactctgggaatacagagctaaaatggtcagattatattcggctgaaatgacctcctgactctttgagaggctattgctcttccgttagccacactacatctttgaagattctggggaatgtgtgatagagaactcccaaccttttcaagatttccctagtatatctctgtttgcagagagctgctcccaaagtcgaaaagagcgagttgccatcttgaggagagaattgcatgtttagtgagcaccaaatggtctcagtgttagtctggaattctcaatatagacggttgctttcaaatactgtttattcctctcaaaacttccaaacgtttacacacgatatcaggaaagatgaccaactccgacaaccccaggagcagggaacgaggcttagagagagaagaccatttgtctgataattacagagcatctcttaagagttcgagcgaattctgattaacctttctgttcccacattctcacatgaaattagcacaccttttaaattattatctagtatttaaacactattttttttttagtgttcttaatgcaacaggttctagagacaccaaaagtgtggggtaggcttcaaaaaaaccttcatttttcttacattttaaatgttctgtttgtgcaaaatttcgagaatcaccataagggcttctttgcatttttaatttagtaactaacatatgaataaatttgcatattaattagttgcagattaaatcatgcatacataattgcctccttactgtgtttaatgtttgtcaaaatctccagcctggtttgatggatgtcgtatgaaagattacaatttgatgtacccttggaagtatttacaccaataatgctagattcttaatagcagaattctctagttctatacagttactaataaacatgtaagataggtacatgtccctttgactaaatttttctctttgcaccagatcatttactattcataatcattaatgcatctcctaattatacagcatatgtctgttaaccctttagttgccgacgtattccagtagtaccttctttctttttcttgtccttctctgcagaaaaccaggtatttgatagaatccagatgacacccttcacttatttctatgtttctatgctgttgtgtagaaacagctcccaggccatttattttaacacccagctaagaatcatctgaatactttatcttctctagctgaagaccaacaaatgacctgtgtatccaaccctcatagctatgggattttcctcttttatcaactgtaagaataatttgtgaatttcagatactttatatgaaatagttagaacaaagacatgctgctagcacatctgtcttatttaggaatagaattaaaacaagtaaaattatttggtatattttattctgtcctaaatattataataaatttagtgtctgatcaaaaagtggctgtgactattttgtaagaatttggagatctttacatttgaaaatgcccacaacacggatgctcctcatttgataaagtataaaaccatcgttaaatattcgttacaaatcaatattttacttatttgggtttttaagttttatttcattcatgtaaaaagtagactaggttttccctgcttctttagtatgtaagctgcttatggcactattatcctacattaatgaatattcctactgtgtaaaatattatccaaaatgaaggtgttgatgtcattttaatgtgaaatttatagttaaattcataacacataatgagaaatatatacacagttctgctccaatcttgttcaagactcctgagctattctggtttataatttggagtatatatatattttaaaattaactttcaatttagtttgaaaatctggaaaatgttaattcatttgggcactaccattagaggccaagggaaattaaggcccaggccaatgacattgcttccgttgtataaagaatagatgcagcaaaggcatgggatgcattttgagaaatctgttttaaatatgaggacttgttgaccaactctgaattccacaacggtcataatatgtgacttgtacctgttttaccatcgagtgtgtcacatttatatgcctcataaagactacagagattaaaaaggaggcaaacataaatggccgatttcctttatttgagtctgacataggagaaaaaatatcccttggtcgcttacctcaggaacgtttcctttctcgttacaaggcaaaaaaaaaatagttattgatttagcaaaacatcattttgcagcatgaaatagcacattaaattatttagcaatgtgaaaatgaaccgaaagctgcaaaactcataaaaggaagcaaacagtcagacccgaaacatatttatccacagccattgtgcctaggtaattcagggcatatggtatgtaaatgatgtttggagatccttgccaaatctgcacacaacgggataaattaaggacaggtttccctgggtgtcagtcccatgactatggcccgaatgctctctgctccgatgtgtgtgccttgttcttggcttttagcaagtacggcactcgcattcagtgacgaaatccggtccttagccggcttctcaggcgttattcgtaattcccccaaaactgctttatgattcaatttaaaatatagcaccagtttgccaaactttcctcttgttcccacatttcaaaagtaagatgtgaataattcatcagtatatgtttggatacgaagccatatttaaatggatcttctcaacaatggagatggagcacttcttggctactgaactgagaaaggcgggcccaagtctgactttttcccaaggtcaggataaaagtgttttctagaatagggagtaaattgttttgaacatttacagattatagttccatgtgaacctagtcacaatttatgaattcagcttgataattcaaataattgttagcacttcttttatttttgaattacacttggaaatggatgctctcatttccagaacagagaaggcaccagacccatctccatttgcagttcattttcaggcaccaaaaggttgcactctccccttctttcctaagctggggggctcagtgcgtgaattttaatgcttcatttatcctttttgaataatcttggaacaatgtgattgcagatcccacctaaatctcatgtctcattcattacagaacttgattatttagtggaataaatgtaaaacttatatcttataaataaaaggtattccaggatgttgtatttataagatattttttactgtgaagattgctttacatgaataattttaaaaagatagtgtccttaattatgtttttatttgaattaacaatttgggctatgcccctactattaccacttcatttatgaaaaaaatagcatattgataactatgtagaaaacagaaataggcttagtccttatatattgctctgcaaagcaggtaaaattagagagaaaatacttgaggtcagcatcaagcaatgctatttgatataaattccaagtttatattaatgcaagtggttgggagtctaaggagtggacctaattccatagagcctatggaactccaggcaaagttattctgtggctgtccctcacttcattgaagctactacgcacagctgtgcttgcgactcaaccgcagagagcaaggcaatattcattggaaaacaaggctcatcttcctttcaactttatggagaacttgcagcctccaaagaacaacaatggagtaatcacaagttgcgattacagagcccagatgaaatgaatcgcacaggaggctgctgtggcgtgagtttacttccacagtagaagcattgtgaatgccaatggggtaaccatcgctgcagtgcaggcttaagtgacagtctttggactagataagaaacgaaacacctgtgcttcattcagagacgcgaaggtgtgtctggagatgtaaaagagacttgagattttcaatttcagcaaggtcttattacgatggttattgttgttgttgttgcaaagtcataaataataaagtatctcaattgtggaaagttattttatgagttgtttgattcaaaatgattagcagtttaatatattttttagaaacaaatacgaatataaaaagagagagagagagaaagagttaaatgaaatttacatctttccagacagcttggcatgtcaggtataaaactctggcaatttcctcccaaacatctgataatttgggtttatggaggcaacctgtacagttgtgaagtattgtattgcttctgagtgtttttcagctgtgacatcagtaagttaaagagactttctaaaagactaagccatagaaaaatagcctggtgtagtgtttgctttctgacataatattcttagtaagggccattgaaaggatatggctgtatgcatacacttcctgagtgttaggtagcttttacccagtaagcctttgataagaattatggcttatgtatatccatatctgaagagtatttcatgtttgcctttacggaatgttagtaccactcttatataactctagtaaaacgttctacctatagttctagtagaaagttcatcatattatcatattttatcatattgtcaaaagacgtttaaactcccccaaagctaagaaactgccatttagtagacgtcactttcttacatcatcatatgaaacccacttagaatggaatccttttaaaaatcaaatatcgcctaaaaaccaaaccaaaccaaaccacatattcattattcacctactaaatgctaggctccttgttggtgggcgaccatcatgaagacttatgcaaagatgaccttagttgtttttagaagcgagaatgtcttttagaatacgttaaagaggcccaggcccagtaatgttcattgtagagtaataactgcagaggttatatgactcttaaaaatccagtgatcgcagttacatcataaataatataatcacatctcccatggtagcataccatgcaacacagaagcaaaaccagccatatgtcactgtaattattgttgagtttctttgttatcagcatgtttaacaatgagacaaataacatgattttttttctatagtgcctagaatctggttaatagactgatttggcaaaggaaacaagccaaaattaaatatatgagactggtatgttaagaacgtttattcattgtttccctctacaacaaggaacagtagtgtccaagaatgtgagaaggaggtgtcagttaaggcctgtgaggtggaatggctaaggtagaatctagcttgaataaggacagatgactcactgaggaaaactaaagactccacgaaatgaacaggagtgtacatcacacaggtcgagtgaccaaatgactgaacagtgtcgcctttcaaagtgacaatgcatgtatccattttggatacatttggatacacatctttggcatgttgctggctctgttaactgctccacagaaatgaagggagtcgaggtcctttccctagtgccctctggtgaagcgtgcctgtgaaggagcatgctctctgtcagcgcatcaaatacaacgtgtcccacctctctatttcagtagctcattaatagaagcaagagaaagacccaactatgaaatcaataataatgagaacatttgaaagctagtggaatagctaccatataattgtgtgttatcagtaaaagtagctttggtgctatttttttagcttaataatatgcaattatttttaagaagacataattctcaaattgaagttctagctagttaagcggtgtttatctggcaaaccttctctctgaacttgaattcttttgtttctctttcttttgttttgtttgtttgtttgcttgcttgcttgcttgctttcttctttctttttgacagggtatgtagccttggctagctggcactcactatatagaccaggctttcctagatttacagagatctgctggcttctccctcccatgtgctgggagtacagatgtgtgcaaccacacctggcaatttctttcttagaaaaaaaaaataccgtaaattacatcttgctcatctagctcatgtgtgtggcatgctaggcctgcagaggtcagggggcaatgttcacgagttggttttcccctgccacatgggttctggtggcccacctgacagcaggtgccttcacctgtatctctctagccctcttgacttgactcctttcattgtggaaagaagagaaatgaatctgaggttagtgtctttctttcttcacccagttagcaaatgtgtcagagctctgattatgtgtctgtgacaactgcaacattgctgtgctggggcaatgacatagaggcacgatttatttaatagcagttcatgttattcaatatttgtggaataacagacgtatcccagaatgaaccttatctagaaagggctgcccttcatggttctggactgtagagccttccagatcccgcacacattgtggccacagtgtttgtttcccaaaagtcacagcaattatcagagaggcttttcttggtaagagatcgaagtaaccctcaattattcttctatgttttgagttgatctttctgaaatcctttattacaaagcaatgttgtgattttaggggtgacgaggagctttcagctctatgacttattttccataagaagaaaaaaaaaggtttagttgaacccagaacttgttcagattttaaaaggaagtgagaaattcagctagcatttgcagttgtgtttttgtagattctgcagcttgtccagtgaatttccacatgggaaaggatgttggggctcacatgctctctttagtttttgttgttgtttgtattgttttgttttgaaacagggtttctctatgtatgcctggctgtcctagaacttgatctgtaacccatgcttgcctcaaaaatcacagagggctgggattaaaggcatgtgcgaccaccgcttggcattaaagtctaagtaacacaaatacaatcaacttattttttttcctttttcatatttcatcattttcattgtaaactatgtaaacatttaataattgtactactgtttctatccaaggaatatgtcattcttaggaatctatattttatgaggtaaatctatacatgttttactatcaaagatatgaggaaccattaactatatgcagcttagtatcgctaataactctgaagggtgcacagtgtctgcactcaacgcgtaaagctgacaatttcctgtgtgctgtcctttccgatccatccctttgcatagcccctacacatgtaccttaaagtacaaaggtaaccaaacatgactcgcaaggcctgaacagatgtcaaagtatgggccatatcctgtaataaaaaaataattgaccagttattttaagtcatttttcaacttaagtatttcatagtcacgttcagagcaaagcaaatgccgacattttgggaagtgaatatcctgtcaagcaaaatagaggaaactttcatgtcactgactgggaagcaatttctttgcaatttggtaccaataacaataatgctgagcttggagaatggccccgtgggtaaagcctgttgacctgagtctgattcctagaacatacatggaggtaggagagaatagtcttctataagttgtctgctacatacatgtacatgcacatacatacacacacactaaaaaaaatatttttttaaattttaaaacattctactaacctcttttaaattagttatttttctcagccataaatggagagtggttaagacccttgctccatattccttgcgagctgtcaccaggcatcataattaacttgatctagtgttcagagtcagcttatgtcaacatcaaacttttactgagaaattcttattttcgtgttgttcgcgttagacaagtgctcaattgtttatttcagtttccctagcagtggcccagaatttttcttaactgtgccttagctcttacagagcatttcttctaagatcctcgagagattttcctgacatgttgctgaagaggatgcaagtcttgtctcccctgtgctgctgtggccatacctgtgtttctgtgtagggagaggacttaagatcaatgggaccgaaggtcacccccaggtcatttagcatggaggagcacagagtttaaaacagggaggaatcactgcccagtacaacccgttcccttgcctttagggaggcctggcctgttcctgcttcctccttaagatgctgtcaattctagaacaaattggcttccagtgacacaagagagcattttaagcagagtctttataaaacaggaatctgaactggacacttgaaggtcagtatggtgctgtccttgaacactctctgccttagagcttgctcactcttattacctgtgtttctattataagcactgtcagagatcgcctctccagtatttgagagttgtttgttctctgtccagcaatttgccgttctactcactcaatgatgtcaaactattaaatgtaatcaacagaaacctcaggaaattgctagaattccactccagagggggttcacaagccctagacaattagtctattttgaatgaaaattacttgctttgtggtactacccccaccctgattattattgagcaatgtactgggaaaccaaatatctattcataaatttgtaaaaaaaaacaacaacaacaaaaaagtgtgttgttttgctgttcgtcctgtgtacaaattccagtgagcttcttcatcaatccattttcagtgggggaaaaaggagttttcaaaagtagttctttagcctaacaaataggctcagaatttctccctttaattttggagtaacccttttaagcctgtgcatcaatatgaagagacataatcaatacggagagacagacagccgttttcacatttcattcagttcagacctgaggtctggcctggggctcccagtccaggaaacgcagcaatctgagtcaacttcctcaacccctgttttcatattgtccagtgtgacgcttcctccttgtaccaaaatagaagtggtttgtttgtagagggtgcttagagacatgctatgggtcacagggtattaggataattgactaaaaacaattttttttcccaatacttccagaaggaagagactgagacatagggaaaaactaaaaaaacagagtgagtttcctcttcttaaataagatgtcccctctctgtgttcagaagtattgtttgtgttagctttcgtgattccacttagtatttgagacacgatggcgtgtctcagtatcgaagttactcacacttgtgtaacctgaggagaggaggtttggagagtccaccctacagtttccaccaggatcaagcaggcccatctgtgtcttctgctcccgctatctggtgtccaactttatcttatcctatagtaggttagctcaggctggtcaatttgtatgaggagtggcatctcggacctctggcttagtgaactgcatagccattgagatcagttagttatgaaaatggcatgctcataggatgcttctgcacagcacagtgaaagtgggtgggagggtggaatggtgagtccagccggaggaagtacacaggatccggggacccggctttcaacattgattcctcatgatctgtctgtctcccagataacatgcaatccacaatggaaaaggaggaatctctttctccagaggaggaaggataagttcccaatggtcaaagtcaaatatttatggaacaaatctgattcaaaaccaatatttttttcactgcttaccttagcaatcagtatggagtacttaaaatcaatgtgactctgagctatcttgtccagccatgaagaaaataaatatttggtcacgttgtaagctatttaaaagtctacacatgagcccaagccataaaagaatcaagttgaagattacataggaacttacatctaggaagtcatggtagaaattcaattccatagtctctgctaatattgctaatatttgatttatttgtgtagtaaaagctacttccaaaataaattcacatatctagtagcctatattaacttctaattattattccatgaggcattttcatgccactgaaatgattgtgtgactcttaccttatattttatttttttacactcttttatttattgtgtgcgcatgcatatatgtctgtgtgcccgacacagtgtgaatttggagatcagagaacaacatgcagaagtcaattttctccaacatgtgggtacccagggatcaaacccaggaagtcaggtttggtgggaagaccctgtatgtgctgcaccatcttatcagcatctaccccagagttatgaataccgtatttatttattttaaatagattaacttttaactatctaacgattaagatagcttttaactatttatttgagctaaatacattctcttaaataatgaggtagtaactaaataagcattttaatgagagaaaagcgttaaaattgtttctttttattgtagccttgtgtttaagtgtgtgtgtgtgtgtgtgtgtgtgtgtgtgtgtgtgtgtgtgtgtgtgtgtgtgtgtattggggggggtgcacatgagtgctcacagtagccatagaattccagtggctatggaagtgtagttacagacaaggttgagccacctgaagtaggtgctaggaatcgaattcaggttctcaggaagagcagcatatgctttttgaacaatctctctatccctcaagaaaacatttttaatgtagacctcttcattgagagtattagtattagtattgatttgttgagacagagtttctctgtgcagccctgactatcctggaactcactttgtagagtaggatggcctcatgctcaaagatccatctacctctgcctcccaaatgctagaattaaaggtgtgcaccaccaggctcacctcttcattgctgtttagagcacataaaatattttacattctaaatacctcaatatcaagacagaaatagatgtggacagtagtttatcagagttcactatttgattgcaaaactgtcttagtcttccagtcatcccagcaaatgagaaaggacagaaagagggagagaggtaaggggcaggataaagagagagggagagggagggagaaagagagagactgactgctcatgtctgtgtgcctgggagtctctgtacctagctcattattttggtaattagatctttaataaaattgtatgtcatcacacccaataggatttttttgtcactgcactttaatttggatattaaacattaacccctaattacaagccctcagagcttattcaaatttttcataatacagcagtccatgtataagcatttcctacttaaagatccacatcaacttagctcatgagttcaatctctcggttatagtgactcctactggagagcaaatggtataaatgcactgccttctctgacatcctttctcagtggttcagagcagcttagacaacctcctcctgccaccgtgcaagatctgctgttcttctaagtttacttacagaaacatacttttgaatgctacagaatcatcaaaaatcaacgttaaaaatctcctggtacagttatacttctcaaactaatggtctacaatttctagagaaattgtgagtaggtacctgcttggctttggaattttatgctttttttttttttcttttcttgttagtaagctgccagaccctaagtcctttcaggatggtgattattttcttgcacagaggaagcggggagaggagaaagtgttctctcacatgcagctgatctgctgggggagctgtgttctctcctttaagtcctggaaggagccaatgtttgacataaaggatgcagctagcactcacacctgggctgtctggcttggccaagatccctctgctgtagagcagcaatggtgccattcctatacccatagtcccaccctccagtggaagccttccgggtgtcatacattggttcgtagtctgattctgttgctttggtctctttttggtttataaaatgttatctaaggctattcagttttcattccctgtcttggaagtgagacggaaatacctctcacaaagttcctggtgtgagaattaaagaagcgaagatccttgctctttaaactgcttatccttaaagatgtattgagtactgccttctcaccgagagaattaatgggatagctatttgccaaatgtggggattttatgtatagtcttgcttatttttgttttgttttgctgtcaatctctggattgatagatacccccatctcttaatccatgacatttacctaattcaactgtgctacgtaaaagcaaccggcattgtagaagtaaacaatacactacgtataaactttaacgtgattagtgacttaagcaagaacaagaagttgtcatgttctactaagttatgtgataggggcatggcatcctttccatgagaccatcatgcatccatccacccatctgtccattcattgcttagctcatattcaaaaccaccccactttatttgattagacatgtatttgtgtagtaggtttatttagacactagtgttatataagtttgcatttatttttcttggggaaaatggtagaatctcctctaatatgatctgaggttgcgagtgttttcttccttccttccttcctttcttcctgtaacaatttattgtctaagtctttaaaatatatagaattgctcctacttgaattgaagccgtaatcgttagtcatatttttcattatgttcaagagtctgcttgcatctcttggcagcatggtcatgtctctgtcttggttaatatgttcatgtctcttagagacatcatttctaagatggagcttaactggaagttggaaatcacctaaaaggtgtgtgtggttaatatgttgaatgaacatattaaccaagggtctgctttcaagaactgtaggatttggctagttactggttcagttatgtaatccattcacccccacaagatcttactgaatatctctctaactttctgggactattacaccattgccttgggagtgtatgtgcaaagaatccccaggtttctgtgacatggtacatgtaatgttgcaagcaccaaatgtgcttcacttcaaatatcaaggaactcttggaggaaaaaaaaaataacaaattgtcaactagatgctagaagaaataaatggtattgacatcttttagtaatcagttttattatttaataaatattgatggcaagtttcaccatctactgcgttcccaatgatgcttgctagttaagtaccagagagagagctggccctctgtttagcctggctgtcatttcagtgatgaaaggaaagggacctcaatgctaaggtcctatttgttaagtatacactgatgcaaaccagtcgaaggccttacaaactggctgcttaagagccagacttctttttaaattatcacaaaacacgtggattcttacatacagctccagtctgtgctcgcctcccccccctacacttcacactcaagatttatcacgaatgatatttctgtcaccaagacatcttcagggtctgagattgaagaactgtctcagttgacaaggcactgacttgagttcttgttgagtgacacgtacttcaagggcagcaaagcaaaacccacacaccactggatgacagtgcatcttgcctccctgggcatcattcacaaagaacccttcaaagttgtacatctttatttaccaatacaaatgtgcacttttgaaatgttagaattttttttggcatcagctaatgaatcctaaaagcttaatgttctagtcctatttgaactatttttcttccatatgtcaagtcaaaagaccttaaagtctctttcaccttatcaaattaaagtatttagtggtatcctttcttaaagaaatcatatcattacctttaaaaccatgcattatagtccattgaagtaagagtttatatataattgatggagaggcctttacatctttgcaaaacgtgcaagaaaatagatttaatgaagatgaaaagaggtcattgtttatggaaatagtccagagcttctagcagtcacacccagaacattaggtaagatctagaggcagtccactaaataaggggtttctctgacaacaacgcagggacaatagcgacaatcccaccccaacttctctctccaaattccagcatccaagttccggttttcacactgtgtcctgtggcagtgggcaacctggctttgggtgttaacactgagggtggtttaaaagggtacaaataggatcctgtcagattgacaactaactgttctaatgaggaaaaaatcctcaaagcatgaaatttgaatgaaatgtgtgattataattcaagtactgtttacacaaacctctggggaccttccgaataaatgcagagcaagtgagttagacaaacctctgggccctgtggtctgtgtgtgtgtgtgtgtgtgtgtgtgtgtgtgttagtgtgggggaaactttccacccttagctaagcctctactcttcagtccactccagccttccgttgtctattaatactgtatgtgttttgttaccgcgttgagtcgtaaggaaataggtgctttgcattattaaagttgattctgaagagtagatgtgtgctcagtggcatttgcctcggcatatgcaaatgatttagtttcatttgggatcaattcccagaggccctcctttcctgtggtgctctgaatttggcaagctcaagtcagcccatcttcccccccttctttccttttttttttttaactccccttttgttagttgatatatttttcaaaggacaacaaaaatattccccctgcttggtagaaaccttgcaattctattgttcagtggtgatcaatgaaggtgaagggaggttttcggtttcctaaagtttagtaaaatttaagtttacaaaaaaaaaaaaaaaaaaaaaaaaaccgtgcgtggaacgcttgttaaaatatttatgcagaaatcaggctcctggggcgagtcaaaactatggtgggggggggggggtagaaaaaacgtggtctctaaggtacctttttaggaattgacagctgtgagctattggtagattcggacttaaccaataaacttgccttagaacccagcaaacaagcttaagttgcagctgggttctccattgccctgacactccagactgcagagtgtagtgtgtgtggctttggggtgctcagccttaaggaagggacgcctggcttcatggcatttagctagctcgcttttgtccacgcagccggctgcggcgtggcgaggtgaagttcaccggcggcggccacccctctgccccgggtctgagagcctggggctggcagagccctgggccggccgcttggttactctgtttcattccgcaacccggttttgtaggttgttgaccaagcagccagaaaacactgccccctctctctgtttgagcgaggtcagagacgtggtgggttttttttcccttcctccactacgccccccccccgcccccctttctccgaatcgagttctcaggcagctgcgtacaatgctgggagctagccagcagcagagacagatggcagagttattagatgtgcatcgtacgattcccttcctgccactcgctttttaatcaaattaaaacaaaaaagaaagagagggagagagagagagggggagtcaattaaccgcatttgtattctgctcaataatggaccctgttccacttttaccctaaggcagttgagtggaaattttagagaagaaaaggggtgcctaaaacaaaaaacaaaaaaaaaaaaaaaaaagagggagagaaagagagacacacagagggacagagagagagagagggagagagagagagagagagagagagagagagagagagagagagagcgcagaagggaagcctgcaggaatttgtaagaatcgacattattcgaggaactgaactgataaaaacccctcggaaaagttgcagcgatctcgagtgctcggctgcggcgctgcacaggccgggccgccatccagcctgcgcgaacttgagcgtctgacagcagcgccggggcctcccccgcccgccaggaatggtctcttcctgctttgcatattcaccacgcttggcccggccatatgggaaaatgcaactgaaggaattgttgtgaaaaaagggacagcgagtttgaaataaaagttgttagagtggtactgaggagaaaaaagaatccgaggccatgtactgcgcatacaccatcccgggcatgggcggcaactctttgatgtactactataatgggaaagcggtaagcgaactcgggctgcgaggggcattggggacaagttttatggtcacagggatgagccttctaggcgaggagcattgtttgctaagttgtgcaggactgccgcacctttctcggtaccatgaaatatttatcatctgcgagtcctaggatgtttctcttgcctccttcttgcttttttcctttcccccagtagagacctagcaaagctttacaaagcccctgaaagtagatcccagagagaaagtttgcagtcaggtgaacctagggggttgtacgatttaaaataatactaatttttaaaaaaggacttttggcaaaattatttttgctctcaaatgattggaaggaggagcagattatgaagagaactgagaaaacccaagttagcctgagagaaaattgggggtaagtttcactccggattgaggttttgtgctgtctgaagtcttactaagttggaaaccatggggagtggacaatggataagagattaaaatagaccaaaaacttaaaacggacatatctgatggagtagattatataagcttgttttttaaaccaaaaaaggaagggggggggataagaatccattcgtgcatgtaacaatgttgcaagttatttgtgctgtgtggcgttttcctcaatttctcttcttctaacagaaaggctttattgaagtgggggaaagtgtctgctatcttgtgtataaccccagcagaaggtttttacttgccatctggaggtttactttattttattttattttttcttcgcctgggccctccctctgaaggaaaaggatttcaatattttgtaaatcggtatgtagtgctctcaagaagagttgggcaacggaggagtaaaatttcaccttaaaatagcaaagaatggagatggccgtgaaaagcagccctttatgaactgttctcatgtagtattttgaacttacatttgggttgatcttaatcagagtgtgatacttgggccaaacgaaaccgatgagagcgaattaaatgtgtgtgtgtgctgatatatgcatgtaagcctatatatacatatatacacacacacatatacgtaaatatgcacagatgtctgcatattgcttatttctggtgggctacactggtatgtatacatatacaagagctttcgagagtgtagcttaaggagtttaacagtcatccaggtctatgaactattacttttattttgaagtatcagtaaatcatcacaagttaataatacttatcccttttaaagtccccctttaaagaatattgcatgtaatcagaatagtagttaaatgtggtaaataaagttggtgttgaagtaaaaggcttatgttctaaattggtcagtgtttaaatctgtgactttaaatactgggcttagagaactcaatttttagaaagaattgtatctgaattgcagttgtttaaggttaaatgggtagctatttaagacttttgcctgtggtctcttagacattccccacaatagatatcataatatttccattgattttttttttaaagcccctttcgggtaacttcacaaatgctgttagtgtgatcagcaaaaatgtctgtgaaatagtgagatacagcccaggaatctgttgccctgtacactaaagaattacatattatttaatatgtgtatatgcatgaaaagattatatgttatattatacattacaacaaatataagttgtgggttttaaccttaaagattaccaataatgaattttataggctaattattagcttcacatcttaaacagttgaattgtcaagtttttagttaagactcgggcatttggatttccttgtggcctgaaggaatttttttaagatatatgttccatccctacagcttgctagttgcctctaccataagaaaacgctgcctatgacatcatatcactaatatgccctcgcagttgccaaatattttggttgttagattttttttttttgaaaggatggtactcataaaatcaagatcactctgtcacaggaaatgtatttataggaactgttttaagacgtttattaaaaacaaatctggtgatgtgtatctctattgattcaaacactagaaagaggcaacttgtacatacattatatttagggaaaatagccatgtggagcctcagcagaaaccgtggaaaccacggatggtcaccagtgcttagatttaacttggtgacatagccagcaaagtccacttgtgtgtggtccacagaaggcccagttctagaccattttccaagacaccctcgtgcatcccccggggaaagggatttttgtttattctacagtgtgcattgtactgcctctacttctgcattcagctgcgtttggtttgatgccagacatcttgtggcgattgtgtacgtcatgcattgattggtcaacatgtctatgaaagcggctttacctttcgtgaattttgtttgtctgaggtctgactatttgtatcgtgtgtgtgtgtgtgtgtgtgtgtgagagagagagagagagagagagagagagcactgttttccaacttgaactgttaaagcgtggccctctatggcacaggtttccttctgaagacaacccagcactgaattccttctttttttccccagtgacaagtcaattacttgtttaaattcagtctgaactctctgaactgagagaggctagaggaagcaggtttttccctgtgaataaacaaaagaagaaaaatggaaaacccttcccaaacactatgatttttaggttgcagcaagaatacagaagaacatgacaatgatctttttgaaccagcaaacacagtgtttgtaaaatctgttcttctcccacttcctagcaggaaaaacactttaatcaaatgatattttgggacagacaaaggaaatggtagatggactctgtcaccttggaatagaaagggccccagctacagatgcccaaattgctgccaggctcgcacggagaacagtgatttgtccttaagtatggacttcatgagataagaccttaaataaccttaacccaagagctcccaaaaaataaatcttgagtgtaaacgagagagcatttataaaactcagctttgccttaagggagagagtcaaatgatcttggccagtcatttttggtgtgattttttttttcctctatgaattactaccttacatgtaagtgaatcccagtctcagctaaatgacagtttgaaggaattattctatcagagaaatgtttctggaagagtaatgtttcttttgagtgttgagaactctagcttatgttgtcaaattgtgttactctttttattcaggccataagacatactgggcgttacttggggcataacctggtctaccccaccccagcccccccaaaaaggcgaaaagaaagctagaattctagtcctaaattttgtttgtttgtttttccccccaaggtttacatgctcatcaaatttgaattttaatgagtaattatttggtcaaattccatagagctaaaaatatggcaattccatgtagataaaattctggcaaatgaaattgaaaacaaaagtggtaaaattccttcctaatggtaatttccaatcacaccataggctctcccggcagcgcgtgcatgtgttgagccgtatagagaaacctgtgattattctaattgctcttttctgcttcatcctaacaagcttcaaaccgtgtttcaaactagttgttttgaaatagttatttgtcaagtcatcagatctaggaaggcgaatgagagccagggccccgtgtttatagtccaaccgttggtcatattatgcaggcttttcatcttcagaaagttcaaaggcaaaaaaaaaaaaaaaacgaagcgaaactcttttttgatattaaggccgcccaaacccagaaacatcgggatcacaggatctctcggctcacagtcgttcttggaacaaagttcacctatacacaagtaaaaatcacagtcagcaagtctcgtctaagctccggtgtgaagggttcacttcttatgaatttgccatggaaagaggcaacataaaaagatgaatatcttaatagaaccagaaataacattgctaagtacatttttaatatgacctttaaaaaaatatcctggctagggcagtccagataagtaagtaccaggctttaaagttttccataatgtgttcactgtgcaacttgaagttgacattttaaaagttattttagaaaattattatttcagaaccttggctataaacaaaaggaaccagtataaatttattttaattaaaaatattttagttgctaatacaaagaaaaatggttagatcacaaacctgattttttttttagctgcctactaatgttaaaaaacaatcaaagaaaaagcatataggaaaacaaatacatatgtacatatacatatatatacatacatatatgtgtgtgtatatacacacacacatatatatatgtatatatagatattagcttactatttggtattattgacatacaaaacatttgaattgagtgattttaagataacaataaaaactgtttgtatttactttctcaaaacaaaactatgttgattttgttcaataggtttaagctggtaaatattcacgagacacttaatcttgatactgtagctacctcttgctcagctgcctctgattaaatttccaaaaatccctgcttgagagtcacggacaccagtttgaattttttttttttcccgggaggctaatttcttaggaagaaaatgtgtatgtggttcgctttatttaacccctggtttctggtaggtttgaatgttttgacacttgggaagcatccggctcctagcactaggtgatggcactgtctcctgagtcagaaggaaggactggggagcagggaaggaatggtcaggggaaaccaggaggacctgggtggtggtaactacctttccagctgacagacaggaaattgtactgcgtgcttcctgcccctctgtgtacttgattcacaggaaaatccttactgcctggtttgttactgctcctccatttttttttaaatttgtttttatttatttagggttttttggtttttttgtttttatgtttttttgttgttgggtttttttgtttgtttgtttgttttgttttgttttgtttagtaaaattgagaaggcaccacggaggcttgccgatgattatttatttatttttctctaaaccttactggtcaaacagctttaccttgtttttaactgaagacattatcagatttcatcatcgggaatgctgtgtgtgtgtccgctcccaaaccagcttgaaacttctggcacgtctctggcattattgagagatgttgctgtgtcctctctttatggtgggccatgtccatgctcaggaatctgcggtaggagagccgtcccgaacagaaccagaaccccttaacccctgacctggtgagaagataacaatttttaaataacgactgggatacatttaaaagttgttcaaattgaggcttacttttaccctgagaagagaattcaatgggagcatatgtttgctccctacagcaagcctaaatgcttgccacctagcacatgcagtaagtgatgtgtagctggggttgtttttcccccctccaatactgttggactcacacaaaaggcacatttgctcatcatcattatagaaggaagacgatggaggatcaagtgttttcaaaatttttaagtgtctgattagatttttattctttggctctcaatactttcaaacataactctttaagatgacacggggcacaatgagatgtgataaaaatgatgggcggtgacaaatgaaatcctgccttttcctcaaccacttacagacagagccctacacaacaacagtctgcattacccccggaatcaaatgaatactgtcaaatcggtgggagacaagttagtaaaagagtcgtatctcgaagacagaggtgacgccggaagtcaccactggagcttgtagaacagtgaaatccctgcagacttctagtttttaaatggataataacttctgtggtgcgttatcatatcatgtaaggtgagctgcagaaacgatccttacatttttgttaagcaacgtgatgttttctattccgaggaacagttcttaaggctgatgcccctccctttgaggacattatgggaggtgacactaggcttttttctttgaagtgctggagatctctaactcccaaactgcaactttgccttcccatgtgtgcttgtgttacagcgccatggtccgcttagaatatttaagttccatttttctgataatgctgtttttacactccaggctgtcaaaggtttgacccaaacctttcctcatttcttaaggatgcctggtgttttcttccaaatgacttggaagggagaggaatagctgtaatgttttgcttggaggggacaccaccttgagcccagtcccttctcccccaggttgggttagagattgagctgaaacacctgagctgtaggaagtgtcagcttccagacttgctggtcagatggcaactccattgctatcaggcccggatttggtgggcaccctccagggacctagatctgcgtcttcctccaggccagactacactcattttgagagggggctgattggggtaattggtgggaccaagtgggggagagttgaattccagctgcttccgttgtgactgacctgaaaatgaaatgactgaccagggatgctaaggatgaaggcttaacactcgactttttcacctccacaaacctaagggtgagatttataaagtaccgaatgaatgactgcaccaataacgatcctactcaagggggaactgctgtgtcgggataagctcacacagttggtgcatttaccaaccacaacccaataaagtctaccccagtgtggaaacacccctagtttttattgtcagccatccagtgaacatgccatgggctctctcctctttttggagcctcacccctttggtgatattttaccatcttaaaatattcataatggaacacatttgaaagacactagattcccacctccaagaaaggaaaaaaaaatatgtaagtgtgctctggaccttctcaggctctaaactgtgccccctcccctttttaagtaagaagaataacactgcattcctcagtagtttttctagcgaataaagcaaattaaattgatgttacatgcatatttaaactccatccagttaagtactgacgtgattaaaataatcaaatgtattacttaaaaaaattaaaaaggataaattccgcatcccattattttattgacttttaaatataaattgcagaaatgtttacattcctaatggcattattaagataaactgacaaatcagaggggggaaaaagttgattggccagcacattattatttctgcacctgctattacaatcagaagagcctagcaggtctgagcagggtggatgtccccccccccccgccctgtcccgccccccttaggcttcctttgtgtgatggtgggggttgggataaatgtttaacaagtgtggtttcactttgtagtgccttggtgtgtgttgtgattagacaactatagagtatttcgcatagctttggaattagtatgcaaataatagaagccagcaaggttgccctgtacctggtgtcttgagccaccccagggaaaatggaaggtcagacttctactaggaattgtccagtggctgatatggccagctcttcagttttatcctgggcatctctaaggtctgcaagaaatactttttaaaatattaatctttaatactgtattcattttattgtggttacgtatctgccaggaggttagaaagacctgaagaaacgtaaaaagtgtgagtgtgtaacattgccaacgcttgcttgaagcatccctctgttaccttctgctcttaatctggagtaccattttcccaccatctgacttagtttctcggtagcagggatggcagcatttgctaatagaattgtagacttttgacagcacttattacagcgcagttctcacgaaccaacttccactttgtgcgcatggcaggataattgacgctcagtccttgtcttttactgtattcaaatacattttaaatattctttaagaatgccattccattcactgagaggcaatggcattatatttggaccaagagggaagaatattgtcacatgctgtggctagtcagagcttttaaagatctggataaaaccccactacttcctgaacgatggtggttaccaccaattcataggagtttagacttcgtcctataataattggaatgcccagactttaataacacttaatgtggagcatggatcccacttaatcccctcctgtcttcacagcaaaatgtttacataaatgaactctcaattcgatatcgactatttagcctagtcccttccaaagttaatactatttccataattaaacatgttcggcagtcaccatagggctacttcttaagatccatgctcagccctccgcttttatgccatctgcccgttaggtcagcactgaaacaggagcctgattttctacattaaagcacgtgagttcttggccattgtattagacagtctgcctcagagcgagcagaagacaacatcccaccatattttcattttgttgtatttgcaacagaaatgtatgtgctcaaatcggttattttcagcccatgacagctgtgatatttaaaatgatcacagctgttgtgacttagaattgatttttctattaacacctgaataataataataaaaaaaaagccctttgctgtattaaaaacttaactgtcatgagtgtaaaattaagtatgttgatatgagtccggtgacctcacttcccagagctctcagcatgcagccagccactgggctgcaggcagcgaatgggcaagcacaccgcaaacgagatgctgggtgtttccacgcggttcactttgcgagggttcgtgtcacggcagatgctcctggcgccattttacagtgccagctctgctaataaaaccttttaggattcagtttacttaattaacccctagaaagatgacttacaggaatcattatgaggacctgacctctgcgctgcagaagctgtgttatctttcagagacaacgccgccaagaaaggcaaaaaccacactcatttgtcccttgcggaggacggttgggttttatggccttctcctcccccacagatagaaggaaagcagggtagtgaagaagagccaagtcgttacctgtgcagctttaggcgagcccttgttttttagagatcttgactacattttggatccccactttgcatatccactaaacaaacacctttcaggattgtgattcctaggttccattggtctcttcagatgtttctaatccaaagtcagttggttattggagcattgatgtagcaacggattgagtacttaacaatgcagccattctaggcctcttggtgtagcatgcgaagctcacggctggcctggtgtgggattattgatgaataatagtgccttcccagatgcattgccaatggggagaaatggagactaaactctttggctggtccctctgtttctcgccttcgtgactcaatcagaattgaaagcatggcaggtttgactgtgataaatgtatacctggatgagggaaagaatggatggctggtgggtgggtggatagattatgtaattagacagtaacagataatgccaattatttattgctaaaatttgcttattcatcagaaggttaggtacaatgtactggtttgggttttacatatagatgagagcaagtcagttggaaacactaaacatctctgttacatgatcaaagtcagtgtgaagcccatctgcaaagttctagaagaaacccagactgctgacttccacgctaaggtcccaatatcacagtcaaagtggtcatgggtgtaaatggttttgcctggttcagagggcagaagataacttctagagatgttgatagaaaaacctcaggaaatccaaacgggcattcgttgctgacagactctgatgacaaacatgaatctctagtgcagtagtgcctcccaggggacagatggaagcagttctgattgtcgcagttatggggagacatagggggatgccaccagcatgtggttctagagcccaaacctagcacagtgtacagaactgccccttggcagagcagaggcagacaggtcctgctttacacatgttggatctggacatttgtagtttattcttgccatgtgagcctcatgtacagttccttcctgccttccttccgtccctcttccctccctcctttctcccttccccctcactcccttcctttcttacttctggcctactgtctctccctacttttccctagccctttccttcccttcacctccatctcctacctttccacttctccttccccccttttccattctcccttccctcttttctttttcctctccctcccattgtcctttcccctttaaccttaccctctcttaccctccaaccaatttccttctattttatttcctcttgatatatcatactctgctctataatattgttcgaggatttccatgatttaccaagaaaatgtaatatttcatttgaaatattatatagtaaattatttgtgaactaactggaatgacttcaaagcagctgttaagctgtgttgagccaataaggaaatatatatgtatatatatacatatatatatatatatatatatatatacatatacatatatatatatgcatgtgtgtatgtatgtatcatatctcttaaaatagtgggaactccatccatgtttcttgttttatcttttatcctaaaagcagtatattacttttatccccaaagtacataaaaaggaaaaggggaattagcctaaagaataattgataataatatagacatatttgaggggagaattaaagatattatttgaatttatatatacatatgtatacacacacacacacagattaaagtaaagtaaagctgaggaactctttagctttcccaataatgcagggtttttttgtttgtttgcttttgtttttgttttttcaccctactgacaactggtggcctctcttcctggccctgctcaatgtccatcactactggagctttctggctgtgatttagaaagggatcccgagacctcggttggcttccctagtactctgtgcaggagggtgacagatctgatggcagagtcttaattcctgccaactttagaacccagaacacctcactccttagaagccaagtttcagagttgccaagtctgacagtagcttgtgccacccttcagtttctgcttcaggctatacaaggttcttcaagaattggtcagagtagacatgacacagcagctgggcagttcagatccacggtgccgagaacttcttcttgtttagtgcgtcggttcaggggattgcctctgggcccccgaaggcagctacaccatgctctactgatggcttcctggagccctgagcacctcagccctgcgcagctctagtgaattcccacccaccaacaactagagaattagctttggcgctgcctctttctggggtgcctgtgaatttgccctacattggctttgggggggggtcatgttgtcatattgggtggtacagaattgtttccattcatagtgagcagctacagagatgtcatttgacctgtcgccattccacgaagtacaggctaccattttgataaatccatttatttgagcatttccatttatgggagatggtgtttgttttacatcatcaattaattttatagaaatgctcttttacagatcattgtccttgtttttaattttgattaaacactaattatctatgttaggtcctcagtatttctctgatatttcgtaaaccccagtataatcctttgaataaatctaaagcaatatgcttattattgctttcagaatgtgttttgtaaaaaggccggttatgtgatatttgtgtatttataggttatgaaatctttgtagagtgccttttctttcatgtttaggcagcaagtagtttaaagctgtgataaaacctagactaactctttcattattgtattaacatttgataaaatacatctgtaagccttcattccttcagagaatgctctcaagttcttcccagagtaacataaccttcctgcatcccagaaggcaggtactccagaagctgtcagcccctttcaaagcgaatactacccccgatgaatgggctagctgctagccaagtgaggctattgccattaaatttaatgatgaaaactagaaacgaattttaaaaattaagtttctcagttcccaccaactacatttcaaatcccctgtctcatgtccttgctatctccattttggatacgcacagggatctcttgcaccagtctaggaatttttgttggagaaatctccatctgagaaatggaagagcgtatgagttacagaagttgctcaaggtcacatggatcctgaagaggcggagtccctcccgccatgtattttagtacgccttttcactgtttccttaacgttagataagatgacatcagtgccccttgtattttactagatgctcaagccaattatatgtgttgctctttaattgaaagttagccattgatacactcagtatttttcacggatcggtcccttcgcctgtttgcatagagcagggacttggaatccccttcaaccacctcaaccaacggaaccgtgaaggacaggattcaccatgccttaagacatcttaagcttcttagcttcttaaagacgatcaatacatgttgacatgaaaacactacaataaatgtgatgcatctgacctgcacacccatgactctatacagtaagacagagatcttcactggaaggctctcctgtcgtccacagaaagcagactgctcttgtagagttgttctgctaaaaagttacagttttctgaaagtagatgagatgcctgttcaggtgtttatgagcacagggcacaaattcattagttccgttgtacctcataccttaccgttcctgagtagacagtgaggaataccgacgtttccccatatagcgcggctgcgcagactaggtgcttggcacatgctcccagtactttcttcttgggcttattgatggtaccacaagccccagtttctcttagtaataatcatggtgtcaagaggcatttgctctctgtgcgctctttcagtttggaccacatttcgttcctgtaatgcaaataccactttaaacttagcaatgccaatttgcattaatattttggtttcatatagctagctattgcatctcagaaacaagtgcattttaatgagtactggcagaatgataaaaaggttattcattaaatactattgtagaaaatacagcagttggttgccagaaatcattaaagccaaatatagtgtgcactgaggctctgaggacgtccctctttaggagtgtgcgaccctgtgggattcagtgcaggaagaatcaatgctattcatgaaggcatgaagggtggggttaattaatacagaatacaagccagtacaccattgacaccagtgttgatttttaagttttaaacatattttacgtttttttatatctgtcatgaggtcatagggcatcgcctcaaaattaatgcaaaggacttttgacagtcagaaaggctgagttgggaagtaatgtgtgttcttaaagcttacatttttggtcttaaatccagagtggagttcccaccctccattttatgattttttcccctcccctttctgggaatgctttatgaaaatagtgagcaatgtattttctttcttccttcctttctttctttctttctttctttctttctttctttctttctttcttttttcattttcagggtaacgtagggaaaaaattacaaatttgcaactggctctttagaaatcctctactttaacacatgcgctctctcgctgctgctgccatggctgtcatagcttgtggttcctaattataatgagcttttttggtggtgttattgcagttgtttttccccacacccccctcaactcacttttcccagaagagagttccaagcctttgaaaattctcatgattttgcaaatccactctatttttgtcgcgaatacaggaaagttaaaattggctggtcggctgccatgttttgaatccaattttaaagcaaccctttgcaacccggggagtgaaactgacatctttgtatctgtaatgaagataattacacctgcaaggtgacatcactagcaaagtgacaaacgcacttgagaaccaagtcccctgtctcctctgaatcccgtagaccacttttggcattcagttctagacacctctttcatgcctgtcgtttgagaagttgctttcagatgaatttgctaaagctgactgacacggggttaaattaattcttttctttattagtcgaagtgatacagaccgttcttggactaatgtagcttaattagtggtcaattaaaaccgaacattgctgaattgaagttctttgatcagagtccctggcatgggctccctttctttaactagccaccatcttgaattcatttggaatcagtagtataaacaagtttaaaactggttcttttataagaaagtcagcaggcttgtatagctgcggcttcctttttttacttctgtaggcggcaattcaaaggctaaatgaaaacagcgctacaccctggggggggggaggggggaaatacatttttaaaagtaacagtaagtagtcagtaagcagtcagtgccccaacccgtttatctgtaaataattaatacgcacttccccaatataaaggacccctcccccaactctcccagtaataataaaaagtgaagggcccataatcaacctacctgactgtctctggcagtagggaagggtgactgctacagagatgggtcctaaattccttcttcattgctcatgggataatatttcatctctgtgcctttgagattgggtctgagataccatgtaagttggttgtggatttcatcatttcttttagagggagggcatagctaaattcatatgaggactgaggggtagaattctgcactgtcacttgatttaaagtgtctagtgcttttgggagagtgttggtgccgttatcctcccccctttccccaaaaaggaggtgggaaggagagaagttactgcgtagctaatgcagactcatccgtttccccgtgccctgtcttaatatttaaagtatgtgcactgctcttgtctaaacataaattgataccgttcagaaatcccaggttttgaaagcttatcaacctgaaagtaccatagacgacggcattcagttgatgctgtgcactttaaagtattaattaaagccactagtttttgtactacaaaccaaagtaataaactacaacgaaagaatgaattggccgtccataagtggcctcttctggattgttctcaagaaggagaaagggagagtttggaagtgaccgggtactttcccccctccacaacaaatgataagatttttgtagttttcgttccatatatccaaaaaattagagttataaagtgtaattaaaattaaaacttcatcccttgacagaaagagaaattgtttatagtcaaggcgcctttcagcgctctctctctctctctctctctctctctctctctctctctcgccttctccctaaagggctgattaggaagaataattggggatgatagcgggaggaagacgacaattccatttaattaaagataatttattttactttaaattggtgatgtcccacatgaataagagtagatttagcagatagatttattaatgggtactgacatctcagttgacagaaaaagcaaacattttctttcttcattgtttttattgcgtcccagcacctgaaattgctgtcagccagcttcctccgctgcttgtcagagctgcaggcttttctaccaaatatgcaattactggtttatcactaaaaccaacttgatcctctcctaagttttttttttaaataaaataaaattaaattaaaaattaaaaaacccaaacccttgaaaagctgctcaagaccccaggactaacaggagagatccttgcttctcaaaggctgtttactattgcaggtcttcactggggttagtgctcagagtgtgctgtggtctcagtatttaaacaaggcccatcacatcaccactggttggggacagcacactcaaagagtccttcaaagaggttgcacctctagtgtcctgggtaatgagggacaggacagaagtagtctgcagaacacccaggttcactcctgatgaagacactgtaacaattaaggcccttggtggtgtgattctgttgccattgtctcctgcagctatgaacaggtcccagacattagggcggggagttttacagttgcaagagagtttcacgcaactgctttctttatattcttcccagtctgtaatgacttctatagaacatgtggggtagggggcaacatttgtaaatcgctttgtgcttctgacaagcttcttctccccagctctgtttgttccctgctctgctgcaccgagacctgcacttgacgccacattccgggattccagccccatgttttctgtcgctccatctttcctgcccactcacctagtgtatttttttttctcatcgggatatttctttgtataaagtgtaggtcctgaccacttcttcctccgtgggctcctctaccttgacttacggctgtctttctgtcctctgtcgctgccctgttcatacatgtcctcctctaagccacagccttcccttgcactcatggttcatttccacctccacctttccagcttaatatttagaaatgagtcctccgtaataaccagtgtctatccagcaaagaggaggtattagatttttttttcttttccttttgaggactaggaatcatagtagagtttttaagttttcttttaaccaggtgcttacgtgttgtcctcttcagcaagctcttctcaaaatcaacgttagaccaatggtgttgctttcgaaggcttagtccttagtaaatattgcttcccacgttgtattagccttcccctcagccaaagcacctttccctgtttatccttccagtgagcctgttggtctctaaggtccgtgcgtgacccacagctccttccccttccctccatctcttctgttactctagtccgagatttatcttgtgtcttttcttcctctgtgattatcaactctgtgacactttctctccatgaattctcccgaaagcagcatcctaggtggactgtgggatgtctgcactaaattctaagttgtccccagagctgtgcagccatgaatctaggtagtggggacatgaagtcaggcattcagctagaccaaggcgaggttgaaaatcttaggagggaaaagaatcacgttaataatagcagataatgtcagtcatagtgttggctagtagggttgcgtgtgtgtgtttctgtgtgagggtgtgtgtattcatgtatgtgtgtgcatatatatgtgtgtgtcacgttaataataacagataatgtcagttatagtgttgaatagtagggttgcgtgtgtgtgtctctgtgtgagggtgtgtgtattcatgtgtgtgtgtgtaaatatgagtgtgtgtatatgtgagtgtattattagtgtgtatgtatatgtattcatgtgtatgtgtgaatgtgtctgtattatgagtgtctatgtgtgtgtatgtatttgtgtgtctttgagtgcatatgtatgtatgttagagtgtacgtgtgagtgtgtgtatgtgtgtttgcattcatgtgtatgtgctgtgtatacatgtatatgtgtgtgagtgtgtatgtgtgtgagagagtgtgtgtgtgtgtgtgtgtgtgtgtgtgtgtgtgtgtagaggatgagccttgggcagccacagacactttcagtcagttgcacttgtttcctactagcctagaaagaaataggtagcttggctcaaaataaaggcatatcttgtaactcggtgatcctggctgtctaccctggcttacttttggcctctattttcctgtgccagctttactgccaacagtcaaatgacatgagaaccccttgagttacctggttgggatgcccttgtgaagtggggtctctgtatcccaggggaaacatgagacacttttgagaaataaatacctgaaaagaaagccaggtattgtgacaaatgcctgcaatcctagtatatggttgggggaggcatgaagaggtacagggaatcagggttaaaggtcagccttcttgacatggtggcttggcaaccagcctgagctacatgagaccctgactcggtaaaaacaaacaaatgaacctgaaaacttagctatagtagccctagactggaagcaccaaccacttgaactgtgtaaaaacaggttcaggcatagaggcctctgattctgaggtaacaggagcagagaatgacaaggaaaaaaaaaaaaaaaaactccactaaggatggagtggatgtggctcacaccaggatgatgcctggagcctggtcatttgggtgtctgggcctgtcccacctcccctccccatgtactcctcccaccctcctcctgggccctcccacccccaagccagtcaggggcctcactgcagacatctgcgggcctgaggcacatatacccagcctgaggttgcgtctctgcctcccgctatgaattctgggctgtggtcctgctccctgctcttgcctgtcagattgcaattctgatgctgtcagccatgcctgaccaatcagcaaacaccaccacgggatgagacttaaacaatgcagatgctcaaaggcagggttatgtctcgtggaccacgaagggagagcagaggtaaggtctcagtctccccaaagtggtctgtccccagcctgcttggtctgacactccctaagcgacactgccgctgctctgcctcggtgccacctgctttcccctgcctttcttccctgccactcaccagaacttttgtctgcgtccccagaagatgcatctctactctcttcagtctggctcctcatctcctctccctcttggcttagtgctgtcccagacagacctgctctgcctccaggctgcaggaccttgctcaggtcttgccacacttaaagggagaaagggctgctgtgctcaggacaaatgtatggaatgaatagaccttattaattttcccccactgcagaacagtggaatttctcttcaggttataaacatatttggctttcttaccactgagatgtattgaattttaaattgagtttaaaatcttctttttttggaaccagtttacatagaaaggatataaatagatccgatctaaatgaggaggaatcagcccatcttgagactcgggggttggggattgctctctgtcccccttcctacagttgccagcgttaactcacccgtgtcccgctggcagaggaaccatgtggctgtcatactcttctgttttaagtatttagttggtccttttataacttagagtgtttacagggttctgtactccctcgtcccatctggaaaatatttaaacttcatacgatctataagatgaaaataccacatataagggggctatgcagaaggaagagaacggagagccatcgcctgtgtttagacttggttgttcgctcagaagcggctgctggaggaattgggacaaatagcttgtgtgtgtgtgggggggggggggggcgatggtttggtccagggctgaacattccaccgcagaatgagccttggtttgtaaaactgacgttctgttgtgacttccagatccaaacaaatctctgcaaatttctgcccgatcgagttaataagaaaatatatacatgcagaggcgagatccgtgtgctgcttggcggttctgtcagagccagtggaaacaagagccggttttacctactgtattaaacagccagccagcaactgccagggcctctagctcttctctcccttgcatcatcttctctccctccggtgatggagaacaatgggatgtagggggggaaaagccactgactagaagtagcctatacaggatggggtcactttgcttctaattgccttgtaattggggagtggtttccactttcctaatctctcactggctggaggaaaggaagacagatgtggctgtagcaggaacaggcttgtcctggccggatgtgcagagggaccagagggtcatttcctgcaccaggcctgtgatcggcttcacacctgtgcccgttttacccccgcatgatcgatgaccttgcgttaacccggggtgacccttagcctctgcctgttccctgggccgccctcttggctcttggaccaccccctcccctctctctcatttacaggtggttcctgaggcctccgtacacttgtttttccgcggtgcatggtgcacttagcagcccggcaaagacctgcaatttcatccctctcaaggggccgagcaagggctgcggggggcgggggaagggggttgcacagaaagagaaaaagagagagaggttgctgtttgcatgtgcttttctagtttgtggctcatatggtatcaattaccatttgatggcagcgccaggcctgaggccctttgcatgtttgtcctgtgagaaagatctggaaggaccgacatgtggttttgattgccgcaattgcaggttgctagaatgagcacaggggtgaggtgggtgggttttccttccggccctttccactctggcttgctaatgtgctttgcttgtggaactggtctttnnnnnnnnnnnnnnnnnnnnnnnnnnnnnnnnnnnnnnnnnnnnnnnnnnnnnntcggcatgtccaactcaccaagagaaacatgtggcccacattaaggacctttaattaaaacaaacaaaaagaattgtccactggtctgttaaaatcctagaacaggtcattccatctagatggtcagacgcagcctgaagttacaaacaagtgggggtgaggatcaggcccctcccttagaagcggagaacatgttttttttaatgtcaggttgttaaacattgaagtgacactgaaaaatagtagcagtagacgtgtgtgtgtgtgtgtgtgtgtgtgtgtgtgtgtgtgtgtgtgtgtggtgtaaaaagacagttcttggaatttgtttgagctcatgctatgaaggggcaggggcatgatgtaaagttctatcagattctatctgcccatgtatcatcagccctaagatggggaaaaataatttctccaagtatttctcccgaggaaaagagatgcttggagacctgtgtgccacacaccgtatcttcccccactggattcgtgacagtggggtgggggtgggggatgcccaggaagagactcatcattactgctgcccagtaggcactgcatctctgataggccaagggaagttctagtgggaagtggggggaaagagcgttacagacgtgcttcatgctgcccgtaaacattttctgtgatgcgttcagatttcacatgctctgctccacagactggtagcccatcaaggagaagttgccgatttatacaatccactattgcatttgagaacaaaacgcatagtgaatagtttacatagtccgaaaggcaacatgatgtctttggtgtgtttctattaacaggaacaccctaatcacaataaccaaaactgtatcccctaataaagatttgtttttacaaaactgtaaggttggccagctgtggtggctcaggctaatcctaaggcgggggaaacagaagcaggcagatctctgagtttgaggccaacttggtctgcatattgaattccagggctatacaaagtgaccctgtctcagagtgggcggggggtgggggtgaggcatcaaattgttagttctgtagaccagctttgcatgtcaaggcttagctatatcattcaaaaagccatgaacctgactggtgtggagatgttgattctgtagagaagcaagcatatctttctgatggttataatgtctttagatatattttttaagcctatttcttttctgtgtggaagccatctcctcactttggtaactgagtctttaggtgtttgaaaatggtgctgattttgacatcttgtaatcttatatgctaggatatgtctacattcaaagcaactagtgattacttgattttctctagtcacataactttaaaagctgctatttggatatttgagtcattcaatgtacacatacataaagattaaatgttgctacttattgtgtgtaccactgctagctgctttgtatgtaaaagtcctatgtggttatttaataacaacagtgtgtgtgtgtgtgtgtgtgtgtgtgtgtgtttgtgtgtgtgtgtgtgnnnnnnnnnnnnnnnnnnnntgcacaggttgctggtttgtcttggagagccgggtcacttaatagcagctgtgctggagagagctatgacttgagaaagacatttttgagtcttctcaatcctaacaccaaatggaaatagaaaagaactttctggaagagagctctctccacctcaaagtgggtatagctaaaacatctctcaagattgcctcagactacccaacattggtaatctagctacccgccctgaggacagagtcagacggaaagtgtggccctgagtgagtgagaacaccacagatgcagcaggtgccacccagactgcctgtctgcttcttgtccaatactcatttggtgcccagcctgaaattctgaaatttaggaaaacttaaccaaggacacagtcctgttttgtatataattcttttaaaagtggacaacaaaatagctatcaacagctcttaatatctaatctggaattatacagtctgaccccagtgtagctgttgaaatgctcaactgtattgtaacacaaatgatgttagcgtatgaaaagtctccctttgtgtttccaatacacagtgtctttatccatattaaagaaagagaaaagctgccttttggatagctgtattatacctctctacaaattctgtacatccttgagaattctttaaaaaaagattatttggttgggtacttaccttattcatttatttatttactttctagttattaacaaatggagaaatatgtatagaggtataagtgtttttaaatatatgtaaacagccaccaagcagtacgtgagtgatccggtgttcattttgtaagttggagtgaagagtgaaggtctcctgcctggggagccctgtgcctggcttcttagctctctttctggaggccgagggctttccacagatgtcaggttacaccctgaatcagctcatcccaaacagcttgctgtctctccttaagatctgtctgtggtacccatggcaagtgtgcgctttcatgtgcacaaggaagagattggtaacttcaaggacagttaggaataccaaaacacagtctgccaagttagaattagactcagacttaatacaatctgagttttgaacagaatttgaagctttgaggagaaatatggaagattgtgatgagcatctttttttcccctccaactctcttactgtttgcaaatcattgcttcctgatcctggggtgggcggggagggaaaaaacctcaaaggaaaggctcaacgggcttcctggacatcaaatagcaagtataaaacaacgttctgatgacttgcatgtaaataaatcagaaacatatgaattaaacttctctcaaaatacacatggattgaagaagggagaagtgctgagaaaatgtgttttgggttttgctgagcccatgacatttgaaaaactagtatgagacactgaacaaacacaaaacatggcttggctcacccattcctaatattagcctcctggttcaatggcaaatcaatttaccagatgcccaaatcgaagccacctttggtgtgctcctccacacttaattgcttgcagtttaattttttttccaattagaagctcaaaaatagcatcacattttaagaaaagtgcaaatcttagcatttttcgaacccagttggctgacatcagacctttttagaaaaacaccagagatcctcaccttaagagcagtcacactgaggtggtcctttttgatgtatatgatacatcacagaggaaaggcgttagtattggaaaaccagcaccaacataaatttgctggttaaacagaagccaaaacctaggggcagtcaacatggatgaccatgaaccatctcctggttcagctgtgcagtcatggaagctggatgctagctgagagtctttgctgtcttctctgcctgagttccgaagagatgcgagaagtggacgcttttgttccctctcatgtactgtactcaccagtgctaacattatggattctgaatcctgggacaactgcagaatcctcagagcccttgtatcctctctccttgatagtgtgtgcttcagcatctggctttaagtgcaggagcagaacacagggaattcagggaacaaaaatagccagagcttcaggcttcttcccccaactgtaagtctttgacatgcacttggctgaaatcctgtatctgctctttggactagctttctcacttaagattatcagtttgaagttaggaggcagtagatttcttctttcctatttagggaggacttattttggatgcttaaaaaaatacttgaatgtatttttcctaagttctttattctgagggtgactagaaactttgcaggacagctaagcaattccactgagaattcagttcaggtctagtatgaacaagtgctagattatagctaaacaaggtggatcgaagagtgtcatagatacctctagggtactctgataatgttgatcccggggaaactggggtctcagaagggtcttgtacaagggcaccttttccatacttggaggaatggaagtcaaatgggaaccaaggcagcaaaacccagaaatattaactggaagataactagctgacctcttgtttactagggaaaataagagggtcgcaatagaaagaattacccaacccgctgcatgaaatatatgggggggtaaagcaagctaccagtgaggcgggacatgtataaatgccagaatagtggtctgaacatcagatgaaggggtataggagtggaccatccctgagaacatagaggtgggaacgggagcgctcttttagagagtgcatgcaactaggagttgtgttctgtgctgtcttctaaccagtgaaccctggttctatgttctcatcatatggaagacacccccaaagtgccccataacttcctagcttatggatctggtttagtttcagactggagtggggcaagaggtctaacatggtggatcaggttgtgattggttgtggcttcatgcaatcttgttctgagaatatgggttggaacaactgagttccacgtaccacagacacagcgagtcagatccacagaccctacgctagtgaatgccttttgcaggtcagtttggggacagctgtacaatgccaacctaattttttttatcagctgtgttacctctacctgacgtcttctccctcatggaaggacagacgttcttacctatggtcccctaaaaaccccattcatgagtctgaagacagttttcctgaatgaggaaggattctggggagacccttcaatgctactaatctgatacctgagtcttgcaagcggggaaggttggttttcctggactttgttttccttatttatttggtacactttattggctctcaactctaagagagccttcgctttggtcatgctcaaaaaaatgcagcctcagccgggcgtggtggcacacacctttaatcccagcacaaaggcaggcgaatttttgagttcgaggccagccaggtctacagagtgagtgccaggacagccaaggctacacagagaaaccctgtctcgaaaaaaaccaaacaaacaaaaacaaaaacaaaaaagagctaaggaagcttaagaagctaaaaccttcccataacatttattgaaatagcctttgtcaggaggttatttggtccacatcactcctgatgttactcacaaatacctagttcctccgtagactagtttggggaaagagaggagtaaattgcctacatatcaagaagttttcaattaaagaaaactgtcaaaaatgttttcaggctgtgcaagcaagatatcctgagatctgaccttctcataatatagtcccattccccaatgagtgtcacatgacaccgagaggagatggcctgcctacccatggtcaagtccttggtgatagagccaaattcagaaagatgctctcctgcttccagtggccagtcctcatggctaatgctgtaagaccaatgtggaaacaaaggcatgctcatttccttagatgggacgaacattgtgaatgttcagagattgtgaataatttgagtgagaggacagtttgaattccagtggacaggcagcttctgttcctaacactagctactttatttacctaaattgtctgtctaggaaatgacagcaaacttgagcactgtagaacagtggtccacaatctgtcttcctacacatgggtctgaacttttcttagggatggtatgcaagttataaacctggtatgtattattttaggtgttttggtaggttggttggttggttggttggtggatttttttagttaaggtaaaatttatataacctaaaattaaccagcatgaacttaccgattcaggtatatttggtatgttcaggatgctgaaccatcatggcaaactggctcttaccttcatgaccccagagaaacttcccacccattctgcagctcttttctatccttctgcccacgttttataagctctcatccttgacatcatcttatgcacagacacacatacatattttatatttaatacatgcatatcatttttttaaatctatctgcctattgattaggaaattccagacagaagacctaatctttgctaattatatgaacaaagattaacatttttgagctgtttcccttttctccatattaagaaatcatctggattttacatttctactttgaaaattcaaaattattaaacaaaataagatgcctgttaaaaattacatttcttagaactcaaaggagcatatgtactgttattgtattgttaaagaaattattattgtttacatttatttgcagtgaccttatttgggaatattactaagatcactggtagtaaatctttaaacgattaatctctaaaattaagaaaaatttcattttatgaaaaaatatctgaaatctcactattaaagaaagctaacttaaggatattttgactgtgcctgaggacacaaggtaatcattgttgactccttatttttctattgcatggtcttttgtcagaaacattaggcccttaatcccccacttcctttaagaaatgtttgaataacttggtccttattgaatagttttcccgcatgtctttagtgcatacagaagcttccagccctgtatgctgggaagccctgctccgagttaagctggggaactatggctggttgactttatctaaacttttcccttagtgtggggaaacatgggggagaggtgggcactgaaataagtaacagagaggaagctgattggctatatatgttgacaatttgcataccaattttttttttcatttcaatctgtgccacagagtgtcctacatttggtaattatttcatgcctttgttttctgttgaaagtagttagggccatatgttttaacagaaaaaaaaaaagataattcctacatttttttttcagctcagtgaaaggggagaaggggtaatagttttgcagtgtaccatggctgttcggaactctagcagattggagcctcagcgttcataacaattctcttggtgtgcaggagacaaaggcatctgtttgaaacatcagtcagtgtcaaatgagatgcttcaaaacatagcatagagtttgtttggtaattctactctccatcaggaaatatcatttacttatgaaagttattctttaggtagcctagaccattggtaatttgtaaggctatttggactaagggctgtcatgtttcacctgcagtttggactgaaaagatgtaggatatagtctgattcctagcctcattcagttgtatgacaacaggagtgtttagacaccccgtctcttgcctgatattttgaaatggtacaccatgagtaggatggtcaccacttgcatagataattgttcaaggtttaaagacttattgtttttcacagtcattctgagaccactagatcaaccatagaattttacctaattttcttttatgcagttaagttgaatgtgtaactgtgtgtgagtatacaagcacgcagcgtgtggtcaccaaggcctctgcacactcgaagcttctgagtttcctcccttggagtacataacctcactgacatctttctttcttgggtctcttcttctgaaactgtgaccctctatttgtgtttgaaacaacttcttcgtgcctcctctcacctcctaactggaattggccacttggggatggtggccgtttgtattgactctgtggaggcaaaatacctgaaggcatctgggttcagagaagtagagattgctcctttaggggtccacagggtcaaagtatgaaatcattcatattttctcatccactgcccccttctctctccaccctgtttgttccctattcctttgtcattttcctctcatcctttctaaggaactgtagcattgcttccaaaagatgggtagtgatgtgctaaatagtggtcttgtggccatggaagtatttgcagagcttccagttcttattcctcgtagtcatatgccttgacctaagtctttggcactggggtggatttattcatctaatggtacccacacttgagctagtcccttttctaagttgcaccacagcttgtaaatttctatgctattgccattaacccatgtactaaggttcaaatggaagaagtggagaatggtgttcctagaatttcttttctaaagaaaccccaataataaatgcaacaagaagttgagatctattctggtgaaaccaaggaatgcctatctttccctatgttgttataatattactcttactctgatatgtatttcttatgtaatcttttattcatgcttccgtgagcacatttggtaagatttgaacctctgtaggcactatacattcacacatagacccaaacatatttgccttaaaaaaaaatactgcttttaacattttttctgtggccatgtacaccaatagcctgagacgattttcttggaggccactgcagtataggataaaaggcaatgatcaccactggagtaagagttcatttctgtcattattgtagagtcacagaaattcctttcctggggaagatctgcagcccttacataactgagaaaaaaagcatctttagaggtcacagagcaatttattggcagatacaacacacactattttgctgtttcaacacctcctaatgacacagtacttgtcatcagaaaaataccatttggctgctgaaggtgaagaaagcattgaggtaggagatgatctgttatatatacctggagatcaagagttggttgttattagtgtaaataaagatataacctatgatagagttatagctattgaagatatgaactaaccagagagatgaaacatagttcgatcattcatcaggatcttcttaacattacctttaattttctgatgaacatgcaataaatagaagttgggtaacaacttagttaggtgttgagaacatattaaagagctgtgatgtgcttagcatccacagtggtttctctgtgccaatcctgagcctgtgatgaagccaactcccgtgggaatgagtgatgtaaggaacagaacgaggaagaagtctggtttcaactggacccagtttggtgcatgtcagtgttttcaagagagtaactccataagtctaagacacatgcagttcaagctaaggcgttcatgatgttggcagtgggcatttttgtgatacactgagttgaatgcaatagcaactgcatcgtctgcttagttagtgccaagagcaggagaactgagattataaaaataaaatgaagtattggagctagaggctagcgcatgcaggcaaggttgggtccacacttgttttttagtacatggatgataatgttctatcttcttattgtccttgtatttagtcctggattatttccatcactatatcccatgaaactcttagcagatgactttgtctctgtgtctctgtgtctgtctgtcgagccgataagcaactctgtatgtatacctgctgtttttgtttttgtttttctacaacctcattccggaaatcatgtttcttgaggcagctcccaagagctccactatcaaaaacctccttcctgtgtcctttgcgagcaaaatggctgccaagccaggactcagcaaagcttttggtaggagtgacatcatcagtcactttggagagtgcacgaccatcaacacttaccatcacttcacactgtttaaagtgtcaagactgaaagaggactacacaattgtacatctcaaatatgccacttaattgtctgagtcataattatgtcataactatgacactgagcacttcagtcacttcaactctctgggtctcacagtccttatctgtgaaactgaaaagggaataaaacaatagactaagggaatgagacaaaattatatgcacaatttggctggagccatgcctggcctatcagaagtaacatgtcaacagtgtgcatcatcgtcagttggccctgtcagctgtgacaagaacttggattctcgcaggccttggaaatggatctctttgcagttgtggaaaattgtgtcaaagaggagataccattattaactgctttccttgatttctctttgataacccatgcctgtcttaacggctggcgtggctgtgagatttcaatagcatggtatgtgcagacagactctcaaatgtgtatgtgacatcatagcagaaaaaatacctacccagtttctgctggccattttactgcctcagggtttccgtaaccccaagtggaaaaatgctttctgaaagcactggtcagggtaaacagctaaggtgcaatgtgactagcctgttggcagtagtaattctgtctcaagtgtgcttctttatggatgaaagcaaggattttgttgctgttggtatgtccccacctagctccccactccaggacatctctatatgtgtcaaaggtgtgattcagagatttgggataatattctaaagttacccatgggagaaagagtgggaacgagagccttgcctttttatttagagagagaaaaaataagacagagatggctagccgtaacaaacgccaggtttgtttcaatttgtgagtgaaaggcacacactttagcatcgatgaggctgtcatctgtgtgggcacagaggtcctaccaggctgggcacagtggcttagagaggagggtactgactgctgtctgtccacctgctgtctgagcactactgagacccttccccctctctccatttgccttccgcatccttttggtatttccgacttgtcctttgattgacaatgacacaagcaagaaagggatagaaacactcgtctatctcttactccttaatccgaaaatgaaaatctacttggtgagggaaaaaaaaaaaaaaaaaacaaatctactggttgaaattaatttaaaggatttagtttcaggtttcattattcatgaaataatcaagattcagctactacttggaaggggcattgatatgtgatgtttctgaccgagtgtgtggatgtgtgcttgtgggaaattattttaaatatgttaacatgttcaaagaattcctttgggaaatacatgtagattctctttctcctatgttttgtgatgtaatctgatagaatggaaagagaacattgttctgttagtagcaaaaatatatagatgtatcacatatatttggtgaatcttatatatgtatgcctagtcatgaaatattctcccatgatctacccactcccacgtgagttccagaatggcaataaacacagtttgggaaatcaaagtcttcattgtgaatcagttaaggaaacgtagaactatttgaatagttcctttgaaaattttaaggcttttagttagaaataagatctttgcaatggcattatctcatacctgcacgtgtttttccatatgtaagatgtgtccatagagatttgtatgcattagtgtttgcctctccagatgtaactactgcgattgcattgcagtgtagtccttaatcatcacttgggtgtggaggaagagtcctcctgtccgctttcaagattccttgcattcgcagtgcaaactgaaaatgtatctccaggaggggtgtacatcctagagcttgctcttgtctcgaggttttgagttcttgtgtggttaactgcctttccatgtggctgagctggcatttgagtctgttaactttcattactatcttgctgggccatttcaagtctgaatgctagagtagcctttggacgaggatacttcatacaggaagagtcgccttactgtatgcacacctggagacattttctagctgctgcccattttgcaaaatgaggttgaactcaatagagctttgaaagcatgaagccaggaagtgcgacagaggacagcgggtatagaggtgacaggacaagagaaagtaaagaactgatataaaagattgtcctgagggaaacagggccataaaagcagagactatagggtgaggggacccaatcactctaatatgagaactaattgggaaaacgtagaagccttttactgttttaaaaaataaaaatgacagtacatgtccaactgtaattccttcatcagaaccaacagtggcccaacgtgaacttgcggctcatgagttccagtcccaacgtaggcagagatctaggctcacagctcctcttccatgtgtgcttaacatggcacagcttgaaatcattttagaagatggttatgaaagaagaacaaaaaggactccagtatgcagcagtacaaaggacttcaaaaattagaaagacactggttgcagtgccccatcaactaactcatcaggcgaacattgatgtatcagggagacatagtgtttgcctgtcccaccaccagctcaccaagacagcttctgcatcctggggtaaaatgagtcatagctaagctgttgttgctgaggtagatctctttatggacagtcttgcctctacctaacgctgttgggcaggatgttttccataaagacagttctgggctgatgctgtccactatggtaaccaatggccgcctattgctgctgagcatctgaaacatggccagtgtgactgacaactgcacattgtttcattttcacgaagttcagtcaaaataaccttaagttcctagtgacaaatatgttggacagcacttttcgagacacattgttggaaggcaagcaggaaacgtctgacaaagtgtaaattccgggcatttatgaagtgactgtgatttactaaggattatgattggtgggtcagcacaccccctcatggtgataactgccccatttgatgaactaggaaaccaaggctccaggagacaaatcactttgtcatattttctcaatgaattgtaagagttcatttgaaatttgaaccctgtgagtccagttcacagctgagtaattccaggacctgccaagcctggacatatctagtctccagactggttcctcaagtgcatcttcctcttgtttctctgtgggtcagctaacagtttcgctttaacttggcctcatggaacctaccattgcccatctcatgtctaccattgcccatctcatgcctgtggatttacatgccatcttgcccttcaggtgttctttcttccatctggaagccatctccttgaaagaaatggtgtagttgttcaggttctgctttctggctgagtgatgaccagctaggaggcttcaaaggccgcgccaaggtcaccagacccaaagcatatgccaaaagcttcttgtgtgaatgctgggttgtcccagttgagaaggagtaggagatctcctgaggtcagagctcagagggagtagagcagagtcgagatgccaagccagcactggggcacctgtggcactgttgcaatgtgacaattttgtccatcgtgggttgtacagtaactcccggtgaggatctgacatcattgtgccattttagttcctgcctcaggcagttttgcccatcacatccctcattggaaatgacattttctcattgtacttgcagaatcaggtaatattaagggacaggacaggcctactgtacaatatagtggctatcatccatggcatgcagtgaccgctgaccgccatactgcatggtctgcagccgtcttctctgctcttctgagttatcatttccccttaggaagcatgttacttaccatatgcatggtttcacaataaggttgctttacaatatgcaaataaaactgctacagaggaaaaaaagaatattgagattcccacaagactctctgtaaacggccttaaaagtgtagcccatgttgatagttaagaatgtcttgtcctacacgcggacaacaaaaaacaggctcagcaggttgtgtttgcatggtcatgtatgcatacagacatgtgtgtggcaataataatcaaagaaagagtcgatcagttcagaggaggggctgaagggagggaagggaaagaggaaaatgatggcattctattgtaacgtaaaatatataaaaataaatgaaattttaagaaatggagaccagctcatctttaagaaggaagtttaacagagaccactctcttggccagttctgctgctgtctttgtcgtgtcatacacaacattttcaatgggcgagagggatcttttctaacttacatttgtacacttaagaaaactagcggcaacaagacctgaacacaagaacttgatggggttttttttttgtttgtttgtttgtttttgtttttggcatgctcactgtgtgtcagggtctattctagttattttacacatgtgctacaattcacttctcactaggatgcatagtaggtctccttgctcccctttcacagagaggactcaggagacaagaggttgaaagttgaatgatggaactcacagtcaaaccaggctcatgtgggccggtccatttcactctatacctttgttcagctttatgaatgaagggcattcgttgttaccaccctgcctcatcattgtgaaaggtagaagaactgtatcatggactactaccacaaaaactgttctatacaaggttgtgaacaaactacaacccttgttgtatttacatctccctagctgaaacccataggccaagaggggaaagggctacagaccacattccctccagttggtttgtgggtgggcattcctgtttgatctttatttctaacggacagatgaactcagactcccatcttcttcttgatgaaagtctgatgggaaaggccattgagcgacagctcgtgcaccttacagttgttctcacactacagtagaaatgctctctgtaaaatgaaattatttttacactcctatcatgctctgcttcagggttacctggagattattgttaacattttggttctgtgatttttactttaaatctgggaatgtgagacaggatgacaatgcagaccttcggtgtgaaatatattatactctattttccatgaggtctccactcaccaaacgatttgagtgaagggctgatggcctcttagctacagccaacactcccagttctaatttggcaatacttcacacttccttccttcctcttgaggggacaatgagagtccagtgtcctcttgatctaagttgccttcctgggggactgggaacttttgtttctcgtgacatttttctttgcttcattattgagatctctcaaatagattacatagatttggggattttcctttcaaattgagctgacttttttttttaggctgattttttttctcccctgatatttgatatttaaacaattccagttagatgagtaatctttctactgacctagaaataataataataataataataacaataataaaatcaacaaatatatgagttcttatagaaagtaatatcattataaattatcttatggaaattgccacatggaccaagattgagaaactgacaaaatagtcacgtgaactagaagcagagcagctgcccactggctgtcattgtcattaaaatctaaaacagcttggacattaccattgctgttgatgcgaatatcatcacatacctgcgctgccactctaagtgattgcatatcaaaggatgagaaacaacgaatgaaaagtaagtgtgtggctccagcaggttctgcgtattacaacagttacttgaacttccagtttttaattgtatgaatgttcagactcctgttttccttgtgcatggaggctggcacctggccaaggggtagaatgtgtccctgagttgtgctatgcctcggatttcatccccagggccaccgtcagttagctctaagcaaataaatagaacttggggagctgaagcaaagaaagcctcgtcaacttctcagaaacagatctgtgcaatattagtttatagaaacaaaaatataggtcatttgccgtaaaatgacacgatgtgagaaaatgccctccctaaggggaagagagtgatgtcatgcctttgctgtaagctgttgtttgtgttttagaagatacatagacactatcttcaaaaaatcataaacatgtgttctgtttctggttaacagaaactttcatcttgtataaagactctccacttggtgtggtggcacacctttaatcttagcacttgggaggcagagctctgtgtttgtagccgtcctggtctatataccaagtctcagaacagctggggctacaaaatagagagaaactgtctcagaaatccaagacaaaacaagtctccaattggccacagcatatcaggataacagaaattacacacctaagtgtatgctaatatctttacatcttgcagatgttatttcacaaccaggcagtatccatgaattttcctaaacaatgttacccttagctattttatgttattcataatttagagtcttatatatatacctaaatttgatttcaattttttttcttacctttcctcaaagttgtaaaataatttcaccaaaatttaaagacatagagggaggagggagagaccatattaatatgatcaaatgtattgatactctactgtgcatgtttaagtgtaatagtggtagagtaattactgatattaagctataaattatcattaaaaagttgattctagtttttagcacacagacagttaaataaaatgaaatgccattttttttcagtaaatgtgcattggtttctaaaatgtggaaggcaatactaggtgcaggcagcttacattaagaccagctgagtatcaggctgaggcaagtgagcatacagcagccagagtgtgtacactctgacacttgaatgaggtggcttaatgaacactttgcacttttcatgggaggaatcgttctatcgcccgtttagtcccgctttgggctctttctgaattgtagtgcaccacctgtttgttgactatacagttcccaggaaaaacccaggctggatcctgccctgcctttcactcttcttaaagatacttcagaagtgacgtggtgcttcctccgtcccttattacgaaccctctagaaatagaaataaattaccatccatccatgtaagtaatagtgaaaattacaaaatggaatacaaaattacgtatgaaaaacgcagcttaaatccctccacgacttaggaagaaaacatcctctctgtgcacagcatcattggccctttttagtttggtttgttttgtttaatgtccagcacctccagattttcaagggcgtgtgtagcatttatttgatgtatggatgcagaggcacatctcccgcatttgtctctgtggacctaccctttgtgaaatcctaaaccctggtattaacgcttgcatggtctgagtcatggttcttctgagagaattatataatttttagggtatttgtttgatatacgtggcaaaaatgaaaaaaaaagtttttctttttaattcctttttttttttttttttggtaataccgctgctgcctttttgttgggggaattctcctctctctgtgacctgtgaatatcagtgtaggctcactgccaagtttgtgagccgctgcctgcttcaaaatggaggcaggaaggtatccattttcatcaagaggatgagccgctcagtctttccgaccatctggagagaggaacttttagagcaaaaagaaaatgggaatggaaaaaaaagaaaaaaagaaaaaagattatatttagcagaaaaggcaaggaagagaaccaattaaagttaaactctaccttatgaattcatgcttcgctgtgatgctgtcctgcttcaaggaaacacagacaagcaaacacaagggctatttttaaaaggagctgcttcccccaagccccatgaggaccagtaaacgaatgttaagtaaattagggttttggcacacttttaaagtttattgtacacagaaatataataagcacttaaaaagagacagccccctcttcctgtgtacatattgattgttggtggtcctgtgctgattcaggcaattaatggcctttttcctgcatctctgcagacactgtgtggactaatagtccatgatatatatgtacttatcactcattcctcctgctgctgctgctgctgctgctgctgctgctgctgctgctgctgctgctgctgctgctgctgcttcttcttcttcttcttcttcttcttcttcttcttcttcttcttcttcttcttcttcttcttcttctctctcctctcctcttctctctctctctctctctctctctctctctctctctctttctctccctcctccctccctcctactgcctaccttctccctaccttctccattgcaagtgacatttttaattgaaaggtagaggtttggtctgtctttagggagagactgcgtacaaacattctgttttaccccctaatgtgctcaggggccatttgtattttaaaaagaaaggaatctgtctatgggggccactctgtgacctgcagagtgtatttaccactgagacatggtctgcagtgttctcgcctggactggaaaatctcattcctgattattttatgttgacacaaatacacagcactgttttgttttgtttttcctgtattcaaaggaagcagtgtttctaggattggatcaggtttagaatcttacagcatccgaattttgcattttgtgccagcttcttaccaaatcatggatgaagagatgctttgaataatgttgaaagcaaatttcatgtggctctccttcctcaggtctacgctccttcagccagcactgccgactacaacagggactcgccaggctatccttcctccaagccagcagccagcactttccctagctccttcttcatgcaaggtaaggtgctcctcggcctactgtgaaatccccaggccattgagtgtttgttacatgcagggcaaaagaaatggaatcacagacagcagcagaagggagtacaagtgcctcccttcttaggaactgagtttcttaccaaattaagcagaactgacctgaagactttttcccctcttacgttaaagccctttgatctgtgataggttaaaattaaattgcttcacatgaaatgaatgccttgctggtcttccaagatggttggtcttcaatcgcccagccatcttccaaacatgtgcatgtttagccatgtcccatccaactcaggatatgttttgaagttcttgtatttttgtcaagaggaaaagagatgcccctcgggtctagccatcaataaagttttgaacgtcttagtagtggataagggggggcaagggttccactgaggactcagtgacccactgaaccatgggaatgtcacacagtgaaagtcgtgctgaggcgtactaattgatttaaggtaaaagaaaaatttgaagggcatacagggagcccacggcagggatttgtagctttgtggtggacagtggctgtgtgctccgttcatttatccattgtttttagtcaaaaacagatggctctatgtccctggagcctatactattgtcactggtcacttagctcctttctactaactggaaaaggccaggatcgtaaaaataacaccagctacttcacaaatggtctgttcagaagacagagctgcaaattgcatcctttgccatgcttagggaacttacttccagtggcgatggtctgagtcccaagataccctgagctcagaggtagggctcaccaagaactcctgtgagtacacaactcttccattatctaaatgtgcataccttacttgggtatgccatggatcaatgcagaggggcagggctgtcaggacagtgacatacaggaatgaggacacactcaggacagcaatactaaggtaactgcctggcgtctcactgagtttgcagagggtatacccaagacaactctgaagagaggagacttacctttgcctcccatgtcagctcatttcatggctggttcacatgtgaagttctaccaaaggtctattaaaactgaactgaacgggtcccttgggattggggagaatttgttgcgcacgtcattgagctcatggtcacaggcctcctctgtctttgtgacctgactgaggtgtaactgtcaaaggggcacagaggctagtcacttgggtgcattctgtgctatgacaacgtgctcactgccttgggctctaaacagtgggagaaactgccctccagatgctgatggatgctgccaactgaaggattccctatgtcaagatccaggctttcatcaagagaacggacagaagaatgaaacccctctgtgtgtctgagaaacttgttgtattgaactgtgtgcctagcaaaaaggccaggtagattaaagcagtgggtgcctttccatagctcaccccataaactatggggaacagatttgttttttttctgcatatgaatactcaaaaaaaaaaaaaccctccagttgacatttatgatgagcacaattaatttgcacacatttaattctattctttcaaaacaacattatgccaagatcatgggatgtgataaatattaatttactctgaaaagcataatttatgtaaaatacatatttttataagtctgcatcgaggagaatatgctgtgttaacaatccaaagtgtattgccaccccatgcatcgagctgtcagagtatttcaggaaaacgcttattcagtgatccatttgctcaatttatttgtcagatgcatattcccaaagtgttagtaggtctcgatcttcatatttaaatttaaggtaacatttaaacttccgtatcccctactaaatctaaagtatatgggacgttaactttgagttgggagcgatggctcagaagggagagtgcttgctgtgataagatggggacttgagtttggatccttagtgcacacgtaaattccaagtgcctgcatcctagggaggtagagacaggtatatccctacagcttgctggccatcagcctacccagaccacaaagctctaggtgcagtgagagacgctgtctcagaggaatgagttctggccttcaagttcttgaacacatgtttttttgcacacaccccatacacaccaagaccagttcactttttaaagaccctaagttcccacatggcgagaattggtagaaacagtgacctcatgattctgtctcgcacacatcagttccttctgtgtgatgcaaggtagccatggatgggctttgaagaacgcgtggtgatgcagtggggtaatgggattgtcagccagcatattttaaatccactactgggatctcttatgttgtatcttttcatcctttggttacaagtctacagtggtcaacatgacagacgtgggctcgcatagcatacacagttcttataggtagaactccaccacctcttcctctgtggtctatggccagactggttctgaaattctaactccagaatttaaaaagtcgggggggggggggggaacaggggttgggagacagcttcatgaaataaaataaaatatcagatgaaataaataaaatatcagatgaaatttgcctgattcaaaaggctatgagtacatacatgttactgtggaaataggcttgttttcaacaaggaatgcctaactaccttcaacgacaagctgatgacctggtgtgaatccagtactcgatttcgtccaaaagctaagagaggggaaagtctgggaatgaactaaccttgcttgcttgacatagttccgcagagaaacatgctctgttcttttgcagctgatttatttttaagttctttttttctcttttgctaagaacacaaacttaaacgtttctgtttgtttgacaatataaaaagccacttgggaaaaaagtaacgatgactgtggcgtgatgtaatcagctaagcaacacaaagatgaatacacaacgggaggttattttcaagtataggaagaaaaccctattctcaaaggcaaggctggacgcctcagaaaagtcacggttctctttgtcctttgcagatggccatcacagcagcgacccttggagctcctccagcgggatgaatcagcccggctacggagggatgctgggcaattcttctcatatcccacagtccagcagctactgtagcctgcatccacacgaacgtttggtaaggaaggttcccggggacgggcagagcaccgctagctggtttatgagtttcatctctgtgtgtacgcaagggctctgcaaaaaaaaaaaaagacaaaaatagctctcacctattactcttggagttttattgtttctgtgatcaaaggctcgacagaagcggatcacctctgtaaaccttccagaggcttctctgccattgtcccttcgtttattgtgttttgttcagttttctttatggcagtgtcagcttccttcggttcataaacactggattttttagttgcagggcctccacaatggcagtgcctggtctttttttttcttcttcttcttctttttttatcgtctgaagttctggagagtgctctgctgagggaagagtgggaaggatctgggatgacaggattaccatgttagttttgacctatggtgggctataggaaaagtttctgttttctgggtagccttgggaatagcaggctgtggaatgtctccatcatttggctttttaaattttaattccatacaagtgccattcattctgctttgctcaacatcccagtgagagctgccgagttgtgtaacatcaagtcttgtctcagtaagccttttccactccccccatggcttctacaaactgaccttcagctatgtccttgtcctagaggaatcagccacctgactctctctaggcttaagaatgaccccggccaagaaccaacttacatagttaaatctgtcattgaggaaaataaaaatgtctagatcatggtaaggtatgggatgcaagtcacatgagacttgagttcagtgtttagtaccatgcaattaaaatgctatggccctcaggctgggaagatgaatccataggcaagcgtacctgtaaacatgtggacctaagttcaaatccccagcacccatgtcaaatgttgggcatgcctgtgtgtgcctgtaacccctgcattagggaagaagatggggaagggagacagacagatcccaacagcttgctagagagccactctagtcaaaaacaaaagccttgtggtcagtgagaaatcctgtgcctcaaggcactgaggcagggagtgatgaagacacccaaaatcctgctctcccctcttcatgtgcacacacagctgcatgcacctacatgcccacatgcgtgtgctatacacacacttatgcatacacacatacacacactgatacatacactgatatatatatacacaaacacactgatagacacagacacacacacaaacacaatcaccgatatacactgatatacacacaaacacactaatatgcacacatgcacacacacacacacacacacacacacacacactgatatatacacacagaccttcaaaccccacaaatgtgaaggaaagtctatggtctgtgattgtgacttcgtctcttaatatttttttcccttgttttcacatttattactttttctctgtcctgacagggaaattttttctggattcctctagtctcagatctcctttgttcaatcactgcatatatagaagaaaaaaaaaaagctttatattcttccctcgtgccccaaagattccagatatagaagttctgatgtctgaaaactcacacttagttggtcccagagcactcgacatcacgtggtcacttagtctttactttcctgaggagctggtgggagtgatgggagtgtccggtttcttatctctcctgtgttccaatgtatgaaccacaaacatctcaaattttagcacattttcactaaatagcaaataactgagcttcagattgcctcttctcccaccccctacttgtaggcattcaagtgaaggtgttgggaaataccaactgtccctagaagatctcttggcaacgtgtttacttattcattctgactttgcctaggactcataatcaaaactggggaagttatggatgcaaattcaagtttggagtgacatgttaaaagttagaatttcaatccttggaagttttgtccacatgttatttttctcttccctatattacttcatttttaaatcatattttataatattgcattatgatatgattttatcccactagagttcactgcatatggagggagccctcacatgatgcttagatgcataaaaagcataatttcaagtcagaaaccaggcacattttagaaaaaagttctaatgaatcaacacagtgttgttgttcagagagaaaggtcattttaaagcaatgcctcaatagatcacataagaagaggcagtgatagagccatgtgttcatcacagagcccaggttcccgttcttaatttgaccagttagcaaatttcagagagttacgatccttactttaaagggtaaatgaataaggtcctggtaatgtatcctaatgagttttcccactgagagtgaaactattgcattattacatctagttatcattgtaatttcagtatttagccatatgacaatctctcactgaagtgactttgaagactctgacactgattgggaataatttgaatatccaacagcagtcagcatcttttatcttgaaaatagtgacgtttccctacagctcctgtctgtaatgtttggctaacagcatgttaaagggggctaacttagaagggcgagaggcatccctgattattttggctgtaattcgaccactaccatattatcactgaaggcgcaacttcttggaaacacggtgaacatcatcgttttccaccatgttataacagactgtgtaatgaggaagtttcaattctgcacattttaccccaaactgttaccagttttaagtctttaaatcaccctttacagttttggcttttacaactgaatcccatagttcattgctacttgtcccagacacacacgctgaactaaccccaatgaatggactttgtggttaagctttggaatggatttttatagaaaatttaaatttggaaagacttggccaagatgtttgaaaaagaaggatagaggcctcactgcctgacgggactgcgtcagagctgcatggtgtagccttctgaggcctctgaaatcttagcataatggaagttactttgtcatctatttctgtacatcagcactttacaaactgagtttaaggctgccctcaggaaccactagacaatgtttagagacatatttgttgtcacagctgggatatggatgctaccagtgtccagtgggtagaggcaagagatgctaataactatctatacaggaaacttcatggtaataaaatatgtgtcacaaaggccacgagtgttgagactatgagacactaccttggcctgtggcaccattttattcttagtgtatactacttattcttagatttgtgaatcttcaaatcaccaacccatagatcaataacaaacatcagtagtgtggatgtttgtaacatttacacgatcagtagactctcagttggataccagaaatttaaaaaacaacaacaacaaaaaccttgaagaggatggacatggaaggccacaacacttgaatgggccacattctccttgaacctttatagcaagcaggagggacaatggtgactggaggaagatcaaggacttgattcttaaatcttctacgggacactacttgccatcactaacattctctgtgctgtgttgttattaactttccgataacatcagttttccagatagtctcattgacaaggaatctagttataaatctcattcatttgtttcagcatctaattttcagtgtgtctctgaaaataactgatttagtatggactgcatcggtttccccattaaactccggggattgctcttcttccttcatagtctctgcacttagtgttaacccttttgtgggtcatgctctaaattatcctccattttccataaagttagaagagtccaaaaagtctcactgatggttttcctttttctctttcccatcttctagtttttataattaactaattaaacatttctcattattgtatttctctctggttcctcctttccatgtagttcttttttttctctccacctctatcataatcttttatctcagaagcagaactcgctgtgtctcaactcatctaagcttggtttttccagccttgtatcttaacttgtctttttttgtttttttttaaataatttgtaccatggagaagcaccactctgttattctttagagaacattgtatgggtgacttgggagactcaagtacccattgtaaatgaggtttcaccagtgacccaggggaaagttacctctttaactatcttatggtacatgggtatgatattttcaaagacatccatgtgtcagacccagctctaaaatctagatgcatgacctggactgtttggcagtccctcaaataagtcagacttcagtccatacacatggactgtcattgtatgtttcctgtatgtttactgcttagcatgaggtcatatgagctccattccctcccctcaagggagtcgtgggagtggacttgggcaacaggcagtggctgacccaggaatgagtgtgaggtgacagtgcagagtgcaggtacattggactgaactcatcagagaatggcacgcaaagggaagggcatccaggaagaggcagaactaagcagaaaagttggccagcactgcgaaaccacgttccttccttgttaacaaatgccttggttctagtacttgccagtgtctgcagtatctaatagctctacttaaaaacatttttagaaagcatctctaggcatgagaaaatagcgatccattacccagtctctatttttgaattaagtaattaaatgcatctccagtaatgatataataaaattttgtaactattaatttatcgcatgccacaaacgtctttatctttacatactttctttaacatcgaaagtgcatccaaaagcttgtcaacgcaaaaatgagagcaacttttaaccactgggttttttttttttttttttttacttggttggttggttttggttttttgtttatttggcaaaaagatagtctgaggtgtccttttaaatccatgtttccctttagtgatcctatcacccatgagatgggtatacaacaaccactgtgccaccttccatcatttgaacaactggtgtagaattaaatttgaagctaagccttaagcccagcgaccattgaaagatgttcttccgtgttagtcagctaaatagtatatgtagaaggcaaagggagcactcagagggaaagaaagcccaagcaagtctctggatacccaatcaattcagtgaggccactaatgtccgccttctcacactcaggctttagagagatttagcttttaattcttttaactgtttgtcattttctatgttttctcgatgccgagattcattgagcagtataggtccctgttattttgctgtgtagaggctagaggcctgggtccagtgtaacacaaacccggagatctgtatattgtcatcatgtacaatcttcgtcagttgtttagtaggccacaggaaaaaaaaatacgagaagtagccatgtctgcttctgaagtctatgagatgatcttgttttgttttgtttttaaaccaattatttatagatttggtggtcttggtctttccctggcatcctgggttgctatggttccatcctgggttgctatggttgctgggttccttgacatttgatacaaccacagatcaactttggatctaggtgtatttgattgttcagagaatgaaagctgtcagataaaacaggctgtttccttggccattttgcaattcggaaagcgtctcccttgcgatgttgtgagttcagaagactaagtataccgtgactgaacgtcttcttcctcctgctgcagagctatccatcccactcctcggcagacatcaactccagtcttcctccgatgtccacgttccatcgtagtggcacaaaccattacagcacctcttcctgcacaccccctgccaacggaacagacagtataatgggtgagtagtccgcatggcaacccagaagccagtgctccatggcggggtctaataatgaaggccctctttctcctctcacagtggagttataggcaggcaataaatgtttgtcacatcatcgagtgaacagatgaatgtattgagttcactggcttgcccatagccacattcttttttagtgacaagaaactgaaatttgacttggttgtccattatgagtcattaagttaaataagggttccagtagacccagaatcactcgcatctcccattctcaaacaccaagctagcaaagttttcttaagactattcatagaagaccagtgagatacgggaaccggttatactcaacaccagtagttattcaccacttcacaaagactgaacatcatgctccgttgtgaaccatgctgtgtcactgtcttccaaagacatgtttatatgaagctttcagttcacagtcattttaatagctagatgaatttaaccttcagagagagaatgtagcattagagagcccttgaagagaaatagtacttgttcacagaggaaagatgtctggctaacagtgggtccaaaattatttcctgtgggctttgtaataagtttaggctcaggcagattgttgctgccaaatgtatcctcggctcacatcctctgatgtctgtggtgatctcttagtacacatggatctctgccagtactgttttcctgagggaagagctagtcagggcatttagctattcctaaagggaagatactagttggttcagaggcggctacttccctgtggatcgttctgctgcacagcacatctagatgttcgggggtcctcatataacccaggactttactggtcacagtgtactctattcgactttaagccacacttgacaggtgcatttgggcattttggcatttttcttgttgctgtgaccaaatacctgagagaagcaactttcaagaggacagttgtgcttgcggtcatggtttgaagagacacagtccagcgtggcctggggccttgtccatggagggtacagcttacagtgtaaattactacatctcagtggatcagaaaactgagagcttaaacggggctacgctgtccccactgtggtgtgccttcagcccaggcaggccctgtggctcacagtttccagaatcttccaaaagagcaccacaggctaggaacaaagtcttccgatacaggagcctgcggggaacggttcacattgaaactgtaacagcttggcctttgagatcattcacagagggtcactgatgagaaactagggtttgttctaaagagaacgtcatgcagctgtttattgctttagcattttgtaattttttttcctttttcctttgaacttggggaattgtatgaatcacttacatgggagagttctcggtgaaagagatgatattaaactgttcaaatatactctctaggcaaccaataccatgcttctttattcagtaatttatttcacacttgagatgagccacctagcagccctgtcctatcacatctcacagagaagccaatttaggaatgagtttccattctgaaactttccataagggaacctttacaagaatgttgcgccagtctgaccttgcagagctatggcccgaggtaacatgggaaaagttctcttagcacccagtgaagttggggcagatttgaaaaacaagaagaaagaaagaaaagtgcagaactgaaagactgaaaggggcacacttcacttcagtgtggtttggcaaatggaaagccccttctgcagtcatgaggtcggttataaagaatggccggtcattcatccttgtacgtgacaggtttcctgtctactcgtggtttgagtcattttctttttaaggaagatatggaggtggagcggacctccgagttcaggaaaacacatttgggctctctgttagagaggattgtgtagacctggtctccagtgtctctgtgagtgaggcatggatcactgggtagaagagggatagtgcgccacgttatcctctgtgaaccttgaacatcttagctgcccagtacagtcagagtaagggttgcttgcctaagatggtcccattgctgtcagcttatggacaatggcagtagcctaagcacagtagagggtgtgagccctacagaggaagagcctagctgcatactgaagatgaatttgactttatatataaacctcaaggtcctgctaatgtccagacaatagtgaagatctccaacttaaaaagaaaaataagaaactcttagaacccagacaaagggttttttttttttttggaaatttaccccataaatcattttataataattagtattcttgtcaaaaatcttactagaaaaaagtattttaaaaagcatcataatatcttagaaaataagtacatctggcaattcaatcttacagtgagacatattcgtattaaatttgcataaatataaaatttattttaatgttactttaagggagaaagttcttgaatattccagtatgctctgccttaaaatactgtattctcccaattccctgtgtacaaatggcaaggaaccttgaagaccagttgtaagccttattctcctggctctctgaccctcacgtgtcttcatgtaaaagtctcctcggctctggtttggcatgtggaagaaggctgtgatggcagcatgtccacaggacacgaagagaagcactctcttctgaagtcagcgcgtttctctaacaagcagtgctggctaataggatacatctgtagactttgaaaatatttggcctatactcactcattctgaaatgcaggaaataaagaaatactacattgcctgtatctcaaagaacaaacagggctaattaaataattggtaaataaggaacacatagcccaacacatgtttgagattacacacatgatcctggagagagagagagaaaaaaatccctaagagcactaatgccataagaatgggttcaagcactaacacgaggacagccccagttttcaagttcttttggcacaaagttgcaaggcgctgcagctctctgaaacatggcacccatagctgccgaagcttcctgggttcagagggctgccatgagataatagttcatcacggttgtcagcctttgtcctaaaccgaccatggaaccccatggtgtctacagggtgaggtataagccctggagcttcgcgaggcctgcatctcctgtcatgtccatttgctgcatcccaaagatggaaagtgctcactcacttaggttggggacggctcatcacttgtcttgctgagacaactggccacgccttctttttgtttgctcatttgtttcttttttgctccttcatgttcagtgccagttcttttgaggaacatttatgaaacttttaatggcatatccattcacggtaaaatatttccctgtggcttatggcccgttcttgttcttcctagcaaatactagcacattctggtgattacgtcagccttttctggataggaagggtctcagaatcaccctggaataaatggtgtcaatagggcacagcatagctcagtggggtcaatagggcacatcacggatctaccgcagctcagctggcttagcacctgggtaaggtgagagttgaccagggacctttaggcattaattcacttgcatctgagcacttcagtttcattcctaaatgccatttcaatgccactcagctggcttgtgtcagaagtggtttagcccagatcgcctttatccaaggatgtactcagaggaagttcctagatgctagccacagagaacagagttgtctgcagggtagtacactttgctgtcttccttcttccttccttcctgaataatcagctcttgatgatcaggagggagagaaccttctgccataggataggtcagggaggttcccaagcccctgagccactcagccgtctgcagattccattcagagatttccatgtgtatacattgacagcatgctcttggagatttgggaccacaaaccttccctatccctcacagggaattgggcaaataacaacataatgttttataatagccacaattgtttttattagtctttaagtggtctgccttccgactatagaaaaagatgctatttcccatgttttttaaacctcaaaccaagtagtgttgaaggaacaggctactaagtttgatttaatgcaccatatgttaaagattactcagaaatatctatctggttcatgaattaatcttacaactttcactcctcctgacatgtttgtatgaaaggaagcatgttgggatgtggctttctagtagaaacattatgtcctctttccctagagaacttggtttcatagtaattttttattattattaagctagtcacataatacccagtctgtgttatgagggtcatgagccttcagatgaatttgggtgatgaccaggcacagacagaagtaaagatacattttatccagcagcttcaggtctgtagttataaagaccaccaatggagagcaataaatgagtttgatttaagcctctccgagatttcctgcacacagtcaggaggcccaccttcccccatgtatgcctggagcccttcccacgtggcattagtacatcacgcccattgttggaggctcttctaaaggagtcttggtggagcgttggcaatgttccattttatagtcatccctgtggacaaactcatggcattgctatgcttcttctccttagcactttaatgaaatgagggtcaccgaccacagttcagaagagcgtcatcgtaaggcagtgctggtctggagaacacaccgacttgtacttcccccgccctttgatgtcccctcttccctgccgcaggttatgggtgtgcaataaaggggaaacatattttccagattctgattctcagagctcatccccaggcaccagtcgtcctggtattttgtttggggtgtgttctgatgggaaccaccatttccccaaagcggacactcacggagggtggtccaacacccaggacaggatgtgaaacctttgtgtgtgtttctagccagcaacagcacctgggttggagccttctctgaacaatacttgagtggctaacagtatcaaacgttcctacaaaatcacaaagcttttcataattgttcattttccattcttatctttgctgtacttctacttagaggctgctttttgtgttttggtttccttttggggtgtttgtggggttttttgtgctttgttctttcatttttgtttttcattttttggtgttgctttgggttttttgtttatttgtttgtttggttggttggttggtttttgggttttggctttggtttttctgtctgttaagcaaaagaagttgattagaaccaaagtaaaactggtacacatcaagacaaatctgtatctgtgacgtgaacattagtgattcctaataatataccttgacagaaccccagtactaaaatagcaatgaagtcctaatatactgaagtctgaaaggtggatttgatatatgttttgctaagcatgacccactttccagtaccaaagccaaatattaatccatttgagaattaaaaacatatctcctttctaatgctgtgtggccttctgtatattggtcacacaaacaaaaagagacatctttaagagcggacccatctcatgttgaaaatgtgtcccctccgtgtttcctggaacagaacaaaaggcatgcccagtgaaagagtagactggccccagccaactgctttgaaatataagccttttggttgggctgtccagctcttgcaaggtaaaatggcttcatgttaaaaaatagtctgtctttatcagtggcttgcatgaatagcctttgtagttttctaaaacattcttatgaccagatgaggtaaggacttgattctatttttgattcagcttcctgagtcttaatatctctttgtataaagaagacactaatagcttagtttaaaaggttcggtgttttagaacaaaaaaaaaaaaaaatcacagtagggctggagagttggctctatttgagcctttggagttcttgtgaagacccagattcaactctcagaacctacgtgatggttgacagccatttgtaactctggtcccaggagacccaaagcctcatttttactttttgggtaccaggcacacatgtggtgcatacacaccatagaggcaaaacactcatacaaataatatagtaaaataaacaagtcaaaagaattttttaaatcacactaagagtatctatcctctcattttgtgaatgttcttagaatgtgtttgttggttttccaagtcttcctgatttgtatcttgaaaatggatggttccagggatagattttaatttatagtttttattttttaaattattcaaaagaagagtaagtcttccgaaagctagtgctatggcaagttttttaattgatgagcttttctttttttaatttttttggattcttggttagcaaatgtggggtttttttttcaccaatgtttctctgaacattcacttcatgaatccctgtataagaatcaggatgatatcatggattcttttgactgaagtctccacttaagcatataataacgaacagataatattgcttgatgagaaaacaatagtcgctcccatagatagtgtaatgatgcaagttgataggatactctgtgtctgtaactctccatcacaccccttttacaaccatctttagttgtttctaaaactctctaatacagaaattcccatttttcataccagaatttcgcctattttttgtcttaaatattttagtgtccttgatacctttctaagttgcttttatttgtctagtttctatgatatcagaaacactttctgagaatttgcccacaactataatctactatattcatatagcttgtgtacatcacccatttgtaatagggaaaagaagaggtttgtttctctgaaagtaaaggtaattgtgtttgctttgtgatacaggtggcacttgtcagtgttcctggaatgagcaaatgagtcggggggtgggggtggggagtggtcgtcgagtaaagcatatataagaaatcattgcactgatacaccacacatacgaatctacgacagggacagtaatacctcagctatacactaagcagagatgcagggaacgaaggcaggacccagagaagctgtaggtcggacttgtggagttgtggtcatatcccaccgcatccttgggtctggaaggagatgatccaagttacttagttaaaagggtctcctgttcaggaagactaggggatttcaacgcctttatatgtgtgcagtgaaactttgcttgaattcatctattgacttaatgtctcctcgttccatcccagtcaacagtgaaaagcaactcttggacaccattagtaggctatcctttagtctatacgctagcgttgaggggattagtaaaagcagccttccctaagtcctgtcagtccccccagcccatttccaccacgtggttgactggcacattatcttcagcaaaggagtcggctgtgctctatgtaggaatacatgcattactattattaacaacacatatacccacatacacacacatatggaaaatgtctatgtagaataataaaaatattcttcctcttcatagcaaaactgctatgtgtgtggcactgagatgcaagccctttctgctgtctatcaaatttttctttatttgatgataggtataaattattcatgaaggtaattgaattatatataaagaaatattggacttggaggacttttaaggtccttcaagtgtcacattttttcttagtgatgatgaccaccaagggctggcttggtaactgtcaccagtaactgctcatcagcaacgtgggggatgtaatggcagggggagcactctgtcttcaaaccaaggtgtcaggtttgtattttatctggaaaaaaaaaaagtaacatgactatatttgacatctacctcagcaaacaaattaatgctaattaaagattaatgtgttgtaattagcattaaaaatgcaattaaattgtgagtaaatggaccaagaatagaaaactgttagacgtctcactgcctggttttcatattctgtcttttgtttttgcagcaaacagaggaactggggcagcaggcagctcgcagactggagacgctctggggaaagccctagcttcggtgaggaaatattgactttggattccacgggcaccgctcgtagcagggtgaactttaatgagaagtggacatatggaattttagaaaataaatgcaaatagctttgatgaggggagcggttggggggataaggatcgctgagactttttgagggaaagctgttttacctcctttggctagcctttttcaccttgctgtcttattggtgcttaaccatcttcagtgagggccgggatattctccgggcctttggactcatagagtttcagtgagcatttctcttttctcatctctatagtatgatagatgcccattggctagctaagcctgactcatcaagagttggttataagacgctttggaaaagctacttgaaaaagaaatgacaaacacaaaaatgaggttcaggagggatttgtcatttctttggcacctgggggacttcaattctttgctttgtccacccactgcctggaagctggggttgtccccgagtgctccctagtgacaaaccagcactccttattcactcagccagagaatggttccttgcagtgtcttcaatcatttatacttttaaaaggaaatttgttctcctaagattttgtgtctttggttgccttttccctcccatggtggacataagctaagttcaactaatatcagcctttggttctaagggaaagtacttatttagtctgggctctcttgtgccctgcttgccaatgccctaattacagtacacacaatactgcccagccccttgtttggtgcaggaagagaggaaagttagaaagcagtatctctgtggtttgcccagagccattcagccagttatgggcgggaaagggattggacttgaaactggctgacccccagttccgtgtcccactgtcacacgctgccacagtgattcctttgcaaacctgaagtaactgttgcatttttcattttggaatgtttgtagtacagttgaatgttgcatgcgtttcgtgacttgtggggttttttttttaagggaactgcatggatgctttttgttgttgtttaaaaactgtttatttgaaatcaatgagagtttcttttcttctccactgtttcaagatctattctcctgaccacacgaacaacagcttttcctccaatccttcaactcctgtgggctcccctccttcactctcaggtactgtgtcctaaacttcatttcacagccatcacgggtgatagaacagtctgggtacctgctgcctgctgccccagttcctcctacacacccagaacctatagagatctcgaaacctagcctgcccatagaaaaacagaacgggtggataacaaactataatctgagggtacatttgtttccatttttttaaaagttggatgaaaagccattcattccttgaactcttcttagttgtacagatgttcgacagctggatcatatattccaataaaatttctcaaaaaacagtaaatgtagtcagaaatatctaatacttaattaccaaatataggctatgtaaatgattccttccctgaagacgtttgagccttctcccctaaattgaaatatttggaaaaaagtgtaattttgtatataaattatgtaaatgtgtgcagtaagagggatgtttctctttaaaatataataagttgctatgatgtatggcttccaatcacatgattataagtggtacagctatatagtaaatcattttagttttctaaggtacacatgagtgatctatgttcctacttaggtcatgcgaccttgttccatgcatcagttcatttgaaagatgggaaggtggcttccatacgaaactgtctcgtgtatacctgaccttactgggatttagaatagatttgctcagccttagtgttgtgtctctgagtcccgtgccattgcctgtgtgcggccctcccatgcctccccttaggccgaagaattccctcatagaaagcaagaggtttcaaactgcagaaccagtttaagaagagatggctgcaacccagatgggatgacagcctctctggcgtaggaagttcacagaacaggacagagagagggtcacctgggtcctgaagtcaggctattctgggtgaccaaactgaaaccgggaagaagcaggcgttttaagacggtaatagaataccgccaccacgccccctccccccacgcccccgtgtccatagtacaaatggaaaggaaagcttagtattgtgttgttctgtcttggcaccagattcttaggctttgaaaaaaaaaaaaaaaaaaagaatcatctcaaatatcaatctcccaaagcagaggaggactaagtacaaaggacttgagacaataacgggaggggaggatggaagcaggtgggacaccacattcactacttcaaacaaagcagctagttccgcgctctggaagtgtgggaacaacttatgtcagatgtcctggttttgtgcataagtgtaccgaagcgagggagggctgggtgacttgccaaggctgtgccagtaaccatgagagacatgcgtgctcaggaacctggtgcgcatgctcctactgtggcactgtacgtgaggttagggaggaggatgcacaaacctgcggcggagcctcaggctctgcaaccagctgtaggtagaggaagccattttggggggtcttggtgatgcattttgaaagaccacatgttaggaagaaagaacttttatgaagatataaataaggggacagattgctattttcacaccaacggctctgtccaaattctgtcaggaaaagtaattgaacaaaatatcctatttttgtttagcataaaaatatacaggcatacccagaaaagacaaaaaggatggattttaaacatacaggcagcaccaggcacaggatcttgagagatcacaattatatttttttcctatttttgaattatagactttatatgttttctatagtgggtgttaacattacaatcattttcaatttaaaagtgatatttattttgtaggttggatatagggaatatattctgaaaggctctttggaagaaactatgtagcttttaatgttagggaattttgtatctttctctttagagaactgctgtgaactaaatttatttgctccagagtttctgaggggggcccatgtaaagaacatgtgcttagcagggaatttgatccccagctccaaaataaataattaataaataaatacttgtttaaaggtttatctcatcccatagacatttttaaaacaagagcaaagttctcatgtatggacaagggacttttggttggacacagtctgaccttccggaaagacctagccctcccccacccttcctctatactcttgaaagcaccacaactatccaatctcctgtgacagatatgtatgtctcaaaggagtcctgctagctgaaacttagacccaataaaatattcctttgtacagagcagactcaagacacacacggggagccagcccatgaaaagactacatgttttacttttaaaagatgtccccagtttccagattttcatctgggaagactaagtgtagttatcatattgactaatagaaatcaacattgcttccttttctaaggatctgtgggtttaggtgcacagaaatctgattgtttttctccttttaatgtcagcaggcacagctgtttggtctagaaatggaggacaggcctcgtcatctcccaattatgaaggacccttgcactcactggtatgtcgccccctgggtctgacactctgaccaggttttcctttcttctgtcactctgcggtgcatattttcaatgatcgatacttgaagtcgacattaggaccaccagcttctgggagccggcatcattaggatgcctatctctgtttggagatggtgacctagatgcatcgagaatgaaagcccagggctccaaatacctaggaccggataggagatcaagagtcatcccaggagcttagtatagtgctctccttctttgggaaacaatccagagcagtaagtacataaatgtaaggactgggacacttgatgaagctatcttcctcctccctgcctgcaaggcaaacagtaggccatttcctcctaacctcaagcaagaggcctactgtccccttctgctgtggttcttgtagaaaggaatccagccatttgacttgtgaggaagtgaccactcttccccgggaaatagctgaacagttccatgggcctagttcatattataaatactcacaggatgattcaaagtctggcacttttatctgccccagcttagggtgggtggagctggaattacgcaagacacttccctgcacagtgcaggtttggtgtgtacccatgagtcaaaagtggtggggagcccaattctgcctcgggattgagttttctgctcttcttgcatattttgagaagaaacacggaagaagcaagcctttccctgtctccacccatgcgagcctgtctatgatttaggggctactgtcttccttctcagcctacttttgaaagggagatttgcagatgaaaatgcagagtcttccttcctcgtgttcttcctttatgagccggatgaatcacctagctgtgcattttagccaataaagacaacagcccagctttttcattgacagactccatcccgatagctcagttgttctaagtatttaccctctgcagggtggtctccatagcctagccctcaaaagcaggctatattcagctgtagaactggagaggttggtacatagctgtggaccacagcttggattcctcatacgttctgaatactcccagggattctaagtcgagatctttccctccagcagggaactgttagccaggaagtatgacaggcacctagatttccttctatgctcacattgacccaaccatttaccaccatcctatcttttacggattaaaaatggtagattcagagaaaattagtaatattcctttggtcaagtaagtagcagagctagcaggctagggaacaccatacaacttgcaagcccaccaaatcaaaatgttctgtaccgtagactaactctattagacacacattcctcctgtcagtacagaataattagaaattgcttttctcatgcagtagagctgatacatctgtttgcatagtgccctggaaaccaaagagaaccaagacagttctagtagaaaacagcactagagggatgatgaaggaagggagggagggagggagaaaggaaagaaggaagaagaaggaagggagataaagagggagggagggaaggagggagggagggagggggttnnnnnnnnnnnnnnnnnnnnggaggggaaaaaggaaaaagaaaagaaaagatagattccaacactgacaactacttttggcaataagacacagagtaattaatcaacttaatttttgagcttcatttttcatgtctatatggaaagagcacccctgtcctgtctatgaatacatgtttaatatgcattgatgagatggtgtattttaatgtatacaatggcaagcagtaattgatgtatattaatcacatagtaatttaaaaaatgaagacaaaactgtgtactttttcttcactgttagctatagcataagccttagagagttgaagaaaactaggctcctaatgtctaaaatgggggtaggcttattggcttttaattgcataaggtagtgagttctctgctgccgtaggtatggactttgctatatggtctttgaaatcagctgtgggtcctgggtagatgatcaagcaaaatctttgttattctttagtcctgtgctttcgtagcactttgggtgacagaatttttaaagatatttttgctgtaacaatttctgagccccttccctacatgcataatgcaggttaatattgataacagatttttttaaagtgggggagggagaagggggcttaaagttgcctaaacttttacctgtctctgacttgaagaaacatttaattcaaaaaccaaaaatagatcatctttccagtactaatattttagcccttcagccagtgcttgccaaagtgttcctcaaattcaatgcatgttttcctctgttaacataaatctcagttctctttcaagctaatggagtccagtgtagcatatgtatataataatgtcctcaaagaattattgaatttactttgttcatgaaaaataacactgtaactttaacattaacattttccaccagttttctaggaaggacattatttatttttattattgttctaaggaaacaaactttattggaaacatatattccgtaacccagccccgtctgtagcagcccaggattctgctttgtgcaacctgtgcatgcatgcatttccaactaaatccgatttcacctcacttacaaacccacagcaaagccgaatcgaagaccgtttggaaagactggacgatgcgattcatgttctccggaaccacgcagtgggcccgtccacagctgtgcctggtggccatggggacatgcatgggatcatgggaccctcccacaacggagcgatgggtagcctgggctcagggtacggaactagtcttctctcagccaacagacactcgctcatggtaagtgggctctgttcatgtagaattaaaatggccgcttttgtaagaatcacttcatgagggatattattgttcacaatatggatagtgaacagctcagcgtgttttaggttgttcacaggattgcgtgaccatcacgacagtctaactctagaatagtttcgcctcatgtacaaagagagaaagccactcaaccatcacacagttggttgagtggccaaccaaccaacccttcctacccttcctgtgtacccacccttcaactcctggcaatcaccaagttacttcctgtccctgtagattctgggcatttcgtttaaatggaattaaacaatccattggctttttattattattattattagctcctttcacttcatctttttttaaggtttctctgtgttttaccacatactatggttttatttgttgttcttgccgttctacagagcacattacattgcccacttaccagctggcagatcctatagctgccttccctctttgacacttgcaaacaaacactcctatgagtactcatgcatacgtatttatatgagcatgtgtttccattccacataggtattagtaagttgctagatcaccgctcatacgttcagttattcatcttgataactttgatccaagaccacaagtcaagttcacgttacatcattgccattctaaagatgagggtggtttggtttgtctttaagaaactaaaatgatgcctttcagtctcagggttagaggctagaaatcagtcgtgtatttgccttttttgggggggaggggtcagagacagtttattagaaaaatgttaagtgataacaattagctcataaatggtgtaagtttcactttattgctgaattttgagtagttctgccccttacccatacctgctggtaaacatcctgttgcgctgcttgccccatgtctggtttccaaactgcttaggtgaggaccactctccatcctgtgatgcaacttttctcacttggagatgcttccaaaaggaagtgcaaaataactgcgaaacctcgcgtggctttttggtccttcttcaatttctcttaattgaaagaccaagatgcagagcgccaccctgcacagtatattactgaaacctgcaaccgattagggaaaaaaaaatgtgagtttataaatagaagcagtgaactcacttctaaaatgtggaaagatatttttgaatgccaatgctaaaccttttttccctacttttttctttatcttgacctctaccctaaaaatccatcactgagtaaaaattgtttgcatgttcattggcagttgctaaagagtttacaaaggcaagtctagattttaatttagcctggcctcaggtaatgtgttaaacactagggatgcatttaatatgaggttttcatttgtacagctttctttttccccctgactgcagtgtttaaacaacactgcttttaattaagaaatctggctttattaaaatccagatatgcgccttataaccagttatgtatatctgctctcaatcaagagaaaaatagactaatttctgtagctgtgttcactttgcataagttagctggatgcggcatgcacccaagacattgatgtaaaaactgtcttttccataaatatgtagtttattcttaaataccagatggagtctaagcatttctttaatgtattaaactgtacattgttgcttttttggaattatttgacctttgattctgagataggacaggaggaaaaaggggtgggagaaagacaaaaaacactagaattatttttggagaggggaagttgaactgaccccaatggaaagtaaagagagagaatagaagtgagcacctttaaaaagacaaatgattggccaacaactttaaaaagacaaatgattggccaatattacacagacacctcttagatatggttgctggggtactaaaaaagaagacataaagttgagagttctactgatttaacaaaagttacctctcactccaaggattcctcctgtggagccagctagatcctggcgtagttccagagatgtgcctgttgagtccaatagaggacttgtcaccttctttgctttctagaaaccaggcagtgcgtccctaaaaacccggaactcctcacgtgcatgaagagcagactggcaaatctttttctcaacagagacccgtatgaattctcaaactaaaacctaagaacaaaggaaatattttttttttgaatttagtcagtgtgaggttagcctttgaccatttgacacattccacaataacaaaaaaaaacaaaaaacaaaaaaaaagttttgaaaggaagcaaaagaagaaaaaaggaaagaaaaatcccctctacccctaacaacaacaacaaaaattcaaggaggatgctgataatgttttccacatttggattttaatacatgaaacaggcgttcaaaccttagccagctgcaggaaataaagtagcgatgggaggtttgtacaggaagcagggcaggaagggttggaaagaggctggcctctcagctccacgccttcctttgttgttctggagtgggacagaggtacagaaacttgagactcatcccaaggctggttttgttttgagtaaatctcccttctaactctgcctccccactcctcctgattaaagaatagacagttccaactggtcttgaccttcacctttttccttccctccctgcctcccgaatatcaaaacaaaatggcctgggacactggaagatgttggaagccttcctttccccagcagcttaactgatggggaacactgtggtcctgcctcagctagtgtgttatctcctttaatcgctcacatattgcacttagctttgagtctcaaaatgtcttcttttggtcttgtgtaatttactaattattcatacgatgaaagggattccctccccacccctccaccccgcactttgacatggcttatacaactggagtgaatggcagatactcggggctttctagatagcattgctggactgcttttcctgtctcagaaacttgtaggcatttccactgctgtaagaatagcatcagctccttagctcatccgtcaagggccttgatgatttaccaaaagccttataagagccattccattatgcaaaggttttccagccagaccagtgtatgcacattaccagaactggggccccattaagtacttcgtttgcacatgtcccaggttcatccgccctgtccacttctctcttctcacccattgtctaagttctgacaaacccttcctcttccaggaagccatccgttgctgcttctgtttatagcagccattttctgtaccccgtgcacctccatcacatagcacaacgagtcatgacacttgcacatagttatcttacccagcttcacaccgctgtgcatcttttctaggtgccactgcgctctgcctggctgctgtgtggtccttgagtgccacattttctagtgctctccctcccggggaaaagactagctggtcccctctggtagcatctctggtggcattcgtaacagtccagtgtcaggtgctatgttgggtgttgggatatgagcctcatgaattcaaacaagtcaagaccatggccacatttaagtctggagaccttactccgagttctgtttgacagacatacctccttcctggacattataaacacacctttaaagaactcatttttggtgcagagtttgtgattttttttttttgtatcttgataaatgttggttggtagaagaaggttctgtatattttatggtctggtttgccagggcaactttcttctctccagtgtgcagggtgcacgtataacatgctcagggcaaaacatccttctcaaagtgtcttcctgagtcaccgtgtacatgccgagtggccaagagttgtaaactcttcccccttggatccctgaggatagagtttcaagccatcaagtaatgtttcttaccataacagcctccttccctggcagagtcaaaactccatggagaggagaaggaaacacttgggtctgtctcttacctcgttaggaaaccttaagcacatccacacacactcacatctcactgttaatcttggcatttaaatctgctctcctgcaaaccgctttagaaacagtcttccaaagccagttctcttccatattctctggatattcatactcacagaggaggcctgagagaagccttgcagatgacctcacattgtctcctaatggaacaaaaccgacaccaagcatgtcttcatgtggccctgtgtgtgccccgggaggttacctgtagatgctcggcgatgctgtgtgtattatccatgtgtaatgactctgttctcagttcctcttttgagtgaattctgcttgttcatctcacgaccatttggctgtggtcgctagtgtcaggcctatgctcagttatggtctctggtctcgggggggggggggctcacaaaccagttggaaagaatcactatctttaaacaaattgctgtatgcttgtccaccagaccctataagaaaacagggactctcttatctagaagggacagcgtcatgattagctgatttaggagaagtgctgtgtgtgtgtgtgtgtgtgtgtgtgtgtgtgtacaaaacccagggctttgtctaggtgcactaccaccgagctatgactctggccctcatttccttttttcttttttaaaattagaagtagggtttctctattatattcaggtttgccttaaacttattagctcaaggaggcgtggctttgaactctcaatcttcctttctcatccgccacccccacccccttcgctgggcttacaagcttataccacaggccctaaccttagtaatctcctaagaactgcggctcattaagagatggaggagtcctgtgtcacttgtctcccatacttgccctccgctgcatcccttcagcgaagtggggactgtggaacacactttagagcccactgatgcatgtacctcttagctccacttccttctttccagagagttttattttgggcttaaaaattcattcaatgaactcatatcaagggagcaatactctttctttagctggtgtggagcatgaaggaacttagagaatgtgagacttcatggacagacagttttcttctgcttgcatagttgagtttggattattgaatttaggttctgaaaatggcttacaagtcagcctgttgccattgttttgccactgaagactgagtctcagaaaggggaagtgatccgaccttgcttgcttggccagttaattgttgagctaggcttttaaacagcagacgggccagcaactgtatcagcattttaaaaataacaatgctggagattggagtcagggccttgtacatgcttgacaggtattctcccagtgacctatagccctggtccctaaattcttcccaccatatcctacgcagtacgtgtcccctcttacctagtaccccaacagttttaactcaacgaatggtcttatgacccctctattccttattcttgggtaatgaactcaagcacactcttcagttgtccctggactctcatttgtgagcagcaatttatctctgccactcatactgagctatataacccagagtacccactgggtgctatccctttgctgcctcgatagtattgccttaaaggtcatcttggcagacacagaaaacaggaactttgcctgacagatggcgagcagaggcattggcccctccagtctttacagatcgtaagtccataaagttctacctgtgcttgggtacatgttccatgtacgtgcagtcattatacagaaacccagggactttaaatttaaagatcatctcaactctcatctccatacaaattatgttggtcagcatcccccccacacacacacacacctcataaagcccgtttcccttgtcaagtggcaaattttacctcaatccaatatccacacacaggtcttgtctttgtagagagactattcacggttttctgttccttaaagtcagcatccatttcttcaaatattaacctacaactgagactcctgggcccccctctaaggccccattggttcgtgctgtctgctctctagcttggtcaaagattccactttcccactgtaaggaacttttagcaaatggaatctcaagatgaacatgatactcaaggggtttttagggtggacttactaattcacgcgctcctgcattctgctcattctgtcaagcaaacatcttatttgctagtcctgatgccttcacagtcttgttgacacgccttgaacctgtactctataactcatgactaggcatccgggctgactctgccccgatggacttagtgttgtgtgtgtccagaacccttttgaatctcacacttcccccttccatccgcctccagtctatagggccacttcacgccctcattctgttctattctctgccagctctatccctgacagatgtggcgtgcgcctttaaagtccacatcaaagccaccaataaaaatgctggccagggaagagcatggaccaaaaagccccaaggctcgagacaacgttcattctcttcacaccggtcccggctcttggagttttcagtcacggccagttctgttccctacttctgtccatggcgcttctgctataaaatgtccaccctgttggagaaagagcccaggcatgcagacatccactgggagtgaggaaatggggtttgcctagaggaacttgtttttgtttaaaccaaattgagttcgtggggctgttgctatcctacacagcacacagacactgacacaagcatcctgctatagaatctcaccaaggagtgtaatcttcagtcaggtttcagccatttctttcttactgaggggttttattgttaaaatcaggacagttgcttgcctatagaattcccctgtctctgataatctccttgattatcaaatatccctgagagtagattagcagcctcaatggaaagatgtttctttgatattcctgtcatactttttaaaagaatactttaaggagacaaaaagagaagaagaagaactttaaaaagttctctcaactagggaggctttgttcaaccgcagcttcagagaccctaagctcacatcgcagttgtattctgccttcattcagcaacagtcagactctgtgcagccagcgccatgagaccatttcacctggagagcactgactagaactccagccccacagacaccaccgggggttccactaggtacattctctttgatttcccataacctctttattcaaattcaggccgcatctacttagatgtcaccccagccctctgctgtctgcgctgctggagcaaacaaacccaacacacctcctgagcatcctgaagccatgtgctgtggagcaaataggattttagagtctaggatttcagggcaaacctgtcctggccaacctgtagtacagtgcatgcctccatttaggacaaggtaggattacagagtaactcgggaaattaccagcctaggagaggactgaacaaaggcaggagtccgtgcagggctctaacagttccagagaggcgagctagagaaaccagagcataaacacggtctcaaaagaattaaagaaaaagaaaagtgcttatgtgctcaaagagcagcaaggaaattgcttgctgatccagccttgcagctggtagtccaggctgctccaagcccctcccccacggagcagcagcattcggttggagcattgcatgggagagtccacaggaagagtgagttttcatgtgtgtatgtatatatatatatatatatatattttacacccaaattaaattaactcatggaattttccacccttgggtattaaagtagcagtccatgaagtaatatggttatgtcattcataccaaaacagaaaatactggtgtagcttggcactgtttaaaagccaaactgaggccctggccattttatatttcttcaaattccctggctgttgtgttagttttaacttttattgtggccgtaaatttttcaaatcaagtattttagccgattaaaaaacatgtgtttcaaacaaacgaaacaaaaccaaaaaagcaaagtgaacaggttcgaggcggcaagaaggagggtttaggaaaacttcagcgttggggctgaaaatggaaagacgggaagttacattttctgtcagatctaattggttgaaattcacagttgtgcctaattatggcttcccctctatccataaatcatctgagaaccgtacagctgagggtagccaaaagatctgtccgatattagtaaggggaagcatgggtgtacaatagccacacgcccttgaaagcggctaattggatgtattgtgaaaagccacaggactgagtttgcacattttcatttcacatacgcctcctccccagtttctgtacacgctcagccctgcttggagccgcaagtgtgtgaaagttattggagaatggtagtctctgggtaatgttgctgtaagctgcccaattttccccctgcagactagatgggaaacagctggtttttgttttaaaagctgttttgagaactgtctgaatcttgagatatagaactgaggtcactgttaaaagcaggtgctcacggacaagtgagaaagctgccaggggctggccggcttaggaatcggctgcagggggcttcctcttagaggaaaaagtggcgaagtttgctcctgtgtccaggacaccagccgggtgaagttagtaatcacattagcaataccgttagaaacaagagtatccttgaacacagctagcccttgggagaataattagctcagtacgaaggaatccaaaatggtcatttcctctccggggctacagatccaagggtctgagcttctacagctcctccggggctttcaatgcttgaatttcctctttaaacataccagtagtgaaataactactattttacataagtcataacccaactgcctgggtctgagtagggcttttctctcttctcttctcttctcttctcttctcttctcttctcttctcttctcttctcttctcttctttccttttccttaaggctatctaagggaaaggggagaaatgaagccctcttggcacagtttgcattgaagcagttttgaaaaaagcaaaacagaaacaccaggaagcactagcgatcagggcagggcagcttcccattctggggatgaagggaaataagccccctcttcccctgggagcaggcagttattgacagctctttatccagtcaggaactggggggaattgagagtaacattgtaaactcttaaaaaaaaatagaagaaaatctgggaagttggctcagtataacaattctgccttgccaaaaaaaacttcctttctcagaacacatgtactagagttgagcaatgttgtgattctctgagattaccaaaaagtttgtcccagttaactagggcagaaaggggagacttcacagcctcaaactggctattgagtctgttcctgcttctccatagtgactctaaaggggccattgtggcccctacccttcactttctccatcaccctcctccactaaacctttgccatggtcaaacatacacagttagactttccacacacctgctctttgaggcgatgctccatgaaatactgaacaaggtacttagggcattgtggtcctccccacccccgaaaggaagaattaaaaaaaaatggatattggcatttttccttgatttactgctactcctaatgtcattttcttttattaaatcctttcttttgcttttgatcttatttatagcagccactggtcatatggaaaccattactgtatagctgggagatgaaagccttcgttgcagttaaataagagtgaatcatttgagccaataatactcacatacagtgaggtgccatgtgtgtccagaatgccctgtgcatttgctttgtagtggagttgctgagctttagaatggtctgcacacacacacacacacaatctgctttctgtcagagatatgtagtctgacaatatgaaaacacatgttaacacagaacccttagttgcttgcttcatgtacagagagacagaaagatacagaattagacagagagagagagcgagagagagagagagatggggtggggcagacagacagagacatggagagagaggcagacagagactacctagtgcatttattgatgtaaaaatataaattttccattacagtgggagattatgtaattagtgtcaaatctcagactattacagataggtttagagaactgccatcaaaatcctccttgtccttcaaacttatctcagttgcccttgtttttccaaatagatgtgactgcatcgtcctttaaaccctccgtgaccttgttctcttttaagaaatccattttattgtgtcttatatcataatgatatcatgccaccaattcaatgtgtctgttaagtaataggtatgtttgtctaatgttatttttccccctctgggtacctaaagagtgcctggcatatggatatcttaaaggcatttgttaagttaaatggaatgtctgttattggtcagaaacatgcagagatggatatttggcatcattgaatgtcataaatgtcagacctctcctcctggatgcacagcactggtatttggggaacagtcacctgcacactgaaatgactgtggtgtcctgtgctctggagccaggccctgtcccagtggcattcacaacccaggcaagtgttggctttacgcagagcaaagtttaaagtctatgcccagtgccagccaacagcgccttggctgcgttttatgcgcagtacctgtagtgactcagtcagggccagcacagcagtggcaaaatgcagaattatggagatctccgctgtcttgaaggggttagagacagccctgtgtttatgaaggacataatgaataagctttgagggggtcaagagaagagactagcccagcaggaaggccttcacttggcccacagtaatgttggagggagcccagccactgaggagtcatacgtagatagcaaaagattcagattgattaatttaaaaataagagacaacggagagagtcccctggtgtccaggggaagaatcaacaagcagaagatggaacttgcagacttggcccatagaacacaactatgcttgactgagggccaaatcctggggaaagggtctattactccaaaggtgaagatttccgaagagatgggcacgatgcatttcattcatttgagcagacttctttatacctctgtcccttctaaaaatatttactataggcatttgttaggtgctatgtcctgcacagcctggcactggaaacctggctggggaggaaagcaaatgaagaaagaatgagcaccaaggaaagggtaggcgtatacatagaagctgggatcaggtagttatatctgcactgaaggagccacaccaactatgctaacaacccaagactcactccatgtgtttattatatatagcgcagagggaggggttggctaatctcagaaggaggtttctataggtgcagtatcaggacagaaacatccttgttgttacttgcacatgctgccagccttcacactcaggccagagtaaggctcagccatcactccgagcttcaccttgggtggaaggctttggccatccccgagggtctgaggcacagttctttgacatggccctccctatatcaacaatctacacttcctcaggacgtcatccaccctctatacctgcacggagcacatcctcagctccccacaactagggaaactatgagtagatgctgaatgtcatggtatgcctctaacgatggccagtttgtgtggctccagaatggtgtgcagggaagtcagctgcaagagcagacacatacacatacacgcatacgcacacgcacgcatgcttcagggatccacagtcaccagtgtgcagcaatcgtccagctggtctctaaacaaaagaaacgacttccaggtcattgcagatcctcggcatgatccccatgattggtgggtgtggctcactatacctggatcaatgttagtcccatataatagattttagtaccctgctacctggagtagagtggactgggcgccccaagtcaccactccagtccctacttggcccactgcatcctgttatcacctccactgtaggaaaatgaggtaaagagctggagtcaccgaacgctggaaatacagaaggaagaaacaaaacagttctaacacatgagactaagagaaagaaaaccaaactgaattcagtgtttacaagtttacatctttagaaccctatcacagagctataaccattttttttggtgtatggtacaggggagtggtctagttggtcacatgatagataaatcctactaaagccacaatcaattagactctatgcaaatcactggaaggggctggggagagggctcagtggttaacagcccgggctgctcttaggtttggttcctagcacctaaatggccgttgagtcatttggaactctaattctaggggacctgaaccctcctttgaactctgcaggcatcacatgcagatgctgcacagacaacaggtgcatgctgggaagacactcataaacataaacgaagtcgatcctgaaaattttaaatcatcttaaaaattattccatctcagaataagcgctaactatatgtctaaaaagaaaccacagtaaatttcagacaaagtgggattccaggggtggggggaaatgaggtattctcacgacagttatgaaatcagctcccagtaatatttaaaagagtcaaggaaatcagaacaccagagctgtacccagacttgctttcggtgagaagtccctgaaatgtttaatgatgagaatgattacaaaaaagtgataatttgaaaaaactgagtggttaggggattgtactcatggttcaaggataccctggatgatagaattttccctgcaatggctggctctagaattctgttttgtttgctacaagtccctgggtcttaggtacattcctcacagtattgatccactgctagctttgcgtgagctctgagctccaagtacaaaccagtaataaataatcttccatctggttcctacctcgttaaagaatccactgtttgcctaaatgggattttgcacatgggcgaatataagtttgctttttctctaacttgacagagatctaagaaggtgacagaagctgaaattgagtatcctttaactgtcatatattaatgatattttatgggcagattgcctttgaacaccaaaaatgtttgctgtgtcaataagtcagaatgacagggagccatccccaatttgagtgtgtgtgtgtgtgtgtgtgtgtgtgtgtgtgtgtgtgtgtgtgtgactgtgtttgtgtggttttttttaaacataagagagaagagtaagaaacgaatcaggcatcttcctttttagtccaactttccttgttgttgttgtttttttctttctgaaaacagaaagcgatcaataacaagcatcagttttcaataagccaaaagttccaataacatatctgggtttgcgccactgttacatgggtctagacaggggtagatgacgtttgccaaaagtccccatcctgctcttttagaaggattatggtagagtaggaggggccagggtctgaaagcctgtttggaagcagttatctctggcgataacattaactagaattgaataactgccaaatgaaatttaatacattttcccatccatgaaataggcctcttaaatacaacagaataattactttcacaatactccctggaaacaaagagagcaaaagcactgaatatcttttttgtttggggtgtttgttgttagctcgaggataaggacaagcgccttcgctgagatgctcctcagcatccctgagtagaatcagcctggccagcggccacctaatttgaggctgcttgtcttttaaatctgtttatgttggaagagtcgtggcaaatattaaattctgtaatttagttagacagcttggccttggcctgagttggtcagctctgattttatttttctataataaaaataaaatgatccttggatatacatgtatctatatgcatgtcgtatccataaacatacgtatagatacctatatatctatatatgttttatgtgcactcacgtgcacacacacacacacacacacacacacagagttttctaaccaaagctccagaagtcaagcccgcatgtgacccttaactcattttcctctcgtaagtgtatatttatatgcccagtaaaattgtttaatggcataagctttctcagttagattagctcttttctggttctaaactagttgttaggtaagtcacttggccattcttacccctagatttcgtctctgaaatgaagcttagacttcagtgtccctctaaaccagtgagtctcaaccttctaatgctgtgaccttttaatatagttcgtcatgttgtggtgacccccagccataaaattatctttgttgctacttcataactggaattcttctacatttgcaatgtaaatatctgatatgtaggctatctggtatgcagcccctgcaaaaaggtcatttgactcctgaagggatcgtgacccacaggttgagaaggactgtactatgctctgtgagtttaatgtgtctaattttcttcagaaactgtgattatttaaactatatggtatgtgtgtgattcaaaaagttaatataagtctaaatgaatttgattattctgagtgataaactgaggcaggtgaatttcaattctggctgcaccagaattagtgtatgttctgacctgagatccaaagtaacttagcttttactttacatggttgatcaggtctgcagaaggagcagaccaaggcagctgtgttgttcgttttatgaaccttgaaccacatgagcacagagctgtgtattcatattctggcccgtgttatcttcaaagagaggagctagtccttcaggtagtcttgactctcggaactttgaattgctcacagcagttacagagccaggaagtatgttcccaaggatgctgtagaagagaagagagtaggctggggcaggagggccggagccagaggacagcacgggttctccagaggcacaaacaagtggggccagcagcaggtccataagagaaaggaattgctcttagtttccagggctctctgggccccaaactccaatgttttaggatgaattttattttattttagcttagatatgcctctgtcccatcttgccagaacaccacatacttatggttagtacataagtttgacaaggattgctgtaagccctgagggctggatccatccgacttgttcatctctctgtttctcacacttgtacagtgacggtgtgaatgaagtgaatagtgtctgataggtcagtagtaattaaataaatcagttttacatttcacctttagtgtgtgagtacctcaaactacattacaatgactacagggagaagagtctatttattagtggaaaaattaactattgttacaaattacttttaattctattcaatctagatagaagttcatcaaaacagagctttagtaagcaaggaatttttaaaatatacactgagccgggcatggtggcacacgtccttaatcccagcactcgggaagcagaggcaggcgaatttctgaatttgaggccagcctggtctacagagtgagttccaggacagccagggctatacagagaaactctatcacgaaaaaaaaaaaatcaacccactgattaaagagagtttttttttggttatgtatacttagcctgtgataagttagtaaattcctgagctggggcagggaggtcccctgtctgtctggatagctatagttgtaatgggtttgcactagtctccatcaccaacctgccttgtgttttgtggggctagcgatgatatttctaatagataagtgaatagggttgagatatactgtctgtggccaagaagaccagctgtccaagttaactcctcagactggaatagtattccagagctacaggctgcagctcattaccacctggagctggacccatccaaggtcattcacataactcaaacgacacagaacactgagacatcaaaggcactcgcgaccccgagacgctggggctctaccttctttcactctgtaatcccagactgtcagtcagctgagacacagactatagcgaggtcatacattctttttccctatcgtgagaactaggggagagaggaaatattcaattagcatctgttttaaacgaaaaccacgaagagcacctcaaatcttcccacagctgcctacagagaaggcccctgaaggagaagtgctgtcatctatactaaggttaaaactgcagtcactttcagggttcccaacctagagtcatccctatggaaatgcaagatagtggatgcattggaatttccagggtaaaaatcacaaactaaaacctgcttggaaagtggctgcctttcctattcctgaggaaaataaaaaatatgtgaagtattggtgagacatgcctgaaggagtaggtggccagggcctgcctgtagaaaaagacctgagttcagagagagcctgcctgctcacagagagaggatttgtagtctgtggtgctctagttctgaccctggggctggtgtctttcttaaaatccgagtagtggagatggtaagaaactggaaaaatggccaaacatcctcacacggcaatgatggcattactggtgtgtttaataaaacctttattggtatattttccggtgtggtgctattggcagaagtggtttccccttggatttggaactctgcagctgatgaaatacagtgaacattaatttggaatgggagctgccagtttggggaaagccaggtgacattttattatattcgcgccgagcaggggctatgtcccatactgttacagcttccgctgtcagagacttagctggcattatggaaaaagagatcgagagaggaaggaaaaaaaaaaaaaaaaaaaaaaaaaagaatggcaggcctgagaatcttatcccctgaaatgaaagtcgaatgccaaattgaaattcctgtaggatttccgatagcaatgggggaattgagaagcccacaattaagcatatgggcattaagataattgtcggatctgttggcggacatgatagaagacagatgggtacgaatcagcgcgctccactgcagcaccctgggagacaatttgacgttttacctgcctgagctgctctgccatatttgtcactggatgtaaggcatggcatcttactgagtgttaagtgttggttttttgtttttgtattttttcttttctttttctttttgcacagaactgtaggtgtatatacagtccttcagcgccctctagtgaaatgcactgggaggatctttcctcttcccccccccccccttcccccaggctacccttactgcatcaagtcccagataaccccctccctggaaaatagctgctgtccctccagagcacactcagccctctgattccttttgttgtttcaggttggggcccaccgtgaagatggcgtggctctgagaggcagccattctctcctgccaaaccaggttccggtcccacaacttccggtccagtctgcaacttcccctgacttgaacccaccccaagacccttacagaggtaagtcacgtctgacctttggtgaacagtcgacttcatattgttttcaagcatccttggctgcatgttggcagccctggcagaaaaccaagaagcaaatttggtaccaaaatggtaaataatgggaaaggagctagaatttggctggctgattgtgttccttcggtaactgtttccctcagccgtcctctgacatcccagtcccatctgagaagggaatgagacgacagactgccgagaggaaatgttattttagctatttccacattttacgaatttagatcccctaatatggttagttgtggcctgaaaatgaggtttccaaatgggtcggaaggaaattgtttttgttgtttaagatggaaggaaatgtaggtacattaaaaaagagaggggaaaaaaaaaaggagttgggttggttgttgtttgctctggagtgatcaagccccgtaacaatgtgtcatgtggctgtgtgtcacccccacccctgccccaatgacaaagacttgtcatgtccccaggaaattgtgctacagagactcaacctgggcccagcttcctgtgctactcttgggccacacgaacaatggccacttatggtgtctcctcattccttccatgtttaaaataaacaagataacgaatgctaccttggggattcctgtaactaacctttcagctgttaaccaacacaaatattgacgacttttgtcattcattctttacccaagcaatagtgaacccacagcgtttctcttacactttgttatgtggttctcaaactgtagcccaagagtcgaattaaattgcagattctgatagtgtagcagtggacggtgcattgcacagggctcccagatggtacaaatgttcctgacccgtgaaacaacttctgagtcacaaatttttagactacacaggttataagtagatctctgcgatagacatgcatcaacctgagaaacagatgacatcaaggtcatggtttgtttttgtttttgtttttcaagacagggtttctctgtatagccctggctgtcctggaactcactttgtagagtcggctggccttgaactcaaaaatccgcctgcctctgcctcctgagtgctgggattaaaggcgtgcaccaccacgcccgacttaggtcatgttttaaatgtaatatgaaagccagagagtggttaagagcacttgctgggcaaccatgagaggcagagagtaaatgttggcacccacatgactagctgagcatcctcttgacacctgcaaccctaaatccaatgggagaggcctcaggaggaccactggagctggctggcttctagatacccaagaagacatgagttctgggctttagggagagatcccgcctcaaaggctaggcagagagtgatggagaaggaaggacaccagatgttctctccttgcctcctctggagaacacatatgctcacaggcacatacatgtgagcatacgcccacaagagacacatacacacaaacaactaacctgccaaacgttgcctgaacgtgagcggtggagccaagataaaactccaggttcccccctgtgagcagcgcacccccttccataggtcccagttttaaacgctgattactcctccaacataagagaagcttaatttcagaatatcattagggtatctattgaagccttgactgcacatatttagcgtactccctgggaattatattttaaggacatttttctattaaatcattgcatatggaagaaactcaatataatagctgatatttactcgggctcttaatcagaacattgaggtgtatgattttcgtgattatgattttcattgcaattaagttgatgttttgtagacagtgaaattaccatctactccaaaagattgcaaaatagaatttaacctcagagccgacgcaagggaaacttgtttccacaggtgcgtttcggaaacttcaccagacagcaggagaaacgaggagggatccccacttctgcgggacgggcgtgtcctccgtggctggaagcttttcatttccggggtggggcggggatgtggacttacgcatggcattctgggacatcacctgacctctccgtttcttttctgatttcttttctccatagggatgccaccaggcctccagggccagagcgtgtcttctggtagctctgagatcaaatccgacgacgagggcgatgagaacctgcaagacacaaaatcttctgaggacaagaaattagatgacgacaagaaggatatcaaatcaattactaggtcaagatctaggtaacagtatataatactgtcgcttcatttaattcctttattggactttgatgaagtgaacagaacaggaagaaaccgctcggttttttcctggcaggtaaagcctccgttgagagggaaatgaaaggcctgtcccagaagcacttcagggatcgcttaagatacccgccttctagtggagccgaaaggcctttggatttacaaattcggacccgatgctaattgtgcaccagaaaattctctgcgcctgattcgggtgcacctgattcgtacctgattcaagaaaacagttttgtgttaaaactgtattcttcaaatttgctcagaagtggtttttccctaaaatatttctaaaagggcggattttagtcacgctaaagagtcaattgcttgtatatacaactgtaaggtttttcttcttttttttcttatctctaaagtaagaagattctgacttcccagttttatcccaaacaggttgctgcgtgtaaaatacattctaatgtttttctattcccccccacccctttaccaccaccacccccaacccccgctactacaaacccaaccacagggaaatagcttcaaattggaattgatgttcttaaatatctggaaccttctcattcggtgtgtctctttaaacttgaatctggtcattggatggtttggaattccatggcacccatacacatccctcattcctctgggttaattttctttgcagattacccactggtgtcgagactacggcttctttcaaagggtgtggttggagttgggggcttacagctggcgtctttcctgaattgaattcacactgccttctcatgtgtttatagctaccgtgacaaattacattctgtagcacacatcctgctactccttgtctgagcttctatctttcccctctctcccatccttggcgtttcctgatttgtggccacagtggcgagaaatccttgggtggggatttcacatcctgaacagcttctgtgttagtcaagtcggttcttggtaatttagtggccatcacatagacatgtcggtgggttcttggaagtttcagaacaccatttcccttgccactaagtgtcttctctttaacagtcaccctcataccactcacggcgcatgcctcttagagtctgcagagaagcaggtctcttcaaatctagtttatgtccatgagcaattcatttatgtaagtaactagtttctaactagccattagcctgaaaactttttgtggacaggtttctattttctggctcccagctacgtaaggcacgacacatggtcagtatctagaaatagggctggtcttttgctctgggatcggcctaacagagactcaactagtccttttagcttaatggtgtgcaggaacaatctggtcacagcttgcgttcccttgccaccagcagaaattctggaagagggaaaagggggagccagaggggaaatgaggaaaaggtggaagcagagacagagcgggtttgcagggcttgccgtaggcttcagagaggggtgtgccgtcccccactgcagcataatcagggctggctgggaggtcattccgtcagcatttcccacccccagtcccagtgtgccacttctgccccagcaccaccacatcatcaggtatgtcacagagtccaagaatgccactgtggttttctcctggttagttcttcaccagggtaggtggccctgtttgcagttgggatgtcacctggggactttttttttttccttctatttcttagtatcatattcttgttgtagttagtgatgggtttcataatggcatttccctgcaagcccacaccagactcagcatttatacgccctcctctccctcccttcttttcagtatccagccgtgggcctgcttcttcttccctgtgtcccatatgcaagaggacgaagccaagtcctcgactctaaccccgtaccaacaataagaccccccccttactccccctcaaaaacaaacagttccaaatgggtggacagccctgttgtgaaaacccaagagtagaaagaaacagagaaagcacttcataacacagtcatgggcaagggcattgcaagtcgggctttggaggttcggggacaggcagcacgggaaggctgtatccataccttcgaagtcagcattcattacagacacagggaagaactaagcttccacatcctccgttctaagtgttaggattcatcatcttgactctttgaacaattagggcgggggtggggggggtggggacagtgatttccagcttcttttctgtacccagaggcttggcctgaaagtagtcatcagccttctctctctctctctctctctctctctgtctgtctgtctctgctgtctctgtctctgtctctgtctctctctgtgtgtgtatgtgcatatttcctttatattcccctaatgtttctcaagcacaggatccaggaaagatttctgcgcatggtatctcgtctagcccttaaaatgtttgaccccgtggctccatgcgtccatccctgaataatatgttttccagatggctcgtccacccctctgttcaccttccactgcagagtctcagagggtcacgatgaccatcagagacggtcagaccccgaccttatgcatactgagcccatgcttttgccatgagtcacagaatattttagttctaacagcgaaccctgctttgcttcctctgtgacacccagaggtcatggtcacttacaaacaggaagtatttcggtttggactgtgttccttagctgcttacaattcaggtctcctcggcttcttttggagattcccaagccatgatatgaaagaccacagaaatcatgtttgtttgtcttccatctttttatttaatgtgcagaggaaatcttctcaagactcagacaaggctggtggactggacagtcttcagaggtggcctgacagtctgttctctgatatttcgatttcatattcctggtagcctggcttgtgtttaccaaacctgattatcaattgcttattttccataggtttcatatatcacagcgtgaaatttattttaaagatgatttaagcaatctttcagtgtttttataagtataagctaagcctgggttgctgtctgcattaagactaagcaactgtgcatgaagtcttcattctccttgagtgtcctctgcaacgggacagatgaaccctgccttgctggagcccagctcatcccttccatttgatttgggtagaatttgggggagcaaccaaaagtttaatgtgtgcattttctaaaccaaccccaaggtcagatgaaggtcaaacgggtaaaatcctgctaatgatgaatacgataagtgtcaaagaaaatgtaacacagataccatcattccccaacaccgttagtaaaggtcttgttccccttgcattacagcaataacgatgatgaggacctgaccccagagcagaaggctgagcgcgagaaggaacggaggatggccaataatgcccgtgagcgcctgagggtccgagatatcaacgaggctttcaaggagcttggccgtatggtgcagctccacctgaagagcgacaagccccagaccaagctcctgattctccaccaggccgtggctgtcatcctcagcctggagcagcaagttcgaggtcagcagagagatgcttaagcaccctcccgagaattgcctggatacgggaccgtatcaaactctgtctcccgtaattaacctggagaagattcttctaagtagtgccatgctacagcttttccatctgtgttctcaatcctcagacatgattggccaacctatttccagtcctttcttttgtgggggggtagatgtgtgtggtacaagtgtgcatgtgtgtatgtgtgtgtgtgtgtttgtagaccaaaggttagttagcctggggcatcattcctttggcattatctagctcctttcttgagacatggcctctcactgggaactgaggctttccatttagactaatgttagctagccagtgaatgctaaggatctgcctgtctctgtgtcttgccagtgctgtactgcaagcttgacgccacccctgactttttttctgtgggtgcttagtaactgaacccgggtcctcaatgcgttcacagtaatcactcctaatgcgccatcctatcttcctggcctgttgtttagaactgttgttctcattttgatgaaggcttttgcagtgtagctcagtctagcccagaactctatagcacagactgaccttacgtttgcaatgttcctgacgcagaccctcaagtgcagggatgtcaggcctaagccgttataccttcctgtatactgtaaagtggtagattctgcatgcagttaatggccattgagatgggccaccgggtagcacaccttccctaacttcttccctcgtcctgtcacgtgaaatggagtctgaaagtcgggcatgcgcagagaagcgctcctcgaccctctgtggagtcccgtgctgatgggtgatgggatgacttgtgctttcatgttccacagaaaggaatctgaacccgaaagctgcctgtctgaaaagaagggaggaagagaaggtgtcctcagagcctcccccactctccttggctggcccacaccctgggatgggagacgcagcgaatcacatgggacagatgtgaaaaggtacgctgggtgagctttccgccattgctgctaccccacagttccgctgctaccccacagttccgctgctaccccacagttccgctgctaccccatagttccctgtggcacatgagccacaaacaacaggttttccccagattaaccaattatttttagttcttaaaagggggggggggacactttaaaaaatcataataaaaaaattttctatcactatattaattgtttttttctccttttcttttttcaggtccaagttgctaccttgcttcattaaacaagagaccacttccttaacagctgtattaccctaaacccacataaacactgctccttaaccccgtttttttttgtaatataagacaagtctgagtagttatgaatcgcagacgcaagaggtttcagcattcccaattatcaaaaaacagaaaaacaaacaaaaaaatgaatgaaagaaagaaagaaagaaaaaaatgcaacttgagggacgacttctttaacatatcactctgaatgtgcgaagcggtatgtacaggctgagacacagcccagagactgaatggcaatcctcccacactgtggagcaatgcatttgtgcctaaacttcttttggaaaaaaaaaatataattaatttgtaagtctgaaaaaaatatttaatttaaaaaaaaattgtaaacttgcaataatgaaaaagtgtacttctgaagaaaacgacatgaacgtttttgttggtattcacgtcagctagtgtttctaattaccggatattgaataggggaagcccggctgccctcgtaacaaaaccagcaaacgtcctgatggcaacgaagtgatgacattagccattccttagggtaggagggacagatggatgttatagacctatgacaaatatatatataaatatatatataaatatatattaaaaatttagtgactatggtaagcttttgttgatttgtttcagacttttttctcctgtaaaaaaatagtactgattaacttttttaaaagaaagattttactgtaaatatggattttttttttgtctgatttttgtcccttcccccggtttgttatcgtaacctgtagtgccaactctgcttccggaggggcagtgcaggacgaaatgctgaccctgaagttgcttctcattcacaaatagtaaaaagttgtttctccagtcttttgggaacacaggacttaaaagtcacatcatgtgtaggaattacatgcagcattgcccgggcgaggcaaaaagcgtttgtctggcttgtggcgctgcccttgttaccctcccctgggattttcagaggtacacggttagaatgctacaatgttaccactgtgccttccaatgtttatatcatcggaaacataacataatcaaagtggctgtgatttaacaaaaaaaacgattcaagtgttacctacctgtgtagccgaagtagtgtgcagtgaccgagacgtttctgaatacatggtcagattttttttggaaaaaatacaaaaatta

SEQ ID NO: 163 - DNA, 3139 bp, Mus musculus
atgtagaagacagaagtagctcagggtcctggggaactggaggccatccaagcccgtccaggaactatggagatgggactccctatgaccacatgactagcagggatcttgggtcacacgacaatctctctccaccttttgtcaattccagaatacaaagtaaaacagaaaggggctcatactcatcttatgggagagaaaacgttcagggttgccaccagcagagtctcctcggaggggacatggatatgggcaatccaggaaccctttcgcccaccaaacctggctcccagtactatcagtattcaagcaataatgcccgccggaggcctcttcacagtagtgccatggaggtacagacaaagaaagtccgaaaagttcctccgggtttgccgtcttcagtctacgctccttcagccagcactgccgactacaacagggactcgccaggctatccttcctccaagccagcagccagcactttccctagctccttcttcatgcaagatggccatcacagcagcgacccttggagctcctccagcgggatgaatcagcccggctacggagggatgctgggcaattcttctcatatcccacagtccagcagctactgtagcctgcatccacacgaacgtttgagctatccatcccactcctcggcagacatcaactccagtcttcctccgatgtccacgttccatcgtagtggcacaaaccattacagcacctcttcctgcacaccccctgccaacggaacagacagtataatggcaaacagaggaactggggcagcaggcagctcgcagactggagacgctctggggaaagccctagcttcgatctattctcctgaccacacgaacaacagcttttcctccaatccttcaactcctgtgggctcccctccttcactctcagcaggcacagctgtttggtctagaaatggaggacaggcctcgtcatctcccaattatgaaggacccttgcactcactgcaaagccgaatcgaagaccgtttggaaagactggacgatgcgattcatgttctccggaaccacgcagtgggcccgtccacagctgtgcctggtggccatggggacatgcatgggatcatgggaccctcccacaacggagcgatgggtagcctgggctcagggtacggaactagtcttctctcagccaacagacactcgctcatggttggggcccaccgtgaagatggcgtggctctgagaggcagccattctctcctgccaaaccaggttccggtcccacaacttccggtccagtctgcaacttcccctgacttgaacccaccccaagacccttacagagggatgccaccaggcctccagggccagagcgtgtcttctggtagctctgagatcaaatccgacgacgagggcgatgagaacctgcaagacacaaaatcttctgaggacaagaaattagatgacgacaagaaggatatcaaatcaattactaggtcaagatctagcaataacgatgatgaggacctgaccccagagcagaaggctgagcgcgagaaggaacggaggatggccaataatgcccgtgagcgcctgagggtccgagatatcaacgaggctttcaaggagcttggccgtatggtgcagctccacctgaagagcgacaagccccagaccaagctcctgattctccaccaggccgtggctgtcatcctcagcctggagcagcaagttcgagaaaggaatctgaacccgaaagctgcctgtctgaaaagaagggaggaagagaaggtgtcctcagagcctcccccactctccttggctggcccacaccctgggatgggagacgcagcgaatcacatgggacagatgtgaaaaggtccaagttgctaccttgcttcattaaacaagagaccacttccttaacagctgtattaccctaaacccacataaacactgctccttaaccccgtttttttttgtaatataagacaagtctgagtagttatgaatcgcagacgcaagaggtttcagcattcccaattatcaaaaaacagaaaaacaaacaaaaaaatgaatgaaagaaagaaagaaagaaaaaaatgcaacttgagggacgacttctttaacatatcactctgaatgtgcgaagcggtatgtacaggctgagacacagcccagagactgaatggcaatcctcccacactgtggagcaatgcatttgtgcctaaacttcttttggaaaaaaaaaatataattaatttgtaagtctgaaaaaaatatttaatttaaaaaaaaattgtaaacttgcaataatgaaaaagtgtacttctgaagaaaacgacatgaacgtttttgttggtattcacgtcagctagtgtttctaattaccggatattgaataggggaagcccggctgccctcgtaacaaaaccagcaaacgtcctgatggcaacgaagtgatgacattagccattccttagggtaggagggacagatggatgttatagacctatgacaaatatatatataaatatatatataaatatatattaaaaatttagtgactatggtaagcttttgttgatttgtttcagacttttttctcctgtaaaaaaatagtactgattaacttttttaaaagaaagattttactgtaaatatggattttttttttgtctgatttttgtcccttcccccggtttgttatcgtaacctgtagtgccaactctgcttccggaggggcagtgcaggacgaaatgctgaccctgaagttgcttctcattcacaaatagtaaaaagttgtttctccagtcttttgggaacacaggacttaaaagtcacatcatgtgtaggaattacatgcagcattgcccgggcgaggcaaaaagcgtttgtctggcttgtggcgctgcccttgttaccctcccctgggattttcagaggtacacggttagaatgctacaatgttaccactgtgccttccaatgtttatatcatcggaaacataacataatcaaagtggctgtgatttaacaaaaaaaacgattcaagtgttacctacctgtgtagccgaagtagtgtgcagtgaccgagacgtttctgaatacatggtcagattttttttggaaaaaatacaaaaatta

SEQ ID NO: 164 - protein, 615 aa, Mus musculus
VEDRSSSGSWGTGGHPSPSRNYGDGTPYDHMTSRDLGSHDNLSPPFVNSRIQSKTERGSYSSYGRENVQGCHQQSLLGGDMDMGNPGTLSPTKPGSQYYQYSSNNARRRPLHSSAMEVQTKKVRKVPPGLPSSVYAPSASTADYNRDSPGYPSSKPAASTFPSSFFMQDGHHSSDPWSSSSGMNQPGYGGMLGNSSHIPQSSSYCSLHFRLSYPSHSSADINSSLPPMSTFHRSGTNHYSTSSCTPPANGTDSIMANRGTGAAGSSQTGDALGKASIYSPDHTNNSFSSNPSTPVGSPPSLSAGTAVWSRNGGQASSSPNYEGPLHSLQSRIEDRLERLDDAIHVLRNHAVGPSTAVPGGHGDMHGIMGPSHNGAMGSLGSGYGTSLLSANRHSLMVGAHREDGVRGSHSLLPNQVPVPQLPVQSATSPDLNPPQDPYRGMPPGLQGQSVSSGSSEIKSDDEGDENLQDTKSSEDKKLDDDKKDIKSITRSRSSNNDDEDLTPEQKAEREKERRMANNARERLRVRDINEAFKELGRMVQLHLKSDKPQTKLLILHQAVAVILSLEQQVRERNLNPKAACLKRREEEKVSSEPPPLSLAGPHPGMGDAANHMGQM

SEQ ID NO: 165 - DNA, 413548 bp, Homo sapiens
  misc_feature (1)...(413548): n = A,T,C or G
gtctacagtatcacctttcttgtagattggcacttatgcggccaaaggaacaacaccatgttttctaaaaggctggagaaaataccacaggtgcctctcctctttcccttcatcttcatcattttgacaaattactcaaagatggagggtgcagttgaaagccagccatcattttttaaaacttctcaggacattgtaacatgcacttgggttgagaactgctactcgagcttctccaggaggcccttggaggtaggaaccagcatttgggctactttagcatcttagtagaaactgaaaccaaaaatgatctcccatggccaccatggccaaacataacagtagtttctagctctctaacctctctccctgacatctccacagcacttggcctgccctcttgagagtcttttctttttttctttttcttttctttttttttttttgagacagggcctcactctgtctcacaggctggagtgcaatggcacattcttggctcactgcagcctctgcctcccgggttctagcaattctcatgcctcagcctcccaagtagctgagattacaggcatgcaccacaatgcccggctaacttctgtatttttagtagagacagggttttgccatgttggttgggctggcctcgaattcctgacttcaagtgatctgtccatctcggcctcccaaagtgctgggattacaggcatgagccaccacgcatggccctgccttcttgagattcttgctgagactgtacaaggcgttgactcttgtctaatcttttgcactgctcctctgtctcctttcccatcaacattctaaagttggctgcttctcagtattcataatccatggttcctctttctctccaagaactctgccagcatgtacatttataaaaccacatctccagccctaaccactctcatgtgttttttctctaatacacctccatttggatgtcatgctggcatctcaaattcaatatatctaaaaaggaactcataatttctgcataaaacagcacccccttacgacttcctttatcaatctagctgccattttcaggatcatttttggttcttccttcaacagtctatttccagtgttcagttggacttttctgtgcaatatcacttctacgtaattaacatctttcaagttcagatcctaacaatttcctgtctagattattgaatcagcctcttgctcaatatccctcactttgttactccctaccacaaggtcataaatacaccattgtcagtttaatataggataaaattgcaatcatgtgactcacaacttattgctcaaaacccatcaccaaagtacaaagcccgtggcatccaatgcccttcagtatggcccaaactatctttctgaccatgcttgcacctattcctccacactagatgggatgttttttctttttgaaatggaaagaacataaactttgaatcagacagatttggttttaaattccctgctacttctaacttggataagtttctaaaacaacatgagcctcagttttcacaactaaaaaaacagaaacaaatatgtaaaatattataaattagtaaaagaaaaaaggtgaataaaacagagacattaatagctaatagaactgtttcatataaattctagttttttttttgtttttgtttttgttttttttgagacggagtctcactctgttgccccaggctggagtgcagtggcacaatcttggctcactgcaacctccacctcctgggctcaagccattctcctgtctcagcctcccatgtagctgggattacaggcccctgccaccacgcgtggctaatttttgtatttttagtagagacggggtttcatcatgttggccaggctggtcttgaactcctgacctcaggtgacccgcccgccttggcctccccaagttctgggattacaggtgtgagccactgcgcccagcctaaattatagtattatgttttttgttagatcctaaacttccctgctgcacctggacttcgttgttgttgttgttgttgttgttgttgttgttttgtgccttttttgttttggtttggtttttagcctttgtatacagctgtttctcctggctatgctctatatcaagggttgacaaactatagcccacagacctactttgggcttaaccgagacatacctattcatttaagtattgtcattaagtatgctacaacagcaaaggtgaattattgtgacagagaccatatggcctgcaatgcttaaaaaatttgctatctggccctttacagaaaaagtttgcccacccctgctctagcctctctttctttactcatgctatagtatctccccaggtattctgggtttaaaatatgtccacaaatcctccaacaaaactaacttcaaaaggtggagcccccatccccttgaatataggctggaattcgtgacttgcttgcaacaaataggacatggcagaggtgtcagtgtgtgacttcttaaactaggtcataaagggcactgtggcttccactttgctctttttagatcactaattctggaagaagccaacccccatatcataaagacactcaagcagactgtggcgagtcccacatggagagaagctgaggcctcctgccaacagccagcaccaacttgccaggcatgtgggagccaccttagaagctgatactgcaggcttggtcaatcctttagaggaacttgctgacttgcaggcccagtccacatcttggctcaaacctcagaacagaccgtaagccagaactatctggctaagccacattccaaatacccaacccatagaaactgtgaggataataaatacttaatgttgttttaagccactaagcttcaggttaatttcttatacagcaattgataactaatacataagaaaaccttcatttaccatccactgaccaaagactcaaatatacaaccacagcctggacctctcctatgacctcataccttcatatataactacctattccacatctgttcctagagatctcaaaggcatctaaaacccaacatgtgtgagactttggtctctttccctcagacaggatcttcctccaatattccctatcccagttaatggcataatgagcttaatccataaactacaactctggccttctgtgatacttctttgtccttcacaccctatattcaatccattatcaatttcagccaaattaactaatatgtagtttttaaatcaggatgttaccctccagcagtactatagagatgctctttcattgtctctggcatctgctgatcatgagaagtcttctgtaagagcatcattctttgaaggtaatctatctttccttctgatagcctttgatgttttctgaataaccttgagcctaaacctgggtttgcttttattcatcctacctaagacttggtgtgatctttacaatctgaagacatatagctcttcaactctcaaaaaactccatcgtctccctgaatattgccttttgattcttgtctctattccctgtataacagttagggtccagtcagacacaccagttatgttagtagacaaaaattaacctaaagaactgttggccgggcgcggtggttcatgcctgtaatcccagcactttgggaggccgaggcgagtgaatcacgaggtcaggagatggagaccgtcctggctaacatggtgaaaccccgtctctactaaaaatacaaaaaattagcaggatgtggttgcaggcgcctgtagtcccagctagtcgggaggctgaggcaggagaatggcctgaacccgggaggcggagcttgcagcaagccgagatcgtgccactgcactccagcctgggccacagagcgagactacgtttcaaaacaaaacaaaacaaaaacaacaacaacaacaaaaagaactgttaatcagggcaaaaagagggcattgaggcatggaaggaactgcagaaggatgctaccccactagggttaagggactaaaaggatgagattagaattactaacatttagaaacttggaggaagggccctgcagaattggaattaatacctttgagcagagtctgctggcctgttggtactagtgtttctgagggatgcaacgaggttggttatgcaagttttggaacaactgcaaatcgaaataactgctgctaccaggatgaattccactaccaagacaggcattaaacatcattcctaaggcactcacctactctcagaactcaatagactgaatcttcaacttgcaacaatggctttgtttttgacatgtgtcaatttcccttttgctttccagctcagctatatattttaagtgtgtctatgtatttgcagcagatagaagtgattcctttcaccagcttagtcatttgtcaagagtttctgtgcacttgtcttcatccctgtagggcattaccctaacccaaaacattatcatttcttccccagactaccagtaccatcttctaacttgtctacctgccttcattctaacatgtccaccatcttttctccaccctgcagcaaatgttttgtaaacaccaatctaagaacattatctcttggacgggcatggtggctcacacctgtaatcccagcactttgggaggccaaggtaggtggatcacctgaggtcaggtgttcaagacagcctggccaacatgatgaaatcctgtctctactaaaaacacagaaattagctgggtatggtggcatgtgcctgtagtcccaactactcaagaggctgaggcaggagaattgcttgaacccaggaggcagaggttgcagtgagtcgagatcatgccactgcactgcaacctgggtgacagagtgagattctatttcaaaaaaaaaaaaaaaacccattgctcttacaataaagataaacatgttgcatatgtccaacaaggccttgtatgtactgacccagtgccatcttgcattgtgctccttcttttctgtgtttcctggccactctggcctcctttgctattttcaaataggacaaagcctttgcatatgctgatgctcctatctgcatcagtcctcttcccaattctgtccatttaatcaccactcatcctacagaaaacaagtcaaattcctccaagaagccttccttgccatcaaactaggtcagcactctatttatatggtctcatagtcttagatttcttttacacactgtgttatggattatttggtaaagcctcctctttggggttataaactccaaaagaaaagaggcatagcatgctatgctcctagcaagagtttctgccacacaataaacatttaatagctctttatagaatgaataaatgagccatattgaatgttgattaaatttcaacaagctttccagaaatcagcctataatgattatccctttcagtggacttctgacacttgtaattcatctgacatatttcctttcttttctgccatgggcttggtagtctcagttagcatatcattgattaaggtcaggggcctttatgttatttttgaattcccagtgtctagcacagtgccattgaaatagtatgcaatcaacacatttttatttttcatgataatgattaagaacttagtgccattatagttaatgtagtaaaattttgtgaattcaataatgcccctaagtagtatacaactttgaaagcacgctcttctcaagtaattaaatgttataattatctaacacattattattctatataaaatttcagagatgttagttcattattttcagccctttatattttaaattaatgatatagtaatttttaaaaaacaaacctttgctttactttagctgaagacacaaatgtcttcagatggtgctcaaaatggtttaaattacacagatgaggtaaacatacagtgaaatcttagaaaggccccaaagaattccctacgaatgatacatgagccaagggcatgacattcaccttggaggatctttctccctttgaataagtttgataaaatgcctttttttttccactttgaccttaagcacttagaaatcatttgttttacaaaagccccgtggtccaagattatagcaaccagaatagtgatgtctgtcttacatttcaattgtgcatggttcaagactttagtttaagagagtgattttacataaaagtttttagatagatttcactcctgtgcctttgttggtctcttctgtacttctacgaagaacagctttgtagtttctacgctggcttcaagcacaatactatagctccacaaccttgtccaactgttagaatcatccagttttatagcagctgcacacaggcgttcactcacccgggttctgagtttcagcaatcttcttatctttgccatttttatgaaataagtttgttgtattttagcacccaagccccatagtatcttataccttactttcaggaagaggctgtcaaacatctcctggtattatgtttatgatctttgccaccaggtttttaggcttgttggagcatgatttacactgcagacctccctaaatttagttaactttcattcgtcatcaccatccagatattttaatttggtatatccaggaggcataatagccaatgctttgccagagagctataaatattggtatgaattttacatttccacttgacagtaggagtgtctcaattgatagtgatcttaggacttcttgtcagcataccaaatatatcaacaggccttgtcatgaattttccagacatttgtagaatcatgaaagtttttttcacattgaaataagaaagtatcacacacacaaaatattattttttataagattgttatgtaaaatataagattgtgaattttgcattgcatacaatatttattacatgggaactttgtgcatttatgaaattatttactacttatttataaatgtataaagaaatatttagcaacaattgtgttctcaattcttttgaagtctgtcgacttatgtctatttttctagaggattattccttgtttctgtctagtctggcattttactacatatgcactcttttcatagaactagtgatgtccgtttgtcagcctcaaatgcatacaaattgctatcttaaaccagatgagtgtttttgcaaaacaaagacatacaaaataatggttcttttgtagaaattgatcgaaatattttaaagcttccttcaagggtgtgaagttttggttaattctggcctagaaaaatattttgcacatcaacctagggcatgatcatacttattttatataacatcatgcctacagaatgtgttttccaatgaccatcactaatggacattatctggtattttaatttttttccaaggcttttctgtgtataatgaaagacaggaggcccactaaacacaacatttaaaaataagttaactctatattagtgaaaaaaagattattaaaaagattaagtggtacatcaattaaaaaactttttaaaaagtttttttaaaaagaattaaattctgtcaaattcagcctgaaatttgaacacagaaataagaacagcaggattttcattggaagatgcatcattgtgatgttagtggccaaaccagatgccaggaaagcagtgcctctctcaaattcccatatgtacacatgagagttcagccttccttcttaatgtcatccagttcctagagaagttttgctagtgttccttctgaatatacggggcaagagaggaagtcaaggtcactatcaccaccaagtcctgaagccaggtagttgtcagccttgaaatgatcctcattaaaaactagtggcttgaatgtcctctatgaagctgttctttgtttgtttgtttgttttttagacagtctcgctctgtcgcacaggctggagtgcagtggcgcgatcatggctcactgcaagctccgcctcccgggttcacgccattcttctccctcagtctcccgagtagctgggactacaggcgcctgccaccacgccctgctaattttttgtatttttagtagagacagggtttcaccgtgttggccaggatggtatcgatctcctaacctcgtgatccgcccgcctcggcctcccaaagtgctgggattacaggcgtgagccactgcacccggccttgttttgttttttgagatggagtctcactctgtcacccaggctggaatgcagtggcatgatctcggctcactgcaactgccacctcctgggttcaagcaattgtcctgcctcagccttccgagtagctgggattacaggcacctgccaccactcccagcaaatttttgtattttcagtaaagacgggggtttcaccatgttgggcaggctggtctcgaactcctgacctcaagtgatccacccgccttggcctcccaaagtgctgagattacaggtgtgagccactgcgcccagcctatgaagcctttcttgactcttctgaatacacgtggccactgtcttcctgcattgccattgtaccctgtggaagccattattgggacatctatgagactttttttcatgtatgtatatattggtctgtttcctctactgcaccataatgcctgcattcccaggaattctatggcttttctctctatcactccacacaatatctagcactcagtcaatgctcaatatgtttgttgacaaaaacattcttctggacatgttcatagaatgaacacacagccttcagcagcagtacactcagcaagtaactgtgaaaagggagccattggagttaccaaattagaaccactcattttgagcaaaaaatctctgactcaatttgaggcagggctgcaaaagttgaacagcaacattaaccattcacccagcacctcaagccttcacactgtaatcacatcgattagctgaacattggcaccaaagaaagggtcagtatattttttgttcaagcttttgtccatatacagaagctggtgcccgattatttcagtgtttagtgattttaattttctgtgaaatttgcctacacaatttgtgcttctcccagtttatgtgctctgtactgtcaaatatgatacagtcagaaagcacattcctttatcattttcctcttacaaaaaagaaaactggaaaaattatattatttgcctttaagtggaaagacatttcattttccagatggatgctggtacttcaggaaatattagagatatcttgttgaaatttttagaagtgatcctgttatcgtaccttttacactcctggtcaagctgtcatcactaccaaagcatttccataactacctacatatgcccatttctttgagaaagaagaaacagagtgatgctaactttcctgaagtttcatacacgtttgaatttttatatgtcaagtctcagattgtcaaaaattgaagcatggaagtttgctcctggaacaccaaacatatataaaattccacctgtgatgtcctcaactttttaacagctctaactacttcaccaacctctaggaactttttttcaacaggatatagtattcacagacaagaaatgaaggcgagattgtttctagataaatttagctggggaatatggaaaatatgatctaataaaggaaacctccaggtaagttcaagatagtgaatatatgggaattggaaaaccgattgcccagattcttcctttaagtagtggttgtgataaaatacattttgatttctatttctaatgaaaatgtgaaacagacatctatttttccatcccaactgggcttcctccaaatatgctgccttctccctaatgagttggaatagtgtgcaccataaaatagtacaacacatcctgaaatgctgacatttcatttttaattgaaatcaaatagaaatagttccactgggaaacaagaaagtaaagcaggcttttgatagaaattaataggaaagggacggaaatactattctctgtcataaagtagtccactatggaaggctgccagtccacttgcctgaatctgagtttatctccaggattacattcagtgaaaagaacacatcttatgaaggtggaacgagaaatcgtatttggatggatatatcaaaggaaagaaataaaaaatacttcctttcttctattttttaaaaatcataggaatgtagaggtcaaggaaaactgttgaattttactgcaaaaacaatgatagcaaaacaaaagacttcatatcatcaacaaaaatatttacaaaaatatatcagaaaatacattctttgggaggtaaaataaacttacattgctgggactaaaattctctcatcggtgggacaactttcttttaaaaacagttttatggcaatacttttaacagtggtacttttaagagttgtagcttggctgggcacagtggctcacgcttgcaatcccagcactttgggaggccaaggcgggtggaccacaaggtcaggaaatcgagaccatcctggccaatatggtgaaaccccgtctctactaaacatacaaaaattagctgggcatggtggtgtgcgcctgtagtcccagctactcaggaggctgaggcaggaggatcacttgaacccaggaggcagaggttgcagtgagccgagatcaggccactgcactccagcctgggcgacaaagcaagttcccatctcaaaaaaaaaaaaaaaagttgtagcttgagcagcaacaataacattaataaagattaacatttgtataactgtatatggattatgaaatatttgtataagatttttaataattgatactccaaactattatgaaaattcctcaactttcaaaaaacaattctttattctctaaaataccagactttgaatatagaaagccatgatttttatgaaaatatttatctctatggtcataatttctagaaacaatctgtagtactttgtaccaaaaaaaagtcggctatttttataggagtcattccaagacattattgagtgaggactggtactaggatgaggaagggtcaggcatttgacactgaagagtttgtggcatgttgcagagaggtacttaaaaagataaatgccaaaatggtacgattaatacctactatacctgacatagggacaaagtgctttttagatggctatctcaaggagttgggtagtaaatgaaacgaaggatgtaagaacatagctagagggagagctgcctggagaaagggttggtttgttttcagaatgtagaaacttgcacaggttgacaagtggagtcaaagaagagaaggaaagtttgagcttcaggagaaaaaagggataagcgatggatacatatggctattctttttttttttttttttaatctgggtctttccacaacttctccctggtgactttgactgatttcttgggctagctcagacataagaattcatgtttattaaaactgatcaaaataatatgtgatatgttttaaggactgaagcccagatgttcctactcttccagaacacttgaacatgcactgacttcctgagggccaccaggcatttagggagatgcccagtgagaggaaggcagccttgtgtcccttataatgagacccttctctgaaattattaaataatctaccttgcagtaaaaactgctgattcttcgtggaggtctcttcaaatacaatgatctgtgaaaattctgcctacagaattttaagaaaaaccaagagtaccaattaactaaaaaatttatataaaattaatgatgaaaacaatgaccattaacaaacacaaaaataaaaacccctttattgctcactctatctaatactaaaacttcacaaaattaatgtctaagttacctgatgaaagcaatttaataaatcctttggataattctaataaaaataagaaatgtattatctcattctcaaatttgccacaattaaagagaaactctcttttgaattgggaggtttctctctaaagaattttcctcttctaataaaggatattgcaatatcctctgaatagatgtttaaaatctctctcataagttctggaaatctctctcattgaaatagtcccagcttgacagccctgcaataaccattaaatattaaaataacattaaaaagcaactgctcagctcatggatctagctgcaaaactccaattcacactaatgggactcacatagctaaatccccatgtgctgtaccgaaaatttatgcccaaggatccaaggatcaggcgtgttaaagaaaatgatggattcactttcaaaaaaaaatatcgatccactaccaaacaaattatcattattcatgcaatttcagtcacataattattctaaaaaccagactgtctaagattaaacagcatccaattttgcattcacatagtattcatttgtgatgtaataaaattcatacttccattgcaagatgatttgaatgttgtaaaaacatatatacagtttaaaaaatgtgtcttatttacaaacatatcctaaagccaaaatctaattctagatacattttctgtttattatttctgtagacactacgatcataatgctaaagctttaagaactatttttgttgttcttgaggtatgttaaatataaaagggaaaaagaaagtataaataactaatagtgttaatatttaaagttgtgtggtgatctaaacttctcaaagaatttctttaaagaaattatagaaattttgacatagtgaccacacattattataatcatccatggtaactatccaagaagttacacactattaaaaaacaaaagacagtgtgtttaatggaaagtatttcagaccaaaatttaacttactcaaattccaaactaagacaagtcacttaaatttccaaattcacaattttattagctataaaatgagtgagatggacttgggaatctcttgtctgccactctatggttttctgttgtaataactaatttggtttacattgtgtctggttagattttcccatttcccccactcccaccatctccacaacacacacacacacacacacacagagtggagaaagaagtttttaaatctgatagagaactctcgtgcaaatgcatgtataatattctgtgaaattcctatttgtcaatcaaagtatttgccggaactgaaagaggcctagagaatgagaaagagaggtaacattgttgtgtggaaagagcatctggatggaaaatctggagacccagtttcatcagcaaccaactttatgactttgggcggatcacttgctttctctaaattgcaatttcattcaaagcaggaattagataagatagtcactaagtgcatgtccaactctgaaaatggatgcctacaattagaatatcactattatgataaactaaacaaagcagttacttttttttttttttttttttttaagattgagtctcgctctgttgccaggctgaagtgcagtgatgtgatctcggctcactgcaacctctgcctcgggttcaagcgactctcctgcgtcagcctcccgagtagctgggaccacgggcatacaccaccacgcccagctaattttttgtattttagtagagacggggtttcaccctgttgggcaggatggtctcgatctcctgacctcgtgatctgcccaccttggcctcccaaagtgctgggattacaggcatggtccaccactcccggccacagttactcttaagtctacataaaagaaaagaagagggtgtgtgtgtgagtgcgtgtgtgtgtgtgtgtgtgtgtaatcttgaaggatgagggctaaggataaagtgaatgtagaccattttggacattaaataatagtgtgtatatatatattatatatacagtgtatatatattatatatagtgtatatataatatatagtgtatataatatatatagtgtatatataatatatagtgtatatataatatataatatatagtgtatatataatatatatagtgtatatatagtatatagtgtatatataatatatagtgtatatataatatataatgtatatattatatatagtgtatatataatataatacatacattgtatatagtgtatatatattatataatataatatataatataacatataatatataatatatattatattatatattatatgttataattataattataaatacaattgtataattataaatataattatatattatataatatatattatataatataatatataatgtatattatataatgtatattatataatgtacataatatataatataatatatatattatataatattatataatgtacataatatataatataatatatatattatataatattatatataatgtacattatatatatattatatattatataatatatatataatgtacattatatataatatatattatataatatatataatgtacattatataatatatattatatttttatatatattatatattatatatattatatatatatttttatatattatatataatatatatatcaggcagtaccccatataccaggcagtaccccataagtttaaagaaagtatcttttttattacttaaaaagaaaaagatatgttaaatattttctaatctttttgagcatttactgtgcattaggcctgaatctaatagcactgcagatactatttcatttattcctcactatgaaccctatgaggagttgctataattatccccattttctagatgaaaaaatgaaggcctagagacctgtgtcccacagctagtgtaactatatgaagaaatgtaagatagagtctgggttatgttccataaagagtcgtaaccttttagaatcaacattatagataactaagctctgatttctttatttttataaggatttctggtattactaccagatcacaatagctgattgtgcatactattggcccactctatcaacaataatatttttctttcagccactacaaaagtggtattataattttctaaggaaaatcacattgtctggtacataaatgtttgttgcaagaaggaaagaaaccctgttcccaaccaagatgaagagtatggactggatttatccagccacctgcaagaaccaaaaaaaaaaaaaagaactggacaaaatatatgagataataatttcactttgctgggcaatggacgacaaagaatactgatcattaaaagataagaaacaagcaaggggagtcctatgattgcccagcctaatagcttaaggcagtttcagatctgcagtgcaggaagataaaacctaagcagaactcagtaggctctctgagttgagatcagagattgtacagtgcgggtagaccaaagccagcctgagttcgtagcacagagaatcagacccaaaggtatttagcaaagtactgaggaacacatgtaatgaaacaacctatggtccaggaatgaaccatttgaaaggattagaaggaacattactcagtactctcacaagaccaggaatagtgtctataaccaccagccagtctaaagaaacctcataatttagaggacgatgggcagagtattcataagggtcttgcattgttagtcagaaatattagctctcaattaagcacagatttggtcccacttaacaaattttaaaagttaggtccttgtattagagcatttcacactgctataaagaactgcccaagactgggtgacttataaaggaaagaagtttaattgactcatagttcagcatggctggggaggcctcaggaaccctacaatcatggtggaaggtgaaggggaagcaaagcaccttcttcacaaggtggcaggaagaagaatgaatgcaggaagaactaccaaacatttataaaatgattagatctcatgagaactcactcactgtcacgagaacagcatggaggaaaccacccccacagttcaattgctttcacctggtctctcccttggcacgtggggattatggggattacaattcaaggtgagatttgggtggggacacaaagcctaaccatatgaatcctccaggatcaaacagtttccaaatgatgtaaccacactccagggaaggaaaaaagcttaagaaggtctataggtatacaaaaacatccagcacccagctaagtaaaattcaagatgcctgaaatggaaacaaacatgactgggtatgtcaaaaaggaagaaaatataacaagtaattaggaatgaaaaaaattaagtaattgaaactgattcagaagtgacatagatgatagaattataatacaaggacattaaggcactttttaaaactatatcccatttcttctaaaagttaggcaaagacatagaagggatatgtatatattttcaaagaaccaaatcaaacttttagagctgaaaacaacaatgtctgaaattaatggtagattagacattgtaaaagaaaagatttatgaacttgaatatactgaaatagaaactatccaaaatagagcatacaaagacagaataaaagccacaaattaccagtatcaggaataagagaatgacagcactacgtattccataaatattaaaaggaaaataagctaatatgattagcaattttgtgccaataattttggcaagttagaggaaatgggttaggatttctcaaaagttacaaatgaccaatgcttcctaagaagaaatagataagatgatctgaacacccctgtatatattaaagaaagagcatttgtactttaaaacctccttaatctcaccaccaaaacaaacaaacaaacaaacaaacataaaacaacccaaaacaaaacccaaaaccacaggaccacaaatccagatagctttgctagtgaattctactaaacatttaaatgatataggaaggaataaccttaatctcattctatgaatccagcactgctctgataccaaaaccagacaaagacattacaagaaaaaaaaagaacaaactaagcccaaaattagcagaaggaagaaaaccttaaagattagaccagaaataaacacaataaagaatagaggtcaggcaaggcaactcacacctgtaaacccagcactttaggaagttgaggcaggaggatagcctgagcccaggagtctgagaccagcttgggcaacatggcaagactctgtctctacaaaaaaaaaaaaaaattaattagccagccatggtgtcatgtgcctgtggtcccagttagttatgacgctgaggtgggaagatcacttcagcctaggaggtcaaggctgcaatgagctgtgctcatgccactgcactttatcctgggtcatagagggagaccctgtctcaaaaaaacaaacaaaaaaaaaagagaaaagaaaaattgtagaaaaataccaatgaaattgagttgatgttttaaaaagataaaattgacaaacccttagatagactaacaaaaaagagagaaaactcaaataaagtcagaaattaaagaggaaacattacaactgatacaaagagataagaaaaatcataaaagacaattatgaacaagtatatatcaacaaattggataatctttaagaaatggatagattcttagaaatgtaaagatcacacactaagaccaaatgagatttatccctgggatgcaaggatggctcaacatatgtaaatcaattaatgtgatagatcacactaagaatgatgaattttaaaatcacatcatcatttcaatagatgaagaagaagtatttgatgaaattcaaaacttttgtaatataatgaacgctataattatactctcaaaaagctaagtatagaaggaatttgccacaacataataaaggccatatatgacaagcccatagctaacattgtactcaatggcgaataactgaaaacttttcctctaagattaggactaagaaaggatgcccactcttaccagttctattcaacacggtactggaagttctagacaaagcaattatacaagagcaggaaataaaaggcatccaagctggaaaggaagaagtaaaattttttctggtttcagatgatatgatcttacatgtagaaaactctaaagactacacacacacacacacacacacacacacacacacacacacagttagaattaatgaattcactaaagtttcaggatacaaaagcagcattaaagagccggttgtgtttctatacagtaacaaactaccaaaaaaagaaaactaagaaaacaatccaatttataatagcatcaaaaagaataaaatagaaataaacataaccaaggaagtgacagacttgtatactgaaaactacacaatgttgatgagagaaattgaagatgacacaaataaatgaaaagctatcccatattcatggattggaagacaatattgcttaaatgttcatagtactcaaagtgacctacagattcaaaggaacccctataaaaattccaatggcattttctttacagaaatggaaaaaaaaatcctagaattcttatgtaaccacaaaagatctcaaatagccaaagaaatcttgagaaagaacaaagttggaggcatcacactttctgatttcaaaatatattacaaagcaacagtaattaaaacagtgtggtactggtataaaaaagatctatagaccaatagaacagagaacctggaaatgaaggtatgcatatacagtcaactgatctttaacaagggtgccaacaaaacacagtgggaaaaggtcaatctcttcaacaaatgatgtcgagaaaactgcatatacccacacaaaagaatgacattggaccattaccttacacaggaaaatttgagatttaaatgtaatttttcagcccctaaaattttacaaattcataaactgtaaaatgcctagaagaaaacattggggaaaaacttcacaatattggtcttggcaatgatttattagatatgacagcaaaacacaagcagcaaaagcaaaaatggacaagtagaactacataaaactaaaaagtttctgcacagctaagaaaacaacaaaatgaaaaagcaacctaccaaatggtataaaatgtctgcaaaccatatatctgatagaaggttaatataaaaagtatatagggaactcctgcaacacaatagcaagaaaaagtacttttaatgggcaaaagactggatggacatttctcaaaaagagacatataaatggacaacaggtatatgaaagatgctcaacatgactagtcatcaagagaatgcaaatgagatatcacctcacacctgttaggatggcaattattaaaaaaagaaaagataaatgttggtgaggatgtgaagaaattggaacccttgtgcactgttggtgggatggtaaaatggtgcagctgctatggaaaacagtatacagactccttaaagaattaaaaatagaaacaccatatgatccagtaatcccacttctggtatatatccaaaagaactgaaatcaggatctcaaattgatattcaatctcctgtttattgcagcattattcacatagccaacacatccaaacaatcttaatctctatcaatggatgaacagataaagagaatgtggcatatacaccatggaatattactcaaccttaaaaaaatcctgtcatgtgtgaccacatggatgaacctggaggacattatgctagtgaaataagccagtcacagaaggacaaatacttcataactcaacttatataaagtatgtaaaatggttacattcatagaagcagagagtagaatgatggttgccagcggctgggaaggaaagtaatggggaactgatgctcaatgggtgcaaagattcagttatgcaagatgaacaagttctagagatctgttgtacagcattgagtttatagttcacaatactctatgtgcactgaaaaacttctttaattagagggtaggttttatgtgaagttttcttaacacaataaaaaaacaaaactaaagaccaatatgcttcatgaacacagatataaaagttctaaacaaaattttagcatatcaaattcaacattacataaaatggacaatatatcatgatccagtggaattaattccaggaattcaaggctggttttaacaattgaaaatcagtcagtataattcaccatattaaaaccaaaattttaaagaaaattcatttgatgttgacaattccaacatctattcctaactaaactccccagcaaactaaaaatagaagaagacttccacaatctgataaaggttattgatggaagtctacaactaacatcacacttaatagtgaaagactgagtgctttccctctaaaatcaggaaggaggtaaagatggtcttgctatttttattcaacattgcatttaaggttatagccaatgtaataaggcaaggaaaggaataaaaggcatcaagattggaaatgaaggagtagaattgttttgttctaaagacatgatcacctatgtagcaaatctggtggaatcttaaaaaaaaaagcaagtttgagtttagccaggttcaggatacaagataacttatgcaaaaattggttacatttctatatactaagaacaattagaaatttaaatttaataaagtgtacatgtatagatacatctaacaaaaatgtgcaagtgttgtacactgaaaactagaaatcattgctgagaaaaattagagatctaattaaatgaagagatatagcctgttcattcatcaaagacctgttaacatgtcaattctccccaaattaatctatagattcaacatggtcccaatgaaaatcttagaaggctatgtagaaattgacaaaatatttctaatttattatcaagtcactgaggtattgaccacaatgcagacaaagaacagagttgggggtccaaaaatagatgcacacataaagaaaactcacttttttccaccaatgatggatatccttaagcaaaatcataataataaaaataataactttgattcatactttggaacatatataaaaattaactcagaatgggtcacagacttaagtggaaaagctaaattgacagaatatctaggagaaaatctgtgtgacctttgattaggcaaagatttattggataccataccaaaagcatgatccaaaacagaataaattagtacaatggacttcatcaaaattaaaatctgctgttcaaagaacatggttaagagaataaaaagataagtcacagactgctagaaaatacttccagattatatgtattataaaagaactgtgtccagaatatatacagtacttttaaaactcaaaaaaaattttaagaacccaattttaaaagagaaaatgatttgaacagacctttatactgatgccaaataatcatatgaaaagatccaacaatattagtcaatgaggaaatgcaaattaaaaccacagtgaaacactactacacacctattacaattgttaaaattaaaatgatcatccatatcttatgcttcagggatgtggaggaattagaactcttacacactacacactacttatactgccagtgggaatttaaaatggtacaaccactttggaaaacagtgagacaatttcctaagacacacacctaaccatatatagcactcattctactcctagatatgtaactaagtgaaaagaaggcacatgttcatacaaagactcgtgtacaaatgttcacagcagctttattcgtaatagtcccacactgggtctagtggcttatgcttgtagtccccgcacattggaaggctaaggcgggaggctcacttgagaataggagttcaagaccagtctgagcaatacagtgagaccctcgtctctacaaaaaaattaaaaattagctggatgcagtggtatgtgattgggaggctaagaccagaggattacttgagcccaggccgcagtgagctatgatcatgacactgctgtccagcctgagtgacagcctgaataagtaaataaataatagcctaaaactggaaacaacccaaatgaccattaacaggtaaatggataaacaaattgtggcatacatgcagtgaaatatgctatggtttgacgctgtatcccgacccaaatctcatgtcaaattttaattcccaatgttgtaggagagatttggtgggaggcgtttggatcatggggcagatttctcaccttgctgttcgtgtgatagttcttgtgagatctagctgttcagaagtgtgtaacacttccccctttgctcttgctctcctgctgaccatgtgaagaaggtacttgcttcccctttgctttctgccataactgtaagtttcttgacgcctcccagccatgtggaactgagtcaattaaacctcttttctttataaattacccagtctcatttagctctttatagcagtgtgagaacagactaatacagaaaatactacccagcaataaaaaggaatggactatggacacctgaaacaacatggatgaatcataaaataattattctgagtttaaaaagccagaccaaaagaataaaacaaaaaatatacactgtatgattccatatgtataaaattccaaaaaaaatcccaactattcatggtggcagaaagcagactattggttgcctggggattgagatgggaggcaaggaaagtggaaggcaggattgggaaggagggataacataggggcatgaggaagcttttggggtgacatgtgcattttcttattcatgggcatatatatatatatcaaagcatattaaattgtacacttaaatatgtgcagtttattgaatgtcaaatatatttgacacttatacacctcaacagagctactttttaagaatatgaaataaggtaggaggggcatgagcaatgagatattacttaattggtacaaagtacactattggggtgatggtgacattgaaacctagacttcagtactaaacaatatatatatattttttgagacagagtcttgctctgttgcccaggctggagtgcagtggcatgatctcggctcactgcaacctctgcctcctgaattcaagcgattctcgtgcctcggcctccctagtagctgggattacaggcacgcaccaccacgcccaagtaatttttgtattttcagtagagatgggatttcaccatgttggccagtctggtcttgaactcctcacctcaggtgatccgccggcctcagcctcccatagcgctgggattaccgggcctggctaactatatattcttgtatcgaaactgcacctgtacctcctaaatgtatacaatttaaaaaaataaaacagccaaattgtcacaaaataaattattaatagtgtggagtgtttcactttcccatgtttttttttcattacaacaatacagtgagctacatatcatgattatttttatcatattattgttttacattattattgttcccatgtaatctatgataaaactgaggctcaacatattactttgctcaatgtcagataagctttggcaacaaacacgatatggaattccttaaaagcaaataaaataaaagatagacctcacttcattacgttggtcctcaagcatttccattcctgctttctcactctcccccctcatatcccgaagcaactctcactcaattcaagagtgcccatcattcccaattcccaatccccctagaaatgtgaggtaacacctcagtctgccctgtccaatgcagtaggctctagccatctgtgctactgagcagtagaaatgtggctcatccaaattgagaagtggtattataagatacagcccagtttctgaagatgtaaatagctcattaataatttgtacattggccgggtgcagtggcttgcacctgtaatcccagcactttgggaggccaaggcgggtggattacctgaggtcaggagtttgagaccagcctggccaacatgctgaaatcccatctctactaaaaatacaaaaaaatgagctgggcatggtgacgagtgcctgtattcccagctacttgggaggctgaggcaagagaatcgcttgaattcgagaggcagaggttgcagtgacccaagattgtgccactgcactccagcctgggtaacagagcaacactccgtctcaaaaaataaataaataaataaaaatatttttacattgattttatgttgaaattataatatttcgcatatactatgttcaataaaatatattatcaaattaattttacttgcttatttttactttttcaatgtaattcctagaagatttcaaattatacacgtgtcttgtattatctttctgtcagaaagcactgatttaaatcctactggggaaagcaatgttatgctttttgttatgacaacttcggaaaatcattaacttgtgttataatcatggtgctatatagctttggttttgtaaaagggtggaaggctctaggtagggtgtcatggatagaatcttgtggtgatagttgaagaaaaattggccttggcagggtagcagatggtgattaggaagaaaaaggagccgatcatgaactcatagtagagtggtagaaaaactttgatcccaactctgagatcagttttgtaagtcaaaccagttcttgtgccttagggtacaagcatattttgaggtacaatgctagtgttgtgatctgtcacactcctgcagctgtttgtggcagtcatgtaagatggagccagcccagagtagtctgggcccaatcagctgcttatcttgcaactattaccaaagcaagatttggagcagcagccgcagcttttgactctgtggattaaaatctcaatctccccaaagccttgcctcatgccaaactcctgtgcaccataatgctctctcttctgctcttatttctcagtcagctagtgttgtgccacactgtttgaaattggtaagtgtcaatgaatcttggaagcttttcttgggcccactgtctaactcttcaccataagaaaagaaggggcatcagtacctactgtactggcaaaattgctgcgtttcagtacatggtaggtagtgttccattttcatcaattatattaaatccagctcatgtaaaatgctgttgaaattgcaaagcaaaacaaatgtcacaaaaggcagagccaagttttgcggttaaattgtactctcccagactcttccctctgcaatgtcttgggctgccatgtgaaccacttccctgggtgtaatctttccatcttgatggatatcttcctgttgtagctgttaagtagttaatatataacatccctttttatcatcttctgaatttggaatcaatggaaaaacagatccaggagtcagacagatggtgagagaatgtggcttttgattagtggcccagaaatctccctaatacttcactcatcaatgaaacactcaccaagtcaccaacagagctggacagcaaaggtctactccaaactgagtgcaggaacaaaaggatcagagcctccatgtcctgtggcatcctccaaagacaaaggagtccaacaaggcactgaaaatgctcagaaatgccaaccaaactcaaaccaaattaacccgcaggagtaaggcatagggaaaaggtcggttaccctggcagaagtccctctgcatgaaaacattaggccagggaaatggatattcctcctgacctctgcacctatataaatgcattcatctgcatgtttatgatgggtttttacaaacacgtttgtcagggtttggcatgtagacctataaaatctacttttctggatccaagttctattcattcactcattccaaaaatatttggccagtgcctgttacaggctaggcacaggtctaggtgctactaggtgaagaaacagacaaaaaccctgccttcatggagattatatttttggcagagaagactaaaaaaaaaaataagcaaataagtaaaacatatggtactacagatggtgaaaagtgctattgagaaaaagaaaacaaacagggggtgagtgtggaagttgtgatatcaaacaaagtaactagggaagcctctctgggaaggtaacattagaagaaaggcccaacagaggtaggaaaaggagccctgcagatatttagggaaaaagtgcaccaagcagagcgaacagcaagtgcaaaggccctgaggaaggatgcttgttatgctagggaaaatgcagagtctaaagtggctggaacagaatgagtgagccaagttcacatatcatctgtgtcttcagggttatgacatgttcatgtcatgatactcctgccttttttgtttgtgttttaaaattcagactcagcaattttactgcaactctggtgctcacagctatcacgttcctctgtacacacaagccataagcacacccgtttcagtagttctgaggctgcctcacctttgctcagagcctgaaaactgctggtgggaacagcatctctcttcattacatttctctgaattcatcaggcacccagcaaatgccattcagaaagcaaattctgaatatgtgtgtggtgaaggacactcctagactattgcctcaaggattttcatgaaaaacctgccccccgtatgagtcttcccagcagcagtggcttcattgagaatatatggctgaccactggcatatttagttcatacttagcacagccttctccgaccatcttaccttgggctgctgtaacaaatgtctacagaacagttggcttaaacgacaaacatctttttctcacagttctgtgggctgggaagtccaagagtaaggtatggacagatctgatgtctggtaagagcccagcccacttcctggtttgcaggtggctgtcttctcattgtatcttcatatagcagagaacagagagaaagagcctgtgtctcttcctctttatataagggcattaattccattcctgagtgctctaccttcctgacctcgttacctcctcacctccaaatgccatcacattggggattagccttcaacacatgaattttgaggtgatacaagcatttagtccaaagtacccacctttttccaatttagctactggcatttgtatacattaatgtccatacctcctaccgcccactccaccccaccatttattcattggtttcacaactatttattgagggtgtattataggctctcaatgaataaaatagactcctgcccttgggagcttatattcaaaaggataataccttctttgaaggcgggacgctgtcttagtcaccattattcccacggcccatagcacagtgctttctttgcctaacatgctctataaaaatatgcaaatcttgagacaagtcacaaagcagaattttgtggaaccaaaaataaatgtgctcatctcttttattctttaaatggctcatacagactaattggaatggagatgcgtatttaactcaatgccttcctctaaaacatactcaaggtccatttatttccaagatggcattttgacctgtgacaactaaagccccatattgcaaaaaaaaaaaaaaaaaaaaatactgtggcaagatgctagatcggtctaattttctccctgcattataaatctttaaagctattgggagtgggagtttaagatggttgaccatttaacgtgactgtttaataaattgcattgctagtaagccatagtacttaacccctcaaaatatcagtatattaaaatcttctataatgttatcaaggagaagaaaataaattttgagaattttcctaaagtgcttgaattaatattatctttttgtggtctaggaaattctgctaacagccctgctgcttttccattaaggttacagtgagacgaagcatgtggcacgcagcttccatttgtagatcaacagtgaaggagacagatttgtagtttttatcagcattagcagggcaaagcacatttgttcacaggtgttaggagtcaccacttgaatgaaaagctgggcagggaaattgtatttgtctagtgaaaatgtaactgaagcataaacacagcccacacctttgagtgtggcattctacagtctgcactgctgttaactcacattgaaaaaatcttggcattttctttccttgaattcattccttaaatggaattagcacattttaaatccttatgattatcattattgacggaatgatagcatttggatccgcaacaaccttttcattgttaattgagtgctgagaatgggagatgatatagttattctgatttttaaaaactagaaaatggaacgtgtgaacagtggcatatgaagctctttgacagacctagggctaggactcaaggcatgtaattccaaaatctttgtttagtcccttaggaaatagcttctcctgagttttgtcctgttgattgtttggcagttcccttaggagactaaatttgctgaagaaaggcagcctggagcagggttaacagtagaaattatcattttttggatccactggccttgtaacatgggagaaatctccactccaccttatacacacctttttctcataatttgttggaaaatttatcttaaaattcagcatcaaattcaattgatcgtttgacctactgacttttaagaacaacacatttttatcagatgctttgttagacactgtcagataatcaaaagtacttccactggtttacaggttcctcgagaagatgggagtatattctgatgtgccatgaatttatttttttagaaaagcgtaagagaaaatacaatacttggaaaataaataaaatctgaacgtaacttttatcacatcccccaacaatgaagagatgaggcatgaacatgctcacctctacccattgtgcctactgtgctgtaggtattgccgaacatatggtgcctggtgtcacccactgttctcattcccccttccctctgagatgtgcagaccagaccccatcagcatttctagggaggataatataatgatatcaagttaccagattttgatgtgtgaaaaatgaactaggtagcactttcctagccatgggagtatatgcaaacaatgttattgagcaaatattatgaattaatttaatataatcattacaatagagaaatattctccatcatttcaattgtcattcagttgtcaccaggagaacaagtattactgaataaatacgattttcatcaggatcaagtctgattattggtttattttaatctagtttttgttttgttttgttttgcctggaaaaatatttaccctgcttaagttatagatattacctgttgtttgaaatgaaatttctacctttatctgccccaaactttgggttgacaaaataattccacagatgaaaacattgctgagttataaatccatattattactttcacaaaaatctagcctgtgtccaggataaaatgacaatggcactttgaaagaaagtagatagcttcaaattatgtctttgagttatggttctgggctgtgaattaggctcagaacagagaagaagagaaacatttctgttaatattcccacagtggaagaacagaaaggggtaaaagagcaatcatcacattttcacactctcaaaagtaatgggataaagatgttccccgtaactttagaccaaatgtgtagacaaaggaagaaagtgtgtgttattttactctcatcttctctcatctccttggttagaaatgtgtcgctcaagcaactacttattcaaatagtaagtgcttgagggtagttaccgttattgaatctcatactgtattagggactggaatggggaagcaccctaactgcagaagcataatctcacttttcagagcagtgattttcaaacttgagcattcatcagaagcaccacgaggacttgttaaatagattgctgggcccaccccggagtttctgatcaggaggtatgggtgggacccaaggatttgcatttctaataagttcacagctgatactgacacaattggtctgagaaccactttttgggaaccactgctcttgaaagcagcacagcaaaagtgaaacatattttggaatgcaaaacctgtttcagctgtggctccaccgcttcttaggttatttgcctctgttgcccctatttgctcatgtacaaaatgcggagtactaatatctgcctcatcaggttttggagtatgtgtgaaactatatgtgattgtagccgcatctttatgtaagtgtatgaaaaatgcatatgcaactggtatgatttccttcatcaacttggagtactaatgcaagtccgtcttttttatgtttccagttaatcattcctacctccacttgtccaatgtagatagatgttcaatgtctgcctcttgagaccacctccttcccccaaaacatatatctcaggagtttactcagtttgaagaacagtccaccttccaactctagaagagagaacctcagagtctaatcagcccactgacctttatttctgctccaccacacaatgtcaccatttgaaactcagctcacaccatcggatggaatttttcatctgtacaatgctcttgctagaccaagtttcgttacaggccacagtggtgccccaaacttaggatccaagattgcggctctttcagctcacacacatacgctgttatttccctaaaatgtgccactgtacagggcaattgggtatgatgggttttcagtctaggccacatgctgtgctaatgccagcacccactgctacctggcccaacctccagaccatgttatggtgccagggttaccagtcttgactcccccttttcttgagatgaatgctcttgtgtgacttagggtgcccattctgcaatctcagttctcctcaacaggaccccagtgaggtgttccagctgtcctccctgggtctgtgcttgtacatctgaaatcttctaataacctaaaaagggaaaagggctggaatttcaattgttttatttcaagattggtcctcaatgcttatgtcagcttacctccctcaatggcctgccttcagtgattttgccgaccatccccacttcttcccattcccctggctctactggaaaagtcgtagcaagtaggaggctgtccctaactagtagccattaccaatgaccaccaaccttcttataactccactctgctctcccaggtgatgacatggggctcttgcaactgaggatactgctgatcctttacagaagttggtttttcatctatccattacttgagatgtggaggttttccttgtcccctttcctagtgagatccggtcttgccacacactctgccatttgctcaccatgcagaatccctgcaacatttcactctttgcaactgggtgggcaatgcgctaaaagcaaagatcctctttgtcctctctgttaaaagctgaaccagagccagttccaagcaggcctcttgcactccctcctttcttaacccttccgtaactttccaacagaaggcacagcaaggcccatctcacccccaccagaggaagaaaaaagaggaagacaaggaaaggaaggaaacttgccccaacccaaaccaaaaacttcctagtgtgtgtccttgacacacaatggagcagtttctccaaggattctggggtgggggtgggagaatggcagaaaaagggaagaatcggctttttttaaaaaaaaacaaaaaactgatgaagtggcagagttaaaactttccctcaatatttgtgtgcagaatctatatctagtgcttttaaaaaatcattgttgttaagatatagcaaaataataattacccagtcattcaataaaaatgtgtccaacgcttgttctgagtaaggactgttctatgtgccagtgacagttatgggaagaatggcgcaaggaatccaccccatggatgctttgggtcaagtagggagctccaaagacacgacattgatgacgtgaggatctgtcacagcagttcaaggttctgaatgatgagccccataggaggaccatagagctattcaacccagagctcggagaaattgttttctcctcaggaggaattgttcccatgctgtgccatgatctcctggcctcctaacaaatgagacatgctctctgtggtgtttttctctgctcacagggacagtaagcatctattctatatattctgtgtacatgttttcccttggggttgatagcagctctcttctaaatgggttaaccagcagcagagatgcagcctgtggttatgaaatggagtcatttttactattagtttatggacaatagtgaggagtttgtgtcgcctgttccacctgttattaactattttaacaatctctcttagaagtatgcacagaaatacattctgggtttgacaattctatatttcagatcatatctggcattcttcaaaatagaatgagctcaataaataataataataatacctaacttaattcttaagtaacaattcataatttataaaactggtacgaatacatgagctctttataataactctatgaagcaaataaaataatcttcatcgttatggataaactgtacctctgagaagttcagagctttgcctagatctcagccagggtgactgattactgagggacgtttggcaatatctgggagcatttttggttgcctcaacttgaggggcacagagggtgactacgggcatttggtgggtagaagccaggtatgctgttaaacatactgtatgtaatggccaggatatacttccacgtcaaagaattttccagcctgaaatatcaatagtgccaaggttaagaaaagctgctctagggtcacaaagctggtaaaatctgaacccaggtatattactctaaatctagtatctttctatgtcccccaactgtaaagctttcatcttgaattgaatggggaagcatcacctattacattttacattatgttcattttggtttccctttttcctgagctctggggaaggggcggaaattttgcctttagtagacaatgaaatgttgctataatataaaatcatacctagtgattctggaaaatctttcagcataatttccacctctttgcaactttatcaaactctgttgtgtctgcaattacaattttttggactacaaagggtgataaattttcctgtgtttctcaattctaagactaagatagacaacatctaaaaccatgtaagagagatgggaagcaggagtaaatgattgattagcatgtgtgtgtgttctcaattattgatggtaatggcccgtggatgtaatgtgaacttgccaatgctgctgataatcgaaaagtcatttttattgagatttggaatatgaaacactttttaaaaggagagtcatctatctaataatcactttaattttgaggtaagctactatagcagttatttttaattccctaaatacacatcactgtgaggcaggagaggcatccaagaatgtgctagtcagtggcggatgccaacaaagattaaaaattggaacaagattagtaaaggaatggctaaaaaagctgtggtataggcatctcctagccaagggcaggagagttgagggcgtggataccagagccagacagccggggttctgaccctgaccctgaaagcttactaatgttatgatcttgagcaagttacttaattgagcaagttacttaatttctctctgcctcagtttcctcaactataaaatgggagtgtatataatacctaccatatagggtggtgctgagaactaaatgtatcttaaaatgtgcctgccacatagtaagtgtgatagtgctatatattttctatattttgtaggcattaacgtgaatccggcaaacctatgtatagtgatgtgaaaacatggcatgacatcccgttaagtgagaaaaagaaaaagaaacgaaagaaaatcacagagccataattatcacactggcgcatttatattttaaaaatccctaatgactagacaggtgacttataagttgcacagtgaggaagaacttgaagcctttttattccatgagagaagtttacaatcactttccggtttgggagtaggtgaatacttgtcaccttgaagccgaccttctttttttcttttttaagacagagtctcactctgatggcccagactggagtgcagtggcatgatctcggctcactgcaacctctgcctgccgggtttaagtgattctcctgcctcagcctcccaagtagttgggattacaggtgcccaccaccgcacccagctaatttttgtattttcagtagagacagggtttcaccatgttggtcaggctggtcttaaactcctgacctcaagtgatctgcccgccttggcctcccaaagtgctgggattacaggcgtgagccaccgcacccagcttgaatcagactttcctttccttttttttttttttctcagttatggaatgtaaaatcagaagtccagttgggcctcagggaaagggcacagaaagaccttttaagttccttcaaaggccacctctcccaagatcctttggaatgtgaatctggtcacttgggaagaggtgggcagatggtgcaggggttcaaggagccctctggaaggacaggcatcttgttggttactatacaatactccactgtagattatatgatttatctactcaattgtccctcaaatttaggttttcccagttttggctattatgagcacagctgctttgaacattctatatatgtatttttgtggatacagcacttatttcttttgagtgtgtaacgtggttagaacctgtctactgtattaacatggtcatgtctgaggtctattggaaagaatatacaggcatttctctgtatctgagggtgattgttctgggccttcctgcggatatcagactccacaggtgctcaagtccctgatataaaatggcacagtatctgcatataaccagtgccatccccccatatactttaaatcatctccagattactagtaatacctaatgcaatgtaaattctttgtaaatacttgttacactctattgcgtaggaaataatggccaaaaaatagtcttatatgttcaatacagaatttttttgaatacagtatttttgatctgtggctggttgaatccacagatgttggaacccccaaataaggacagtcaactgcactccaatggtcccaaagaggaatgccaccagagggtagaagaacctatctgggtggcaaagcctgtatactgtggcctaggagtacatgagggtgaccacttctggtccaggtgtagctgaggtggaaagcacatttgaacaaccttcctttgcccagagttcacacccgtgagaatggacaaagtggataatattggagtccatgtgtacggttccactgtccctgtgtagaacacaatattagacattggaacaatgaagcactctaggacagtactggccctttagaggtttagagtctaattgaggaggcagcagcaatatataaatctatacatcataataatttatattagaagcaatatgttcatctcatacattgctggtatgattgcaaattggtaaagccactttggaaaacagtttgctggtgtctactaaaactaaaatgtgcctatctgtgacctagcaattctaggcatgtaataggtgtatcctaggtacatattcaaaagaaacaagtgctgtatccacaaaaatatgtatatagaatgttcaaggcagctctactcatagtaaccaaaacctggaaaacctaaattttggggaaaattgagtagacaaattgttgtatatctacaatggagtattacacagcaataaaaaaaaacagccttctcctacaggcaaccacatggacaaatctcacagatacaatgagtgacagaagccacatggagttgaatatacactggatgatatattccactggatgatgttccaagttcaagaacaggcaaaactaatcagtggcaacagaagttcaatgggatgggtattcactatgaagcagaaggaggaagccttctgggttgttggaaatgtttcatatcttgatctgggtagtggttacactgatgtatatataagtaaaaatttatcgagctgtacagtttttcactttttatcatacatatattgtaccacagttttttgttttgcgataagactctcactctgtcacccaggctggagtgcagtggcacgatctcggctcaccgcaatccctgcctcctgggttcaagtgattctcctgccttagactcccttgtagctggggctacaggtgcccaccaccacacccagctaatttttgtatttttagtagagacggggtttcaccatgttggccaggctggtcttgaactcctggcctcaagtgatctgcccgcctcggcctcccaaagtgctgggattacaggcatgagccattgcacccagtctgcagctttctttttttctcaagtttttgtgttaagtataataagtaaatgagttcagagcactgagtgatgggtgaaggtcaagaagtcagagcagacttcagaggggagggaagaattgaggtggatttgatggaaggctggaacctgcacagggaaactgcaagagggaagttggatcatggaaggaaatatctgagaacaaatgcattgtagcacagatgccaagaaagcttggaaaatcttgagctttctcttcaacactcatcttccctccccaccagttgagaagccttgggtattatgtaggataatcttcactcagctccaagggtaggctttgatagatttgagtctcagcaacataattacttagggatgaatgtaaaccagtcatgacataatttgagtcaaaggcaagtatattcctaaaatggtccagtctcacctcagctgaggctttagtttcaaggttcagggggcaccaacagctatctccgtctagaggcaaacaaaagagtgattgcttccatttttactggtagccatcttggtatcatgagggagttagcctgacataaaattgggctgagttgagagaaaagtagagaaatgaagctggagctgtatttgatggctctaaacctttttggatttgcaagccctttatcatttaagccagtttgaattgatttttctattgcttcgcaaccctgatggcttttctgctaatctatacacagcatttcttgaatgctcgttttcatggccatagccacagccctatttcagaatctcataagcagtagttaagtgaactgcagtagctttctaactggtctctgccttcagtttctttttaccttaattcatcctccatgttgcctccagaatgttcttctcaggcacatcttatcactgccaccatgtgatcatcctaatggttccatgcattgtgaaaaaaggccaatggcacatgtatacctatgtaacaaacctgcgcgttctgtgcatgtatcccagaacttaaagtataataaaaaaataaaaaatacaaaatagaaaaaaggccaatggatccaaatttgctgggttttaacagtttagtcttttggttcttctcacaaaccctaacaagatccttactctctagccttctcatctttgccagagttaatgcttcagcccaggacattcttttctctctatctgcttcatgggaataccacttttctttccagattcaactctagtctcatctcttctaagaagccttctaagatctctccagctgatagcaatgactccttgcattatagttttacggcatgattttaccacttgataactctctatatagtttgtcaggggtttgggtgatttattcttgtctagcctacccattagcatgtaaaggctgggaagttaagggccccagtttttcatcttgaatgaattcttcattgccccttgcatagtgcttttcatagacaaactgctcaatgtcttgtgtcctcaatgtcatgtgtcctatgcttaactgactagagcaaagacttcctttaggagaggatatggaaataaagttggaaaagttaggtggggagggggttggagggcagcttttggaggattttaaaatccagattagatatattaagtgcaattattttactgcactttggaataggcaaaagattatctgttttccaaaatttctttcattccttctatattatttactctttttaaacttttacctttttttttttgagacagagtcttgctttgtcacccaggctggagtgcagtgctgcaatcttggctcactgcaacctccgcttcccaggttcaagtgattctcgtgccttggcctcctgagtagctggggatacaggcacacaccaccacacccagctaatttgtgtatttttttagtaaagacaggctttcaccatgttggccaggctggtcttgaacttctgacctcaggtgatccgcccacctcagcctttttaaccatctccttttctttgggggagagggaagggggaaagcagctctcgggtttgaaatatcatgcagtttgagaagaaatagaatgcaaagatgattagctttcttttctcctctccattataatcccataatagacttcatgaatacccttgctagcaaagcaatgagggccattgcattagactgttctcacattgctataagaaactacctaagactgggtaatttatgaagaaaagaagtttaattgactcacagttccacaggctgtacaggatgcatggctggggaggcctcaggaaacctacagtcacagcagacaaaggggaagcaggcacatcttcacatggcacagcaggagagagagagcgaaggggaagggttacatacgtttaaacagccagatctcatgagaagtcactcactattatgagaacagcaaggggagtccgcccccatgattcaatcacctcccatcaggcccctcctccaacactgaggattacaatttgacatgagatttgggtggggacacagagacaaaccatatcacccatctacttgagcagtggctataaacttttttttttatgataacctagtatgcatgtactatactgtatattatacagctgaaacaagacttttgtaaatcagcaatactcttgttatgatgcaagttagtattttccgttatgccatttcacttcaaacaaacaaaaacaaaaagttgatctaaatcaatttcatgaccattaaagaaacgtgttcttctcaggcacatctgatcactgttgtcacatgcacgattctaaaggttccacacattgtgaaaaaaagctaatggatccaaacttcctgagttttaacactttagtcgacatatgaaaaatgtggcattaaagcatatgtatcctaattactaggttacaactgttgaatgagctaagtgcttttgccagtattttatatttaatttgatataataattttatgacagagcattatacccttttaatagatgagaaaagagaggcttagaggtacagatccaaggttacacagctgcatatggcagagctgagatttaaacaaaagtagaccaagcttctgcttacagctcagtgacatgtgccatagctttaagtgacagccaatgcaatgaagatttccatgtgctgatttttttccagatggagtctcattctgtcatccagaccggagtgcagtggcaccatctcagctcactgcaacctccacctcccaggttcaagctatcctcctgcctcagcctcctgagtacccgggataggcgtgagtcatcactcgaggctaatttttgtatttttagtagagacggggtttcaccacgttggccaggctggtcacgaactcctgacctcaagtgatccacccacctcggtctctcaaagtgctgggattacagaggcgagccactgtacctggcctgcatatgctgatttttaaactttcagcacatgcaagggaaaacgagaccaccgacgtacagacaaaatgctctccagcctacaacttcatttcttctctggatctctattctggccctagaaatctgcaagtcctccaaaaaaaatgacaaaacccttaaaatagaatagtcaggctgcaatagaaaaaacagttttatgattaggaggaaacttctagaaggctagtactaaatctttttcagtcttctttaaattaccaaaattccatggacactcagaatgaaagattgttgaaattttatttttttccttttccttttcctaaactcccaaaccatctaaaagcaggcaaaatctaaattctactctgtatatgtctaggtctagtaaggaaggtttattatcttaaacatcaatctgttatgtatgacttgatttctaaaattgcttaattttctgggtcattcctggaggaatacttatgcactacgcagtgtgttgggtcttaaggatacaaagacctgctcctcacctttaaagggggaacatgcactgaaaacagagaacataataaaccaataattgtgcacagtgggacccatgcagaaataatggtacaaggtgttgaggaaagacagtgaattgaatcgtaatcctgccaaggcagaattttgatttttcctacttttaggtgttttgagggtttgggaaaggaaaagggaaaaacgcatctttgacaatctttcattcttagtgtccatgaagttacattaatttaaataagactcaaaagatttagtggcagcctcagagaaggctccttctaatcataaaactgttttctctgttgcagtctgagtgttctattttaagggttttgtcattttttggaggacttgcagagtgggagactagggcaggaatggagatccagagaagaaatgaggttgtcagctagagagtattttgtctgtacctgggtggtcctgccttcccttgtgtatgctgcaagtttaaagttcagcgcatgcagatcttccctgcagttgtccatgacctaaagccatggcacatgtcactgagctgtaaggagaagcatggtctacctatgtttaaatctcagctctgccatatgcggctgcgtcagtctcctcctctgtaaaatgttaaaatgttataatagtgaagcagtacgatgacagcaccttgtattgtattaaaaataatgaagacactgtccccatggcttggtaaagtaaggcaattattgtacttacatctttagggtctagagcttaagcgacaggagtcagtagcctgctggaaatcaaactcaccagcaacatttactaacaatgaaatcaagctaaaatgaaaccccaagaaaaactggaaaaaatatgaaagctgcactttttagggtaaagtgtgcatcttgagggtacagacagattcttcattcatttatttaacatatagttattgaatactttatatgtgccaggcactgcatgggtgtagagacatggagtggacaagattcatgtactctggcatcatggagtctacagtctgatgagggagctggtcaatgtaaaaggaaatgcatcaacatgaggatcccatttgggcacagtggccctaagctaatgttatggcagagaataatacgattgagtacttactttagacagaatagttaggaaggtctgtaggaggaggtgatgtttaagctgagaccagaaggatggatgacagggagttagccttgtgaacagtgacggaaagaattaagagaccagcatatgcaaaggccctggggtgtgtagaggactgtgtgtgtcataaatctctggacttctttcacacaaactggctgaagctctccccatccctgttgccagctgcctttctgactcagacttacagtgtgagtagggctccagattgaggtcctagctggttagttatacccatttgacttatcaacctaaaaatatgctgggatagtcttccctttctacacatttgccacaggctatatcttgcttactgtgagttagccattcaatcaagactgcccttgacatttatttcattctgattttttttttcctacatttttgcctcaggtcctgagagaatggctgctgacacaaggtagatgctcaaaaattacttgctgcatctttggatgaatttcattagagcatcagagaggaaatttttgttgttgtttgtggcgctatttgcttgtttattttaacacaggtgggactcggggagaacaaactggatggaatttgaaggagaatggtagggcattctggattaccagagggctgcctggctatgccgctccttaacgacatgaccttggcccagtcatcccacttgagccctgacattctcaactacaaatgagggctttagaccaagtacccttcaacatataatgttttttgtctatgaatccagtggcaaatatggggtatcaatatttgccactccttccatactactgtgaaagaagcattatctttaggcattaattcagctcatgcaataatgatgccttatatttgatagaaatttgtcatttacaaagcaccttcatttacattatctcatttgattttaaccagtcatgtaaggtatttaagatagttataattttttttttttacatctgacataatgtgaaacttgcccaaggtcacaaagagacagaaaagggaatgaatgacacttgtctgtgctgttctgagtataggtggcacaatgaatcagataggatctctatcatgtgtgagtgaagcaaatttttttagtttaccccctagaatagcggtcactactttagaaaaaaatgttaatgacagtgttgacaatgttgaaatgtaaataatcttttttgtattaagttctttagtagtaaggatcagaaaagtacttaggttagctcacctggggaaggggaacattgcaggaattagcaatctcatggacagggaatactggactcctcatagtaattgggaaagaatctctaggacttaattgtttgtctgcttttcttggaactcccaagaccgttctctcttatctgaagagcagtttcctctgcttactcatggttcttgtttccctataaccatggctctcacatggcttagcttgctgggaccaggtctggcccactgactacaagatgggcgtgatccatcactcaccataggctacggtcaatctcttcctcttcgctcctggggtccaatctgctggggctggtggggctggggcaagaaggagtcatgtggcacccccatcaagttctaccttgctatgaactgaatgtttgtgtctcctccaaaattcagttgaaaccctaattcccaatgtgctagtattaggaggtggggtctttgggagataactagggttagctgagatcatgaagggggagcctccatgatggcattagtgttctcataagaagaggaagaaagaccaaagctctctctttctccactatgtgagaattcagtgagaaggtaatcatttgcaagccaggaagagagccctctccagaacttgaccatgacggcaccctgatgtcagactttgtagcctccaggggtgtgaaaaacaaatgtctgctgttgaagtcacccagtctgtggtattttggccagcctgaattgactaagacatacttctatatgaggatttatgaacaggttcctaggcaagggagtctgcaaattgaagaggcatcccaaaacatgcctactacccctccttttttatttaagtttcacaggaccctcttggttctccttttcttaggtgcctccaatcttctaagtataacattctgtgacaattctgtgacagaataagtatttattctctgataattaaggaaaaacaaaaacaaaaagaagacaaaacacccacatttgtccctgaaatttaaaatacgaagggttgttccctggttttctgattgtagggtcaaaaaacgaagaagcaacgagactagcaattggatacctttagatcccaaacttcatcctatcattggtttctggatagattatttattgcccttgaaattcagcagaagggggctgggtgcagtggctcacacctgtaattccagtactttgggaggccgaggtgggcagaccacctgaggtcaggggtttgagaccaccctgatgaacatggagaaatcccatctctactaaaaatacaaaattagccgagtggggtgacgcatgcctgtaatcccagctacttgggaggctgaggcaggagaatcgcttgaacctgggaggtggaggttgcagtgagccaagatcgtgccattgcactccagcctgggcaacaagagtgaaactccatctcaaaacaaaacaaaacaaacaaacaaaaaaagaaattcagcggaatgaggagtcttaaaaacctaaaagctagaaggggttttattggattatctaatctaacctctggattttacagcaaaagacattgacattgggccttagttcaaagaatgactagaggtagagccagtggaatttctcctaacccaacgtttgtgatcttttcattacatcatctaagcagaacctgtaggggttaactctgagaattggggatgatgcttgtgataatgcagcaaaaagtaatgtctaaatgtaagatattattttgagatgagaacaccgaatggggatggaagacaggaatcttcaccatgtgtgaatgtacaggaaacaaccaataaatgccttaattcttgttctgtaaaaacttacatgtaagtaaaagatcgccgaaattgatctgaactctgttactgccacaaacttttatcagcaaatggagattaggatgttcccactgccagatggtatataggaatatggttgaatgtggactgttatcacagactgtctggtttcaaaggtgggctctgtcactcaatatagttgtgtgacttagttaagtttgtaccacttacaaaacttcttccttgggtcaagctactcaattttacttgcttctgttgcccaatatacaaattacagtagtaatacatactccatagggttattcttaggcttaaagtagccagtatttgtgaagttataggaacactgtttagcatatagtaaacacatgtgttatctgtcattattattacttgcttttctgttgcaaagactaaaagctattgttttggagtagggaaatttccatttaaaattccattggctaggttagcggtatcagttgatttagcaaggaattaagagatgaaaaggaattatttctttcgtggtggcttcatctttatctgtatccactataaaattcgtaaagtgggcgttatttgctttacacagaccagaaaacaggctacagaaggtaactgcttggccagaaatgggttgagtcagtcgtggcttatggcacaaactacatttgagtctacaaagcaatagatgaaggtcttcgccaagtgaagactttttggacttggaaagttcacacacttccagcgctctataagaagatagggtgggggagttggaggagaggacccacatccctcttccagcctaggaccaacttggcccagaggccttttcccatgccgcccaaggctcgctgagaaatctggctccacacagtgggagaacccagggtcaggcttactgtgagtgaggccggcccagtctttcccgagccttcctcagggagacctgggggtatctcacttccctgcggaagtctgtggagtttaatttgtaaatttgtgccgaaactacacttttgtgtcaaagagcaaggacggccaagaagcggcaacacgaataagagcgcagggaaatggggcctgcgaacgacctcggcctcgggaactcccacagtgccgccccacgcgcgacgcctacccgagaacagccacccgcctccgctcccggaggaggcgtggtcgaccagcaccgccatcttggccgcctctctaggcgctctgtttaccactctatggtcgcctgctcccgccccgccccttcccagtcattgtctggaggagcagccgcggccgcagctccttctctttataagcccgcagttcccggatgtgaatggattacaatgtatctttcagggaaacctattattatcaatgtgactccacgggggagtccatggtgatgatgatgaggaggaggatgatgatgatgagacacctctaaacttggaacaagtttaagactttatgagagaagaaaaaaaatcaccaacaagaattgtttgaggaaaaattataactatcctgtgttcatttttttttttataaacaataagaaaaagttgttggatttttttttaatgatttcttttttgggggagggaattttgttgcagttttatggtggaaaatgcaaaaaccagagccaggtgcataatcttgtaatctgtggatatccctggagcaggactgagtaccagttaaaatactttttggggatacacatgtgagatactaagtacttgcagaagatttttgtctctctttttaaagtctctttccttggaatattgtgagaatatttgtggccatttaaggtaacgtttcaatttgccgtcagagtaaactgtttgtaattgaatttaatttttaaaatgtcgatcccgatgttttattaaaacaaaagggacaacctattaaataattgccaatgggaaaaagtgtgtgcatgcattttgtgtatgtactcgcacatctagcaataccaggatttgtagaatgtgtgttttttttttcaaacacacgttaaaatagcttatgttgcatataccggataaagcacgcttgttattacgaaacgatagaattatgaagcttaaattttatcctaaaaagtgatgtgaaaaagtatgttttaagagcatgcagggcctataatggtaaatgttgaattaaaaacttacagtgctggcgaacagggacttagcgtgcctaggaactcaagtgcaaaaacaaaacaacatccacccccaaaaattgccctttttttttttcgaagtttgcagttatactattctgtgacttaaaagggaggggaaagaaagtatgcaattcagatttcgcccccaacgcaaaactaccgaaacgaaaatctccccaggaaaatgtggcttgatttatagacgaaaaagaaaaatattgttcctcttggcaaagtctttttgcatcacgtgtatttgcagcctagtataaacttgctttgccgtgtgtggatgtgtgagtgagagggaacgagagtaagagaaagaaagaagtgaggggatgtaaactcgaataaatttcaaagtgcctccgagggatgcaacgggcaaaaactgaactgttcaggcttcagattgtaactgacgatctgaggaaaaatgaggtgctcgatgaattttcgtttgtattttttggcgaggcgggggaggtgttgagattttttttttttcccctcggggtgggtgcgagggggatgcatcctagcctgcccgacccggagcaagtcgcgtctccccgccggagcccccccacccatttctttgctgaacttgcaattccgtgcgcctcggcgtgtttccccctccccccttccctccgtcccctcccctccccggagaagagagttggtgttaagagtcagggatcttggctgtgtgtctgcggatctgtagtggcggcggcggcggcggcggcggggaggcagcaggcgcgggagcgggcgcaggagcaggcggcggcggtggcggcggcggttagacatgaacgccgcctcggcgccggcggtgcacggagagccccttctcgcgcgcgggcggtaggtaccggcgcctgcggggctcggcggggcggaggcgcccggcggcgcggggttcgggctcggcggccccgcacgcggctccgcgcctcccgcgccgcgggctcccggcgcccggcgctcccagaagagacaccccttcccctcccgccgcttccctccccctcgccgccagcccccccgcccctccccttgatgccccctcggagggaccgaggactttgccaggggcctgactttaatttttataacccctttctttcacaaattagggtgctggacaattagaggacccgaccctccactccgctccccccaaccctgtcaccccacccctccccctttggacgtgttttcactccagagacgctcatctttaatttcttgatagctactttgaaaagcggaggggagtggtgtgtgcgagtgtgtgtgcgtgtgcgagtgtgagtgtgcgaggggggtggggtgcagggtggggggaaagttgagatcggatcgttctcagtagtttctcttttctctgtgatccattcatttctcgctctacctcctgttgcataaaatgatgcgctgaagagcggctttttttttttctttccctgatttggttttatagtggatgttaccagtttgatcgtctctttggaaatacaatatcgctttttttttttttttttttttttttttttttttttttgctattgctgcctattccatcttaaaaaaacaaaaccaaacccaacccaacaacaagtctcccatcccttcctcctttccaccttaatcccacccgcccccacgtccccacccccaaccccccagtctccaaaaatccgattgtgttttctccaaggattgggactggattttctgattgcggttatttccatgtttctaggtttgtgtgattttgctaaaatgcatcaccaacagcgaatggctgccttagggacggacaaagagctgagtgatttactggatttcagtgcggtaagaaagaacggtggaaactaacaacagctgtgaaaaaaacaaaacaaaaacccaaacacttcagctagaaaccagtaggaatctaaaggacagtaataatttttaattggctgaatccttggtaaatatgaaggtctttttgacaagtttttaactataattttgtggtgtgatggaagattcaggcttttttttttttttgagttttattactggccttcaattccctacccactgattaccccaaataatggaatctcaccccagtggaaagcaaaaatagacacccctaaaactaaaccacccctaaaacttggccatgtctgaacactgagactactaatactttgcacactactcttcgttttatttattgtttttggaaatggaaaatagaaaataggagacccagttgtctctttaaagttttaagctaatgatgctttggattggtaggacctgttccttacatcttacctcctagttacatcttttcctaggattcttaaaactagtatggatatgctgagcatacattctttagaaccttttggactgttttggtaaatttcgtagtcgtaggatcagcacaaagcggaacttgacacacttgtggagttttacggctgtacttggtccttctccatccctttgcttccttttcctaaaccaagtcccagacatgtcaggagaatgaattcatttttaatgccagatgagtttggtgtaagatgcatttgtaaagcaaaataaaaagaatccacaaaacacacaaataaaatccaaaccgccttccaagtggggctctttcatgctgctgctgctgctgctgctgctgctgctgctgctgctcctcctcctcctcctccttctcctcctcctcctcctcttctagaccttcttttggagaaatggctttcggacgttttgccaggaaacgtagccctaggcaggcagctttgcagccccctttctgcttgttgcactttctccattcgttcctttgctttttgcaggctctgactcagggaaggtgtgcattatccactagatacgtcgaagaagagggaaaccaattagggtcgaaataaatgctggagagagagggagtgaaagagagagtgagagtgagagagagagagagtcttgcttcaaattgctctcctgttagagacgaaatgagaatttagtgcaggtggcacttttatttttatttgggttcacatatgacaggcaaatcctatacgagatggaaatggacattgccacgtttatggccaaggttttcaatataaaacaaaacaacttttttcttctccttggtgaaactagtgtttttctagagaggctgctggcctccaacctgaatcttgataacattatggggactgtgtttgttccaaatgtagcagtagtactgcttggccatctaatgaacctgaggaaaaagaaagaacagagtgataatgggggctggggtgggatctgtaatgttgtttctcttttagttttaagttggatggtgatgtattttactaaataaacccttagcataaactctaagctgtttggtaacagtatgaaagatctttgaggagctctgaaggcacaagtgtcttcttttcaactgtaatatttctttgtttcttttagatgttttcacctcctgtgagcagtgggaaaaatggaccaacttctttggcaagtggacattttactggctcaagtatgtaaattcttttcttagtgttaagttaaatgttctgggctgtttatttactcaattgtatgtttttggctctgttgaagagttctgaaaaagtcattgaattttagcctgtaatcatatggttattgcattacccatcagtggtataacttacacaaaatgttatcttgtgcgattaaaattaggtctttttttttaagtcaaggaaactctctcaaaattccatcacttaatttaagagcaattttctaatacagttgtaatcaaacacatgaagataagaccagtgttaacatggggaataaattaatgttttctatttgaaaataaggggaaaaaatctctaacattcataaaatgggaaaatcccttgtaaataatatcatttattaggtactgtatacaattaacccttttaaagaaatgaacacttaattctgcaaatgaatgctatgtagtaaaccatagctgtaaatagcctcttgctaatcttagaggctaaatatgaattcatttatatttaaaataccctttttgatgctttagctgtttttttttccctaacgatttacttgtgcaatgaatttttactgtatttaaagttgcaaatctggaaggacttttacgttttataaatgaaagatctttgggtgatgcttaaaaaagatgctagcactattcacaaaggaatctgtgtgcacagtgattatctggaatctaaggaggggtttattacagggctattcgaatatctcttattaaaagtgcagagtgaaaatattcatttaaaatgtattttttttaatccaatgaatttcaaataagaaaaagttatacattgttgcctgctatcctttaagtccgtggcttaagtccatttatgcttgttaaacagctgcagtattttaggagttctggcaatggtatataacagtacattaggccaagtactattcttaagtcagactggtaaatgttgacatcttttaactgtgagatgccagtggaattgtctgtcaactatgaatataatttaacatcttttaatattcatttggtgctatagcaatgaaagaagtttgttcacttatgtgatttgtataattggtatatttttataaaactaatggctttaaaagttgctcatttccaaataagttccttctccttctattgcctgcctaagtttagggaatttgtgtctcgataacttgttttaaaaaatgtgagatgcttcttgtatttttattttagttttctggtgcacattgattaaaaggaccattgacagacaatatgtttgtgttttactatcctggacctggttatgttttccacttagggatttgggatagtttttatattagtattatatctttaaatttctgtatggtatcctctatgcaacttttaagatggaaaatattaatatgcatgtttgatgtaaaggtaaggacaagtatcttttgtgggcaaattaatttttcatgttagacaagatcaaaactaactgtttttgacagtaatttttttatgacttaacttaaaaatgtgtattcagtttcaatctaaaagtagcttatgtcagacagacacagagatagactacttttaaagtcaatgctaaaaaactagtttgcaatgttgtgaaaatatgcatttagaataacttaagtatattacattagatatttaataaagtaaggtgtttagaaatatgagattgtgttacatttaaaaagacaactgtatgtctgatccattttctatgttcacatttaaataaagttcttgctgtgatgtttaaatgtttatagagagtacaggcttaataagttgaatatgtattaatgcattttggtaagtgatgatatatcaacacttacacagttctgaagacaataacacacacacatacacacatacacacatacacatacacacatatgttcatgcatgcaaacctggagagagacttcactcttaataagtcatgttacactgcttctaatgcatacacagtgattattttgaaggtgtggaactttaagttacgttgtaccagaaatggtgttttcaggaccaaatgtttacttgtaagggtaaaaagtgtaatggtccttttattctggcagcctgaatgagaatgcagggtattcatttcatgtagtatgatggtgattataatatgtagggtacagattggagtgttcagttttcctctatcaagatagtatttgaacacagggctgttagttaagaaaacgggttgtatttccacttaaaagagttaaatcttttaaaaagcgtaatacattttaaaaatcatgaatactgcattttgccctttaattggaaggatcaactaggaaactttggagagagaaataattttctaaatttacctcaagttaatatccattgtcttgagtggactcagatgtccctttcatggattgctttgaaacttggatttaggaaagatctaaactataagtagactgttcctatttgaaaaatcagctatggtttttcaaagtgaggcatggtaataattcatgcttaaagttcccaatagcttttgattccattaatataggatgctccatagtgatttgcaatgtgagaataaaaataaagtgtggccatattccctttaatctttcatttcacaaacatggtttttcctaccaccttaagaaatggtgaggctgctagggagaatggaatgtaacctgagctacagcctgacattcccagggagcatttttcacatgaaaggcttttgtcaacccaggaaaggactagcagtttttgtttgatgtttgcaggtgttcagcagaaagcactaaaacaattcagccatgatggttcagagcttcgatgaccttaacagggaaaattggtgggctctggaattatttttaagaaatagttataacctatatggtaacttaaacaaagggatttaatatccgttatatcattgatcttaaaacaaactaaaagcatccacatgcctggatgattggaaaattattctcattgaaaagtaggatacctaagttaccaaaaaaagaaaatcatctaaagagtctataatttattgatgagtatggacttaattttctgatatagcagaaggacagtttatttggttacttttgactcttgtgaggaaaagataaacatcctagctttgacatctttttaaaaagtcgttttaaagttgggccactaaaatgatacattctaaagaacttgttagatcaggtctggtcacatctgttacatgtatttactgctggtctatgacagatactacatctttctcccttagtttaaaagttgagctttttcccctgtgactgtttagttttactgaggtgttcaggtattgttaaaagattgtcaaatgaacgagtgtttgaacaattaagagcagcgttaaaacacaccacatctctgttgtgggtcatttttggaagaggaaagtattgcctgaaatttacctaagttagctaacctatatccacatgacaccaacataatatgccaatttagtgaattcattgaggcggaaaaaaatcagtccggtgggtagttttgtatgatacagaaaattaacgtggtcacatcctgaattagttttgagttcatagtgatggcatgaaaaaaaaattggtttccccttaaagatatttgttgaggagagctgcttaatattgtgtgtgtgtgtataagtgagtgaaaacacccttaaaatcgtaaatggtataattcataagggttctgtggctttttgtaaagggcagagtaatttaacaggttaaaagaagtacagtggcgttaaacccattatgttagaatcacagaattttgggtatagaaacccattagaaatgttgcccagtgccttcattatacaggcaaagaaaactgaggcccaagataaggagttccaaactgtgctttcttatttgttattttaaaaaacaagtttttatttgctaattctctatggccctgcaaatcctttattggaaataaccttggtctcactgctgtctttctgtcctttgtactgcgtaatggggcttgaggattagtgtgctgatatttgtgcatgtaaatgcttctgtatatgcatgtgccttctgaaaacttttttaggtttggagctgaattttggattattgatcattctcttttgcctggtcttccctgtgactgttttgcatgatgttgggtaaaataatagtgtgggtgagcatgtcacagtgcttctcagtgtgttagagaggtgtgctgtgtaccttatacctgttgtattttttaaatcctaacaagaacctagtgagatgcaaggattactactatcctgtattcatagctgaggaaacagagacagatgttaaacaactggatcttaaggcagccaataatgaaattaggttttaacctcaggtttgtctagctcaaagtcctgagttctatacacacacacacacacacacacacacacacacacacatcagacagctcatttttgcaagattatataggcaaacagtgtgatattgaggcttcgcacgaaatgctatctgtgatctttagggtagatagcatttttaaaaatgtgtctaatgttgtaatgatgtcaaccatatccattatttttcccgcctttgtatccaaataaactacccttccaatttatgacagatatcaatgtgactaaatatgtctttctcatatctttattagttttactaagaaaatacagtagatattttaaaagttgtgctttcattctgttgtaagttgatagtctacatggatgccaatgaaaacatgtttttatgtagctaatcaattcagaatttgaggtaaccaagcctgatgtattaatatgtaaaaaaataaggatctcctgtctttaaatataaaaaagttttgcagttcgttgttagatctttgaaacttaatattcaagaacaataccctcaattctatctgcatcactaaaataagcagttttgaaggtttgatatgtctgttaccagacatgtgcttaaaatgttacattttctaaattcagaaggcagaagcagtactctatttgacactgacttaagtaaataaaatgcattaaacaagcgtggggatccaagaactgttgaaactgaaatgcttaacatttttgacagcatcagcaaattatccttaccctactattgtaatgaggaaatcacttaaataacagatgaacagccaagtcacataaacatatataatagaactatgtaatgaaagtttatgctgttaattgctcgaatctgtcttaaatgcttagaatcatggagcagtaaagactgtcatataaacagttttgttttgagcttaaaattattcctttttgctttcatctgctatgataaacaaagtaattttgtaagctttaaagatcaaacatttactcctaatggtaaactacattttatattggaagtttgcaacctcgtccaagtcatagagttgagtcctggtggccccaggcctgtgattttcaacgtttagtattatgatgctatttagatctgttcccataagccaagataacagatcttaagttgcctaataaggaacatggtgtgttttgaaatgttcttcagtttacaagtcttaaaccaaaatgttcttggccaaacctttagaatctatatgtaagttgaataagtcagattttatacagacatagcatgaaaatgaagctaagtaggaacagaaaaatctgccctttctttattattttttttttgtattttatgagctattttttatggccaggtgtttgttcttccaagttaattagatagtgctaagtattagaaaatgtaaaatacattacagattttttaaaaggttatttttgttactggtttcttattactctgggtaaaattttcacaactgaccaccaggtttattagcttatatgtgagctacccattttgtacattcgtgagccaattgactaggaataaggtatgcacatgggttttatgtggatacttttgacccatatctctcttaatacttaggagagagatataagagaaataataatttaatctttggagaagattaacactttgttataagttatatataggtaaatatatatatatatatttatattagacttgcaggaatagtgaaaatgttgaaaaggttgtcatgtttactttcatttcaaagataaaggcccagttaatcagcatatcaaatacccaggtgtgtttaaaatcagtttatgtgggtgaatttcagggctgtaagaaagtattttatttaaaggtgcagccacacgattgattgttcaaatgggtgcttttgtacttttgtgtgacaattaacatttaatgaatgactttctggactggcattggtggtaattactatatgtagtttattaactgcaatccattgttggatgtgcctttattgatttgttttgcaaacaccccttcacatgtgcggcagtatttgtgcagccgtatttgtacgttactttttaaagaacctgtttcacttgctgatgctgacattgcctctaaaaatgttagtttataaattctcatgtgccagaatgtctctttgatccaagtaattttagctgaaatacaaaatccgtcaacttttctgctataaaaagtttgcattcaaatcctcagggaatcccaaagtaatgacacaatattgtttttcaagtaaataatttatggaaatttacatttataagagactttagagatgctctattttttaggtaaggagccaaggttcgggagggttaaaagtcttttgcccaaatcatgcagttggttattggctgtaataggacacaaatacacatgtcctgaccctctggtcaaagacctcatgctgcttttaattaaggcttggactcaattcgatggtaccaactgtatatttcttaagaagggaaaaatgtgtataatctaccatttctgaaaaaattattaaaaattgagattgtgaaagatggacgttgtaatccagcccacttgtcatcacgtgttctaatttggccaaggcagttgacaaataactgttaaaatgtattgtgttattaaaaataacaaagtaagacccatgattaaatatcagggctgtaatttaatcttgggggatctggtgctgttcataaaccatttggcttttttctgtaacggatgacgtcaaaatccagcttgattgaattatgaccctgggttacagcagcacctgctggtgcctttttacttcatggcctgtcagcatttccattacaaacttttttctctgacattttaaacttcaaatagttaaactggactgatggttggcatataaactttctgctccttgggaaaagaccacttgctcaataaaaacagagaaggtggtgacaaagccccattacaggataccccttagaatgttctgctttgctttaatcttccattcatttaaacattcttttggggggtacttagctgaattgcaaggcatccaaatggaaggtttttaatctcaaatttcccatgtgaagacttaagtatggggtgtttacaggactggtaaagtgcaaaaagacctagcatctatgcaggttattgaaactctggacaatccagttttcatacagtgtgtaaaatgctgaggagcaagccatgaaaaacatgcaaattggcataccttgtcagtaattgcttttatattcacttaagatgagtaaaaattgataatgattatggttagaaaagtatctttatttatatttatatctggagactggtagcatagcttcagtttgtccccttgggttttaatatgttgggaatggagatgggatgttgtttgcatctagctagtcagcttttcatctatctagtctaattctgattgatggatcatcatatatatatatgtatatatacacatatatgtataaatatgtatatacatatataaatatataaacgtatatatacatatataaatatataaatgtatatatacatatataaatatataaatgtatatatacatatataaatatataaatgtatatataaatatataaatgtatatatacatatataaatatataaatgtatatataatatatatatatatttagtacctgctattctcatatctccatgttagcaattagaggacatagagggctttatggaagagagaaccttctctcagagggcatatattctaacacaggggtgtccaatattttggcttccctgggctacactggaagaagaagaatcatcttgggccacacataaaatacactaacgatagttgatgagctgaaaaacttttgcaaaaaaacctcatgttttaagaaagttcacgagtttgtgttaggctgtaggttggacaagcttcttctaacaggagaaaatagaaaagtaaaaatgtgattaacatctagcattgggaagacacaataatgtgggagtttagagaaatgaaaacttatttctttcatggggaaattaataatgaagggttcatggaaaactcaattctaatccttgaaggaatggtagaattttgacaagtaggtagtgagactgagcgtgcatatcaggatcactgtgaaccaagcacagatgaaagaaactggaaagggtagattaaagagagctcccagaaagagaagtttcttggctctaaagtggagtcaactctggtctagacacatgggatgatttccaggcaaaaacccctgtcttggttgccgtttattttcttgactgagtttgcgtttcactcgggggtgttaccgattataatccagttccatccaaaagtatatgtttttaatggtagtgtcgggatggaaattgaagattttgtgtccctacttcccaaaattcttcctataatatcactcagcagtggaaactttcttgagccaaatgaagctgctttggagaaaattgttcatgtagccaaattctggaaatctaggttcttttgcaatgtttgctggtaagtagctgtttcatattgaggaagtggtagaatcttaaaggctgcacctcaaaactaaacaaaatcgaaactcaccagtacaattcaagaggggttttcacattttttaaaaaggaatactgctgtatttaaaacattttaagattgcaaaaattcatcattataatttttattatcatcactggcatcaccatgaccagtgtcacattgtttggtcaaaagctggaatggaaatgtgatagttatctttgccatattatatattgagaaatgcgtttaaaacttttccggagataccgtgatcttagcaaaaactaatgtaatatttgtaaaaacattgtgaagtggccagatataccttttaatgaaactgaccagaagtacatcacaaatagaaaaatacacgtgtgtgtgtatgtgtataccatcccttcccccaaatattgttcagattaaagtgtctttctctctgtgacctgcaagtatcttaacttagcatgtgtgtccaatttccatagtgaagccaaaaattcaaatgatggttgatattggcttaggaagaatttattaatgaatgactgtgcttggtatagagtaaaaaaaaaaatttatgacaaagaggatattctagactcatgtaaaagatttcagttaagaacctatgaattcctcaacctttttcttcacttttcaaaaagtaaaggatttatattggaaatattttgcaaccctacaacctgaaactcaaagctttggtcagcaggtggtaataatatttccaggttgaatatccaatttcatacataacccaatttgtaagtttgaaaagaaatattaaacgatgtcagttttaatgcttgtttgaataattgttctttgttatgtgccctcttggacattattgtccactagtgccccaaaccattgaatgcttttctgttctcttatggccactgtgattcttcaatctagttacttctaactgcaagattaattttcttctgacatctaattttcccctgattttattaacatcttattattctttttctggctcattttgaacaatttctcttttatatggggtgtatatttgtagtgtcccacttgtaagggaattctacactttaatccttagtaattttggtagaattgggataagatgagagatagtccataattgtttaaggcttgattgtttaaagaaggttgaaagcttcagaaaagtggaagtggatgaatgcatgccatgttcttattattttttcagtgtgagtgtgtttcactggagtaacgatagagttattaggaattattacctttaatttacttatgtgcacattcattcgtccactcattcattcattcattcattcagtgaaagtttttttttttttgagagccaagatacaagttatagtgctagaaattatggtgctacaaagaacaacaaatttcaacttcagcactgggacattatgttgcagttgttaaataaaagttctacagtaattcaaagaaggtacttttgaaataaatgatgttggccaggctgggtggctcatgcctataatcccggcactttgggaggccaaggcaggcggatcatttgaagtcaggagtttgagaccagcctggccaacatgatttaattattttgtagaaatcccgtttctactaaaaatacaaaaattagctgggcgtggtggcaggtgcctgtaatctcagctactcgggaggctgaggcaggagaatggcttgaatccaggaggtggagtttgtggtgagctgaaattgcgccactgccctccagtattggcgacagagcaagactctgtctcaaaaataaaataaaataaaatatgttgaaatatgcaagtatactttttcaaaggacacttttcaaatataaccaagtacagacttcacatttctaactgaaacggaaatcctaaaatctctgtatatgtgtacatgttctatgtgaatataaaggaaggcgaatggatttgaatgcttatggaaattggcccttgaagtgtagtgttaggaatgtactctgaaatttagtgtcagaggttgtctgggaggcaatgagaattaagttccattcgtcctttttgagcagaaattaaaattttggatgtgtagatggtactcatttacttctaggacactagatatacatgcttatcttttttatccccacacttgaattatgttaatatttgtgtttaaattgatacacagtaaaatattcttttaaaattaagtagatgattattgagcatctaccatgtgtcaggtaatactttggcagctctatataaaatgatgagcaagacaggcatgtttctgatgttgcctacatggaggacacagacattaatggataatcagccaaagaaggtcaagtactacatttgagaggtgtgtggcctgagaagagtttgcaatagggatatctgatcaaggggagcagtcaggaagggctcagagatcagcccaggtgaactgtggtcttacagatgaggaggagttaagtggatggaggttgcttggctgacaggtagggcatgattccagccgctgtggctggtgggggttggtaggtgtcagatcccgcaagactgagccacagggagccttgacagtgtgctgctaatcagatttgtgtctgggacatggacccaaaggggagtcactgtgggtggcccacaccagttgtgaagtttttgcagaagtttaggtgagagacagggttgctggttctacagtgtgggtggtaaagttggagaattaactttgtagactttatttgaaatctgtacctttaggtcattggggagcattcatagtggctacttgtttttttttttttttttggtgaaacttcctataactttctaatacttgaaaatctaccatactttatacattccgacagtaattatgagacctaattcagctgtgtgatagccactgcctttttagcaaccaagcactaactagagaagtgctcttttattttctgagaaaagttagattgagtttgcaattctgcgagggtacaggggtggaagtgggtcttattgaatggtcttcagtaccattttggctttttttttttgagacggagttaagctctcattgcccaggctggagtgcaatggcgcggtctcagctcactgcaacctctgcctcccgagttcaagtgattctcctgcctcagcttccccagtagttgaaattacaagcatgtgccaccacacctggctaattttgtatttttagtagagacagggtttctccgtgttggtcagactggtctcgaactcccgacctcaggtgatctgcccacctcggcctcccaaagtgctgggattacaggcgtgagccaccgagcctagccctgtttaggctttttatagcctatgttcttatgagcagtaaacattatgatggtttagttagacctgttgaattgaattcacttctcctgcctgtggtcaggtatcaggtagcacagccacagaagttactgaatgtctttgttggtggactttaggagagtggtttaatttatgtggtattctatctgggattgcagcagtattgttagattgcattttgtcacagggaggaaattacctggtaactcctgattaggaacaaaatgaagcttcccctttttacaaatcctggctaacattccatttggctctcttctgttgaccacctctctctctcccctccctcctcactccattttctcagttattttattgtttactattggaagtcacctcccaactcaggatacttgttagtccattttaggaaaaatatcaccattctttcactattattctctgttgaagttgaagaacagaatattactttttttctttccattattggttacaccagctagttagagacttggggtaatactgtgggcatgggttggatcctgatatctgtgtcagttagtgagagttggttctatgaccctagagctctttgtgtccttcaaacgagggtgctgaaacaagacgaacatagaactgtctataccaagcaaaaaactcctgaaagcacatgcccactgcaggtgaattggtagcatagtgtggagataagtgggcagtgcttggtcctgtttctgcctcctagagagtacctctcagcatccagggatgctttagtaactcttagttaaaacgaaatgaactataattaattacctttcttttgggagggacacagagagtttcaacagcatctacaatgctttttttttttttttgaaaagaaaatatgatagaatattaagattgacagagctggggatgggttggaggctgaattatgatgtgtgttttctttatgcttgaattatttcataattaaaaacaaaacatataataacaaaaaaaaaaacaccctctacctctcattcacattcccctctggccatagcctctttcttgacttccttcctagcaagacttttgttaagtgttttctacacaggctgctactgcatgcttcaaaatttaaccccaagcaaatattagaaaacatattttatcttataatacttgatacctacagaataatctgtgtaacaaatgtaagttgtgaagcttaataatggagtgaacatctatgaacccaccaccaacataagtactggagcaatgtcagatccattggccggcctgtgggtttgttccctgtccaccttcccctatctttcctgccagagagaaacattctcatgccctttttaaagtagtattgtgactggcatatgtatccctaaacaatactgtatgttgtttggttttgcttgttttggaggattataaaactgatagattgttttgtgctacttgctttttcacttggtatgttattgtccatgttgttgcatgtggtgtatgttaattttctctgctgatgaataggttgtagtttatttatgcatgttccagttgatgaacctttgtgttcctcttttttggaactacaaactttcttgtatgtttctcttgatgcacatgtgtaagactttctctgtggggtatatgagtggatatctatgagtagaattgttggtttgtagagttacatgaaagtccagcatggcaggatagtgtccagttgttttttaaagattcttactgatctgcactcccacctgtagcataaaggattactattggtgcagtctactggtataaaatagaaaatgtatcccattatagtctttttttttttttttttttgaggcagggtctcacatctcactctgttgctcaggcttggagggcagttttgcaacctcggctcactgtctggtctcgactttctgggctcaagttatcctcttgcctcagcctcccgggtagcaggaccacaggcacacacatctcacccagctaatttttgtattttttgtagagaaggggtttcaccatgttgcccgggctggtctcgaacttctgagctcaagcaatttgccttccttggcttcccaaagtgctgagattataggcatgagccaccacacagggccgcattgtggtcttaatttgcatttccttgataattcggttaaacaactttgtatatatttatttcagatcattcatgtccactctgtggaatctaccccgcccccattttctattgggttatttgttttttcttattgatttctaggtgttcttgatatatttttggatgataattattagtcatacatgctgcaaataccttctcttattttgtgacttttactctctctatggtagctcttgataaagtccttaaatttaagatagtcacgtaattattttgaagggttggaaaagccttcttaccccaaggttgtacatatattctcttgtatgtttcctctgaaaaggatttgataattttgcctatcacatttaagttttccatgcagttgggattgattttgtgtggaaatccattcacacgtactgaaaagtccatcctttctccagtcattcacaatactatttctgtgatatttttagttcctgtatttgtggggtctttccttctgggccttttattctacttggttagtttggctaccttgcctcggtatcacattataataaatgttataactgtattttgttgtttgttaggtaaagcccttcctccccacttttcgtgtcccatatgtacacatttgactttgggctattgtggagcctgagttcttctacgtgaatttaaaattcagcttgtcaaggtctttgagaaccctttgaggcatttttattgaagttgcatggaaactaaagatcaattttgggagaattattatgcatttaatgattatctctactcatttatatctccattgttttaggtgtctgatatctcaaaacaattctttataattttttagctgtaatttcgtaattatagttttataattttctccatgaagttttacattttctgatgatttattcttcagtaccttatttttctgtttctattattaccagtatatttttttaattattcaaattatttgttacttgtatatagaaagtcttttttaaaatttttatttattttttatttttagagatggaatctcactctgttgcccgggctggagtgcagtggcgtgatcttagctcactgcaacctctgcctcctgggttcaagtgattctcttgcctcagcctcccaagtagctgggactacagttgcccggcaccacacctggcattcaattgatttttgtatatcaattttcatattcagccatgttgctgagctctcttattagttctaaaaatgtctttgtgttttccttagagttttttctgtagatctgtcacatcatgtgtgactcaagacaattttattgttttttcctttcaaaccccaatacttggcctttttttttttttgtctttactgtgctatatatgaccttaagtacactgttaaataggaatggcaatactgattatcttgtcttattcctgattttcaccatgaatagtgatgttgatgttgatagatacttgattaagaaagtttcattctattcatatttcatgaagagtttttatcatgaacaggtattgaattttatcaaatactttttctacataaaattaaatgatgacttctttatttcctttaatctgttaatgtcgtgagtgacatccgtatattttcctgtggtaagccacctttgcattttgtggatgaaattaatgatgtagcttcattactcttttaaaaatattgtcctggactcaatttcaaatattttcttcagtatttttacatctatgcttacaagtaagattggcatataatatttttttcctcctactttctaagtctagttttgtctacaaagttagaataaggaagtgttctcactctgtattctctggaatagtcttaaataaggatgaaacaatctgttctttgaaattaggtcaaacttatctgtaaaattggtcctagtataagaagattttaagccactgatataatttttaaatataataatattgagagtgagagctttactttttctgcagatactttaacaattaaatatatatataaacttatatggatgtgtgtgtgtatagatgtgtgtgttgtatacatatatatgtaatatatgtcagttttctctctatttcatttacattttaaaatttattaccataaagttatacaaaggtattctcttagctttttaatctctgctgactccataattttcatttttcattcataactttatttatgtattccttctttttttcatgatcaagctaatttgaagtttttcttatttattactcttttcaaaccaacttttggctttgtggattatttttcttgtgtgttttctacttcattaatttttaatctttgttatttcctgctttctatgtacttaggcttattattctgtttttttttttttctaaatagagttgactacttagtgcactaatttatcataatttctttttataatataagaatttaaggcaatataataccctctgatgactgtggtgactgtattacataggttttaatttattacattttcatcatcttataagtattttaatatttacagtatgatttcttctttgatacttgcaatattttttggtgccttcaaaattttacaaatgaatgtattacttatctttttattattgacctctattacaatttaattgttgtcagagaactattctgtatggcaacagttctttgatatttgttgaggcttgctttgttgccaattttgtgaatcagttttaaaagttccattgtgtgcttcagaagaatgtgtactctatgaattcagggatctatatgtgtccagaaattaaagcttgttgattgtgtccttttttttttttgagatggagtctcgctctgtctcccaggctggagtgcagtggcgcgatctcggctcactgcaacctcagcctcctgggttcatgcaattctccttcctcagcctcccaagtagctgggattacaggcgtgtgccaacacacccagctaatttttgtattttcagtagagactgggtttcaccatgttggccaggctggtcttgaactcctgacctcaagtgatccacccacctctgttgattgtgtcttaaagtcatctctacatttgctaatattcgaaatctgcctgacatatttgttattgagaaaagtagattgaaataatttgctatgatgatgaatttataaatttttccctgtatttctattttgactttatacatattgaaattatattattacatgcattcattttaagaattactatattttcctggttaattaaaccctttattcagtttgtatgtggctattctctttctgcccttttatcttaaactctgttttgtctgatattggtataattattgcacttcccttttgtgtagtatttgtctatatatctgttttttaattttttgttttcagttattccatgttgctatgttttaaatatgcagagtggcattttatttttcttagtattctgatggttttattctactgttttctgaatttccctgtggctcataagaagttcagtatctttctgattgccattcttttctagtagatctacccttttccctgactgttttttggcatttagcagttttactgtaatgtatctatttgtgaattttaaaattctatttggtctacattgttcttcatgcatctgtggcttcatgtctccctccaattcagaaaaattatcagcttttatttccttaaatattctgactcctttattcattctgttctcttctttggggattccgattacatgtgtgcttgaccttcttttctgtccttcattctcttaacttttctctcatattttcagtccccttgtatctgctgcattctgggtaatttctttagacccatcttccagtttacaaattctcccttcaggtttctctaacgtgttatctaatgcaatgattaattttttttatttcattgcttactttttcatttctaaaagttccatttggttctctctaaattatgcctactaatttttaaatactttcttatttcttgttcatttttgtgattctgtctttaagttcttcttgtatttatgacagtttttgtattatatgtatttatttatgtgtataaatttatagggtacaagtacaaaacgtgacatgcatagattgtgcagtggtcaagtcaggactacattgtacccattaagtaatttcttagccacccgcctcctgcccctctacctttccggaatctccgttgtctctctgcccactgatagactacatccatgtctatacatttttatttttattttatttttatttattttttagtttttgaggcagaatctcgctctgtcgcccaggctggagtgcagtggcatgatcttggctcactgcatgctccgcctccctggttcacaccattctcctgcctcagcctcccaagtagctgggactacaggcacccgtcaccacgccgggctaatttttttttttttttttttgtatttttagtagagatggggtttcactgtgttagccaggatggtctcgatctcctgacctcgtgatcgcctgcctcagcctcccaaactgctgtgattacaggcgtgagccaccgtatctggccatccatgtctatacattttttagcacccacttatgagtgagaacatgtaatatttgcctttctatgtctggtttgtttcacctaagatagtgacctccagtttcatccatgttactacaaaagacatcattttattctggttttttttttggcttcatagtattccattgtgtatatatgctacattttctttaataattgtaaaatagactatgcaattttatagatattttctaacaaatccaatgcttaaattccatgggcttgaggtagtcttgttatttctactaaccctcacttaagcttctttgttttgcttttgtgagatgcttatgaattcacatctggtgggtattgaatctatgaaaatctgggagtctaaagtgagaatactttctccagagaggaattgcttttgcttcatagtctctttcctactctgggagtcctagtcttcttatcacagtgctgatactggcatttgctctcagagcatccctgcttcttgtgcctacctttcagtattgaaaactcaagttttgttttattttttggtgctttcaagatttccttatttcttgcatttatacttttggagaattttttttttttttaatgttgaacattggttgttttgtagtgtgagaggccttgggtgtattgtcatacttttggaagcagaattctgatttactctttaacccttttcagtctgacttctgtcaccatttattccaatgaaactagttgtgctaagattacctataactcccattcttcccagcaactttagagaaaatgttctttttaaaaaaatggaaactctgtgcttctagattctgcacaacacagtttcctctcctagtgttctttctgcctctcttttgttggaagaggaaatgttggggatcttacctgggctttctttttctcttctattgagaggcagtttggtgcagtgcctcaatctggaatcagactgagttgttatcatctggttattagcaatatgaccttgttttctcactgtaaaatggatagaaatagggttgttgggagaattcattaacataacacttgccatgcactcagcccatttctaacacatagtaggcatccagtacatgtctacttttattctctggtacattatcttcttaagtcatctcttgtttccaagatgacagctcacgtatatattgctccagtatgatctgtgcatctcagagtcagtttgtagagccatctgtatgttatatttgattttcttctgtctccttaatgtataccttccctaggcttctgcatataggaaatgacactgccatgcacctagatgattaaaccagttccggacactttgaccttatcatttgtgttaccatctcacatgataattgtgagttgtgctctccacatctgctttcaccagttgagttcaagacaccatcatttcttgcctggtctactctagtagcctcctaagtactttctgcactttgacttcttccctgttgaatccatatttcacagcaaccagagtgattttttaaataagaaagtcaaacagagcatgctttctcccagcttcaatgtttttctcatagtgcctagaataacttctgttctccttaatatggacttgaggtacctctacaacctcatttggtttccttctgctgctgtatactgtttggctacattgggattcttctaggctttggactttgtcaagctttttcttgattcagggcctttgcacatgcagtagaacacatcttctctcactctgcgtggctgattccattcagagctcatctgaaatgccactttctcacggcgactttcttttatttcctagtttaatcaagactctttggttcagtgcgtgctgaatttgcttaataaatgattccataaacatacatattttgaatagaatctgctgattaataggaatgatagttctgtgagatcatgctcattttaaatttagtcatagtgtcattggaaaccactacatgtcttttctattcatttaatgaattttcaaggtcataaaaatttctgatgatattataatttttgcatttgcaaatacactttgcatagtatttattgctggataaaatattggcccaaatcaggggttggagaactgacattcactgagcaccatatgtcacgttctcttaccttaatatcgtatgttaggccctgaaatctagttatccccgagtcactgaagaggagctgagattcagagattcccctaggctggccaaggccataccttgtggagggcacagcctaagtttagtccaggagtttgaactctaaggagagaactctttccatatctgctgccttatttcttctctaagcaaactccttaagttcacaaagttctttcatgtgtattactcataatatgtatgtcaagttctagagagtgcagggcatttttgacattttattttggatcaagctttcattcactaattttttatttttctgagcatccctttgaggtccttgaattcacggatgagaaaaattaaacaatcagtgattaagtggactctctgtgaagttacacaatggaatattaaattgttgatggatattttttattagccagagaaagaaaaaacgcagactttttttttttttttttttttgagacagggtctcactctgttgcctgggatggagtgcagtggtgtgatcacggctcactgaggcctcaatctcctggtctcaggtgatcctcccacctcaacctcccaactagctggaaccacaggagtgcaccaccacagctggctgatttttgtattattgtaaagacagggtttcagcatgttgcccaggctggtccgtaactcgtaggctcaagtgatctgcctgcctcggcctcccaaagtgttggaattacaggtgtgagctactgtgtctggcccaaagcattttttattccagtagttgtgtcagtctgttttctttctatgtatgtatgtataatttatgtatctatgtatctgcctgtctatctacctatctctggttaaatatgttttagaaaaaatgtaactagcacaactaggcctggacttatagatattatttatggtagaaggctaagttgtttatttttttaagttaattatttataaagaaaaatattaaccatatacaagtacatttagtacttagttatggcaaaaatcaagaaggtgaaatagatatggaaaatgtgattgggtgagttggttttattggactggtagggtgtgcccttggccaaaccaaaggccagagggtacaaggaagtcagggggacacactgctggggagatagagagggggctgcccagttgtgaggggaactaacttcttgtccagaacttccctagggccttccctggctcttgccttctttgctgtatattttggttactggcaggacactggttcaaatatacatttccgtggtttgattttataaagctaaaaaagcctcatgctaatattcagtctcttatgttatgaatgttaccattttacctcttagctatataggtatctataaaggacattttttaaaaatgaaaatcatccttcctcagtaaagaactagagaataaacatgtttctgaaagtagaatgatgtggactagagcaggggtcggcaaactttctctgagaggggccaaatggtaaatctttctggctttgtaaccacagactctctgttgcaaatactaaattctgctgttgtagcatgaagccagttatagacagcaaagaaaccaatgagcattactgtattttaataaaactttatttgcaaaacagacagtagttgtattttgcccaggggactgtagtttgtagacccctagatgaaagaaatgtatcttagggcctcccctcttagccctttccatcatcagcaatgtgatcttggacaatatactttaagtcttaatgaatttattcatttgaaaaactgacattttattttagatcaggcttttcattcactaattttttattgctctggacatcactttgaggtcctggaatttacagatgagaaaaattaaacaatgaatgaggacagttttcttgtatgagggatttttgttttcttcatatttttaatgtgtttaatatactggagtgagcatgtcttattcttgttaacagacaagctatctaaaaattaaaacacaaactaaaagtagaggaagattgttatgagaaacatgtcatgtatgtgaaatacattttataaggaatagattagattctttatggaaccaggatgggtataaatacatcactagataaatattaagtaggaagatcattatggacaaagattgtttcttaggaattttgcatcgtatagcactgtgttagacagagtccttaactgattatttttgtagcatttgtttacacattcacttattaattaattttgccaatgtattgagccatctatggagatgtgtggaggtctgtgttgaaagcttgagatagaaaaaatgagaaataaaatagttttggatctcgaggcactcacattgaaggagataaacatgtatataaaatattatcctattgtatgataagttctcaattagaagcatgtatgtatagggcaccactaggaaatctgtatcattggagtagagggaagctaggcaagagacctgcacagagtttgagcagttgggtcttgaaggatgagtagggattcttagacaaaagaagattgaaaggcagcttgagctgagggaaatgtctgtgcaattgtgaactttacaaatcataggtagttctgtaagattataactggagtcatgaagacaggtgaaggatgggatactcaaagtttggctagggccatgcaatgaaagccagggaatttgaacatattcagaaccatggaatgctttgggaatctaatgaaagatatgatacatttctataggaaaatcatcttacataaaaatttcaatattttgctacagttttaggaataaggatgtagtgatcactttatgaacagtacagactttttatatggttcccttctgaaaaaaaaaaggagttcacagatagacacatacttcatcatcctgcttgatggtggcagcaaatgctctggatgcacttatgtgaagtttatcatgactttattacttaagagcctgggagtatatgagattgtgccatactgttatttataatttcctcaaagagatggctaggcatgatcagagaagccttcttactggtagatgtccacatatgtcagttgcctaggcatgatcagagaagccttcttactggtagatgtccacatatgtcagttgcctaaatgctggagaagtcacgtggcttcggatagaatttcctcatttgtaagatggtgctcctcaaaggacctacctgccattagagtggtaaggattgaattaactcttccgatgacagcactgagccctaaatttagcacatactaagagctcaataaatgttagcagttaatacccttattagaattatgaaaagtcggtaatttcattcatgtatgttcatatatggagtgctcacaaatacttgaattcttttattgaacatgtgagttagtcttgcattacgcactgcatatatgtccatgtatttctggatcatcatgggtcatttgtttggaataaaacttcatttacggaaatcgtctgtacagccctggttaattttttctctgtgatgggttgcattacatattttctatataaaacagcaatggtgaagataagttaactaatgaatatatattattatgtgcttttattttacagcttctaatattcagtggggaaatttttcttgttaagagacaatggcaaggccagttggcctaaaattagatccagcagctgtgttttgaatcaaggccccacatgtgcactttatactccccaccccctgcgctgggcttgtctgcttctttttcttgcttcaggaggcagcatttttgggtgaatgttaacattcatgtttttcctagtacaaccagaaaggtgcttctgtttaattgtaaggcaggtttatttacatttacggaatggaaaaaaagatttatttaattattaattttacaaaaccaccctttagcaccaagcataaaactttggagcccaaatcaaggcactaggtcacttataatttgatttctaccaaaataagttttttttttttttaaagaaaaaaccctatgataatttttaacatttttgacagctacaagtaatttaagttgtgttttatcagtttatattcagaagccaatgttaactggtgttaattttataggtcctagtttctttgtatttcttgccctactgtttggttaataaaccttttttaaagaatatattcatgtacacacaacattatcatgatttggtttaagtatccgtgtttataagtgcacttcatttcacctaattatgttatttattcatttacacattagcaacgtactacatattccacttttacaggaacttattttaattatacctacagttctgttctgctccattatatcatagatcaagctgaataatagcagtcttaaaaggcatatgctaaaagtgattatgggtcattaaggccaaattaaggtaacatttctgatagccacaagcagaagtctaacttacaattactttttttttttttttttttgctttggggaacgtgttctagttggctttgatgttgacggtctcatggttgaatgcctagtgggtgtatggattgatccttgatcagactgattttttttttttttttttaggggggagatatatacaaaccatactttttatttatccagaaatctgtatttatccagaaatagtctattcaatgactttactgccatatttctcaaaatgtatgctttttctttagccctctctcttcctgcctgccattaagagtcacacaggcaaccaatctccccatctaggaaagtgagtactagaatgcattaaagtcacttttttattgatcattagcataaagcctcattgtgccattggagagtgacctaaataagtatatcacatcctttcaaagagaaatgccccatggaaaccatacctaaaaacgataacaataactaacagaatctgcgttttaatgagttgatttttaattcttgtttcgattggcccaatgtaatctattaagaaattaaagggcatctttcaagcttatccatatacttttataatcaggatgtgtgactctagtgttgttaattttatttttgagaaatacttagattttgtatgggcataagtaattcaaaattattttgttgattttatagacattttactagggagatccattgttgttacttattttctagtttcataattgctgattaaaattaataagattcaaatgggaaaatgacagtggaaatattccaatttagagttcttagtaggttggcttactttttgctggatttatgatgattttcctacatactcagatttggaagatacagcatcataaaataaactgtagtttatatggaacctctacattttggttggagatacaagtttctactggctcagaaattttttcttttagtttttgattttttttagagacagtctcaccctgttgccagactggagtacagtagtaggatcctagctcactgcagcctcgaactcctgggctcaagtgatcctcctaccgccgcctgctgagtatctgggaatacaggtgtatgccaccatgcccagctagtttttcatttttaaactttttgtagaaattgaatcaaactatgttgcccaggctggtctggaactcctggcctcaagtgatcctcccaccttggtctccccaagttctggcatttaaagaactcagcccagctcatgtaatttttaaatattcccactccatgtgattacttcagtctggacatgtcagactgaactgtcatttcagtttacatgtcaatttgtctttcatgtaaaaagggggaaaataggaatatatgcttatattttgttgtatctgcatttaaaaaaacacaagaaaccaaagtggttacctgagtaggggtggggaaggcagtaaagaatagtgtgatggggatgagacttccaaatagataactttttgtattattttgacccttgaaccatgtgaatgtattttctctaaatatatttagatttgtttttgaacaagaaaaaaattgatagcagctatgaacatttttttctttttttcattttcctccttgatataagttacattttaattgtcttttggattgttttcttcagaattttaatcataaaataaatgaaataaataaatgcaatcatcattccattcctatcagtaatttctattagtgtggctttttctgtgtttgtttttgtcatttagagatggcatctccctatattacccaggctggactccagctccagggctccagtgatcctcttgtgtcagcttcctgagtagctgagactacaggtgtacactactgctccctactttgtgtgtgtgtgtctgtgtctgtgtctgtgtgtctgtgtgtctgtgtgtttgcattagtttatgggcaactagaacacgttagatgcttttaagcatcgatttggataaagaagcagtattaaaaatccaactgatgccatacttcatggaagaaaatcattgcattaaacaggaattacacataccgatatgaattagttgatccaatggtcctttgaaatggaagttacatttttaggagatgggtatagcaaaagcagaggtgtttttggatgatgagcaataaatagggggttgttcctagattcccagagacttacataaagttgggaatgggagaagtaagtgatggggacaagctaaattttaaattactcttaaagtactttgtttagattatattaacctgtcaatgtgactaaaatgtcaacagaattctcttaagttttacagatttgtagatgctaaatgctcatgaactgaactgaataacagtaatgaggtatgatgatttggtaattttattttaattagcaacatgagtaactttaacctttatttaagaaaataaaggtaatatacacatgtgtatttattatacaatgggaaaagttccctttgaaattctccatgtggtttggtgtattggcttatgcctgtaattccagtactttgggaggccaaggcaggtggatagcttgagcccaggagtttgagaccagcctgggtgacatggtgaaaccccatctctattttaaaaagaaagaaagaaagaaattctcagtgcaacagtctttaaatcatgaaactgttcagttggagaatttgcatttgcttattgatagctgcatatctactattgtgaatttaatatcttatttatttacatttatgaatataatactattgagaaattaggctctattctttttacagtggcatttttactgattgatctagtctcatcaaatataactgagatgtggaagccattatcatagttcttaaacactattgctcttgagcaggggatgtgagatacagagcattgtggaaaaaaatgctattctggaaaaccactcactcctttgaaagtcaaagagaataaacaatgtggaatttgaaaaaaaaaatcacactgaaagataaaggtatataagctcacttaactattaatgatacaaattaatctgcaaagaattaaaagcagctttgttaatggcagaagacacatgcagttaataaggacattacttctcatttggggttagattggcttctcctttattaatatctgtttaaactacaaatagaaagaactccattcttaccagacttcttgtcacaagacccagtctctaaagagaaatatcattgataggaaaccagaaagactaaatagatgtatttggtctcacaggcagtccattaatttgctcaaattaaatattatctttaaatattgaaaggttaaatgtacaccgataatggatttagacagctattaagctgtaattgctttctaatgcagttactaaaagacatttgatataacatattgagaaggaaggattagagacttctctacctcagttttaactgagagttttatggctttaattctggcagttgtaggaattggataacaacagtttttatgagaacgcacacaatatgcataaaatattcagtgggcagattgttgagggaatgcattatgtacagtgtatttatgttcatagtttttgcaaatctgtaccagcagtactatcagatcaactattcaccctaaatatttttctattagatctaaaagtcgtatttctgaaaatgttaccattttatggtttcgacccctctaagctgaattaatgtgttttgtgccctggatatatggttacagtagtgaccaaattaatttgaaaacttctcagtctgttggagagtcacatctagttcaggtagtcaaactgatggctttccctgcctgggtaggcagctttctttttagtattcgcattgtttgaatttgtagtatgagattttcacatttttacaggttgcattttgtgagttgagtgtctagctgtgacaaattattgttaacctaagaacatatgctgattgatacagtcagccacttgcctccagagttcaatggaaggacaaaaaatttttggaaaagaaatatgaatgagagctaggctcttcaaaacatattttcctggtgaattatttaaacataatctaagtatgagtatgggtcaggaaaaaaaattacctgcagttaagatatcaagccaaagtattttttgaattgaataaagaaagggaaggaaaaagcctgctgttgatccctgtcactcatgtttttgtattaataggcagcatctgctatttgttctattaatgttttatattaacattttcatttagtttcctttttaaaatggtgaagttacagaattcactttggtttcacaaacctttatggagaaataaatgcatatgaagatctgttctggggcctggggaagatgtttaaattccaggtgatgccagggccactgcatggcaccccctggggttgtacatgcacattgtatatggcagccgcttgcttccttcaaagaagagtgtgataatatctgtgctttctgttgaactttcagagtacttccacagatatgtttttaatacttttaaatcctcagaaataatttgattatttcagttttatacatgagaagtcatgttcagaggagtacacacgaatataaggcagaaaataaaaaatataagaatttcatggattacaaagaaataaaccactacttccattcactgtaaaccagagaagaatatatagggaagttagaattcagtgtgtacccttattaataaaactagtgttttattaataaactataataaactagtgtttattaataaattaaattttttcaaattttttctgctttctcaatagatgctctattttctcccctcctcctattccaccctaaaattaaaagagaaaatacatttctaaattttactgagatagttaagcacagaatggaatggcattacccataagagtctaatatataatgtttataatcctttaaaagtagaattagggttctgtcatctcaatatactatgctgactttgagatttcttttagtcattaaatctgttctgcaaatcttttttaaaaaaattatgagtgactttatgttttgttttagataattttatcactaccatctaactaatttttctttatgtattttcaaaaatttaataatgaatatgattgcaatatgctttgagaccaggatagatgcttgcttgtttttttcttttcctttagactatcatcttttacatacctttctctttctcttaaagtaagtggaaaaattggattcattgaattggtcttgatactatctagggttataacatcctaatattctgtgagtcttattttaggacttgcatatttaatacagtttttaagtctttgatctcctaaatatgcttatagcagccgctaccttcaccacacccaaatccttgaatgttatgatacatcatactactcatgctggatatttactgatctgctgtgttcaagacagactgctgagcttcgtaaactttaccacccaaactaaagacagagagtaaatacataaacacagggagttggggacttggctgaaaattgccacccaaagcttgaaatttatttgcatgctggaacaaagaatatccatgaacttgaaactcaggatgacgtatgtttgatgtttatcctgtatcattatgtattctagggcaccacttctgtatacccagatggaaatcccaattttaaagcaatgctcttgggtattgaggggtatatttgcgaagtcacagtcatcatttattccatgttcccttgccttcttttctgtcaagtactctgagagtcttgatgttgaggatttattggaagcaaacgttgttacctaaatgaagtctagtgaacaaaaccaccaaaagaggacatgaagtgactgctatgtatgtatatatgatatatttttcctcagaattatctaagtgctttggttggttgcaaatgtggaattttgctgtttgtctctaagtcactcttatagaaatgatctgtgtgtgtgataccataggatgtgcttccactgggctcctgagcagtgggaatatatacctgaaacagtatgtgacacttctgtgctttttctccctctgtggtttctgttcttcctataatgtacgcaagtgcaaatatgagcagtgagcgagtagagagaaaaccctgtaagttttgtgctctactttaggtgtatgtgattgcttctcttgctgtgccattcatttctgatttaaatgtctaatgactctcatcaaacaacatttaaactttctatgagatcctgtaaatgttcctttagatcatattatgagtaacaatggatgaaacgagctttaatggggaggctgcggttcagtccgggggttctgcagctgttggtgatggcagaacacgtcaattgaactgcagccatgcgttcagtggcattttgcccattaagcgatgtataaaaacagtattcctggtacagttacatttcatttctgcagcgttttcacagtcagcactggtgtgtcccgtggcctggccttttctcctcttggcgactgaaaaaataaaagcccagtgctttaaggtggtgttgcttaagcatgaatgaaatcactcaaaaaatgtcttcttagcattgaaaaaattggtcacaagtcagtaattaattcattttagagtaagttcatcttggggctgacaaagaggtgtagtagctaattttaaaagatgagtgtaacatctttcccatgtcatacatgtcaagattaaacttaaattatgtattatatattaatgaccttaattttattcataaactactgtaagtacaacagaaatcaatttagttctatttcagccatcatttctgggtgtgaacttctagtttctataaggaataaagagataggcatgaactagtacctgacctcatgaagcatacactgtagttggagacgtatagaccaaaagcaatcctagatggaatgggatatttgaatgagctaaatagaggattgctttgcacttagagaaccttcagtaaatgagtgttgaaagaaagtgtgttcaagagttacctttgaattttagatatttatatgtcactgtggacttcctgggagctgactgaaaatggtgattgtcattgtcatttgacattttttagtctaccagtctggggcctaattcagcattgaaaatagtttttcctgttttaccagaaaaagtagaagccaggagtttgtttttctctcttttccttgtgctcttttaaatcttatttccctcacagttgagcaggaggaggaaaaaaaaagtcctatttccttcatcttattttccactaggcttttgaggaggacgagatattctgaagcatatttgaaataaattgaggaccgtaacttggcaagtatgaggtgcaggaataatccatgtgcaggagagacggtgaaagattactcagaggtacagagccatggagagtcggaaggaacactggaagtttctcgtggagatggaaacctgagaacttgactgtggttaggacaggttggaggagtcctgggtggtgctgaagaggctcggttccggagtcaggccgttgaggttgaagcctggctctgccattcgctaacattgtgaccttggaaaagcttacctacctctctgagtctcagtttgctcatctgtaaaatggcaagagtgtccacttcatggatttgcgaggagtaaataagctagtccgtgtaaagtgatgcatacagaaagcaccagaagtattagctgtgattgattgcaggagccacagcatgcagcaggagaatgatttttgaggtgtttgaagaataatatgtaaagagggctgggtgatatgactcacgcctgtaatcccagcactttgggaggctgaggtgggcagatcacttgaggccaggagttggagaccagtctggataacatggcgaaaatgccatctctactaaaagtacaaaaattagccaggcttggtgctgggtgcctgtaatcccagctactcgggaggctgaggcaggagaattgcttgaacctgggagacggaggttgcagtgagccaagatcgcgccactgcactccagcctgggctacagagtgagacttcgtgtcatagaaaaaaaaaaagaataacatgaggatgtgtttggtgttggcattttggtcacattgaagcagggagggaatggacatttctttcagaaccatgcagccctaaacgttaaacagagaggtttttggggataagtgttaagattttgatgtggatattttagaaggttgggcgtaacagctgattcaacccttttttatcaccatcaatgaaaagggctacataaagatttaagaagaggaggacattcttttctccacagctggtcatgcgcccagtgtagttggcaggaaaacggattgtttggaatgtgtccctaaaatcctgtaatttaattttcattatttatataacgcagtccgtatatgtggcgctgtactacatgcacacaagaccaaatttctggccagtgtaattttaccaaagaagagactgtaactgaaatatttgtacctactaaattatctgcagcttggtaactcaccgttagggagtccatgtgatcccaatcagcaacagggattggaggaacgcattgttggcagtgaaataaggggtcaggaactagaataaatagtgctgggatggtaaacgggcccatgttatactaaatgtaatataaagtcactgactttgaggagtccagaaaaataagtttgtaaatattgacattaaagtagcaaccagtttgcatgctactatgtaaaaggaaactattaaaataattattatacgtagttttttgcttgcagcacttgtttcattctgttcacttttagaaacacaaattagaaaggagtgagtctcttgatgtgtgtctaagagaagttagagtaagatttctagaaatcacgagatatataacttggatagtttatagttttctacaagtgtttcatgttaaaagttcctacattaatggtccttcaatgaatagtatttacctctggaatccaggagatatatccacagttaccgtattggtcatgctaggcaagggcatgatttattggacttgatattatctgtatatagttcttgcttttcaaaacagtcatctggaccgggagtaagctaataaggccatgcactgcataatggcgtttcggtcagtggtggactgcatgtaccactttggtcccataagactataatggagctgaaaaattcctatctatatttcttatcattatttagagtgtactcattctacttccaggaaaaaaaaaaagttaactgtaaacagcctcaggcaggtccttcaggagggattccagaagaaggctttgttatcataggagatgacagcaccatgctgttgttgcccctgacagcgccatgctgttgttgtccagtgagacaaggtgtggaagactgatattgatgacccagaccctatgtaggcctagactaatgtatgcatttgcatctttgtttgtgacaagaagtttaaaaaatagtaaaaaaagcttataaaataaggatgtaaagaaaaatgttttgtgcagctatatagtatgttttgttttcagctaagtgttattacaaaagagtcaaaaagttttacaagagttaagaagcttataaggtaaaaaagttagagtaagctaaggtcaatttttttttttttattaaagcaagaaaaatcttttttctgtttttgagacagggtcactctgtcacccaggctggagtgcagtggtgcgatcttggcttactgcagcctccgcctcctgggctcaggtgatcttcctccctcagccttctgagtagctggaaccacaggtgcgtgccatcacgtgcagctaatttttgcattttttgtggtgacggggttttgccgtgttactcaagctggtcttagactcctgagctcaagtgatccacctgccttgacctcctaaagtgctgagattacaggtgtgaaccaccatgcctgtccaaagaaagaaaaataagaaaaaaaaaattcaatgtatccttaatgtacaatgttgataaagtctacggtagtgtacaagaatgtcctaggcctttgcattcactcaccattcactcatgactcacctaaagcaacttcttgtcctgcaagctccattcatggcaagtgccctatataggtgtacaatcttttatcttttatactatattttaaatgtacctttttgtatgtttggatatgctcagatacacaaataccattgtgatacccttgcctgtggctatttagtacaataacatgctgtgcaggtttgtagccttggagcaataggctatgccatatagcctaggtgtatagcaggctacaccatctaggtttgtgtaggtacactctataatgttctcacaatgacgaaatcacctaatgtatttctcagaatgtatccacatcagtaagtaacacataactaatttattgcaaggggcagaatgtaaaccattggtttagtagttttagattgagttaaaaaaaaaagatatccttgaggttagtgagaggaatcaaaatcaggggacagtgtaggcatttggggtcaaaatttattcagcatatgctagcatgccaccaggaaccagaaggaataaattattctgactccattcttggcaagatctgtgtggctacagaacgtaattattttgcaaatcatttaagttgctgaccacagctaggagattaccacctaagtgaagattaccacctagatggagtgtgattcctccctgggattccctttcagaattgtcagaaaacaaagcagtaaatccacatgttaatcattaaaataaacgaagtgcaatatgcccagcaaatcatttcacacattttctatttcaaggaattgggattcaaatcttaacctaaattttacatattcacattttaaagcatcactcagacttgttcagattactgagcggagtaagggtttcatctgaacacatagaagctggctgcgttcttgaaatggggaggatggggttggtgaggtcacaaaacttcttttcagctccctggttgcaaagaatatgagtgctatgacattagatgggaattcaagttctggtctaaattgataaaatagagttgttattttatggcctcatctttgtttttatatatcacagaatcactgcgaaaatggcagtttgttttctaaagaggcctgagaccagagcagcaggtcacaaagcgagcattttacagcgttgtcagtcagcctatttggctgaactgaatttcccagggcaaaagttttcttacaacgtttcaaacaattcatcaaaaagatggcctaggaagtattaaatgtcttacaatgtaaatatagacaaggctttattaggaaagtgtgcacctgtttatttattgacttatttattataatagcctttcaagtagttttcttgatccttacactcttcacacaatgagtgtaaatagacaccagtcatagttgtaggtggtgagctacagagctctgtattgattagatcttcaggctgtcaaaacaactagaaattttaataaatgttttcaaacaagtgaccagttccatctaacccatcagaatgttttattgtaaatataacatggctgtcagtttgacagaaattgtcttcccagaataatttatagtgtgatttcaaaatgcatccagtcacaggcttttaggaatcctgtcatagaatattattttatgccatcatgttttaaaaagacacagtgataacattgaataggaatagtgcaatgacactgaagtgcagttttagatgggaggggaagtcttccttgcttcagcaaatcaggtgtttgaagtttaaaaactgcttaagtggatttgtagtaaagctctgtctgttttaaagtactggtgactcaacagctgtggggaatctgtctggaatcggcgcggaactttggagaatgttttctcctcaggagctggaactcaactcttcctcagcccacacaatgcaggatctgtggttttctgtccctgtttctttttctccatttttctccccttcacttactctgattgatggaaacacgtgctgggagctttccctgacattctttccaaagactgaaagtaagaaatgttatggtggtgctatgtctatttttgaaagtaagtctgttaacgtaaagcctgtgttgatatattgggatgaattataatggtgatattattacagccttcaaagctgaaaatttattatttttctcacctacttttggttgctgatacttgatcataggaacatgctgtgcatctggttaattttggggaacctatttgtagattttcaaaagttaaactttatccttctttatatcttctccaggccctcttttgttattgaaaaacaaatagaaatacaatccactacaacttcggtgcttctgcttttctggtcactctcattattaatgcttataatgaagatatttttggaaacactgacttatcattggttttgcaaatacagtaaaaataatattgtttgttggaactcttcattatgattcttttacttttaaatatttaattcataattattcttgtttctacatctgtattttaatttttatttgtttttatttagttttaaagacagggtctctctctgttgcccaggctggagtgcagaggcatcatcatagctcactgcagcctgaaatttccaggttcaagccatcctcccacctcagcctcctgagtcgctgggactacaggcccgtgccaccaagactggctgatttaaaaaattttttttgtggagacgaggtctcactttgttacggaggctggtctcttactcctgggctcaaatcattctcctgcctcggcctcccaaagtgctgagatttacaggcatgagccactggaccctgcacttacgtctctattttcaaatgttaaatgtctttatgtataggaggtcatgttggattttaaaagtcaacagaaattgataggaagcagtgtgcagccctgaatgaaactcttaagttatgggggaaaaaaataccagaacctatgagtgaaattattttttaaaatctcgtcttgctggtagacaggttttttagagacagggaccgcatcttctttaatctttgctgtatcccttgttcccagcatattgtctggcacagagtatttaatacattaagtgggtgaataaaaaagtgaatggcgccgggcgtggtgtctcacgcctgtaatcccagcactttgggaggccgaggcaggcagattacctgaggtcaggagttcaagaccagcctggccaacatggcaaaaccctgtctctactgaaaaatacaaaaattagccaggtgtggtggtgggcacctgtaatcccagctacttgggaggctgaggtaggagaattgcttgaacccgggaggcagaggttgcagtgagctgagatcccgccactgcactccagcctgagtaacatggtgagacagtgtctcaaaaaaacaaaaacaaaacaaaacaaaaaaaaccccagaccaaacaataacaaccaaaacaagtgaatgggataacttggtgctgagtttaagagccaaggttcatttccttggtacctgttgcttgactagaagacaaatctgtcgtaaatgatcaaaaaaatgtttacatagacggatgtggaggagaattttatgtatgcatacacacagaatactaagtggcattttttatgtgacagattcatttccatgcatattccatattgtaagtcagtcttcacaactgttttgtgaagtagcagatccctgttttgcagatgaggcaactgatgcatacataggttaggttcacttttccaaagtcctagagtttttatttggctgagccaggatttgaatgtcagcactttagtctctttctagagtttctgtgtgcaatcactactgtctattacctctagcagtttatcacatgcacaattgttcgtaacacctggctgtgcatgatgtacatctacaggtagacacttcatgtacttgctgtggtagtactctagaaacactggtaagttcacatgttatcaaagaaactcctgtatccgctctccgagtgctgatctggtcattttctgcttgatgacgccagtcttttgagttaactcgtaggtgtgcatgttggtttctttaaagtgttagattatgaaccatagggcagcaggtgattaatttctgcatcataagaattcagctactgtttttaggaatttgcttacaaaccatcaagtttgcttattcttacagagttttgtctttatttgtggtattgtaatatataatagttagtatctgaccccaagagccttacaatgaggccacgaagacaaacagaatttcgagaagtcagaatgaagaatggtcctcaaaagagaaaggatagaatcttggggttttattcttgtgagggatgttagaaatgatcttatctctaagtaatggggagagaacttagcaaaatccttaaagagcaggggagtccactttagtgtgagttatttaacttctctgtgatttgtttacctttcttcaaaaatggaatgataatgatactcagccccctagtatgttgtgaggattgaatgagggaataaacatacatggagtacttaaaacagctcttgcacacaggaagtgcataacaaatattatcattgaaattatcattttacaattgaggaaattgaatcccagagaaattaaattacttactcaaggctaatccagctagctaatgactgagccagggctggaatcttgacatacatgtcgtcagcactcttgtaatattcaacagaattactgtaaagcaatcctctatttgacaagtaataatacataatctctgcatttacttgggatgctgaatatatactgaacttcttgctgttctttattttttcttctgggaactatatattgggtgattcttttaaaaaatgtggttatatgccaacattatgggaaaggaaaaaaaaacttaccagacttttcttccatacataatccaaatttcaaatgtattaattttgccgaatgccatggcaacatacatatctgtttttcagttcatgaaaggtattttgggaattattggctcatgcatgcttgagcgttttcgtctttcagctatagaaatacactatgtatcctcttcattttgtgtttgtgcttctattcaagatgagaataaaagcagttagtttctgggttgtaatattcttcagtgaacggtggctttctaaaacagttacaccttgactgaaatgaaaactctgctgtatcataaaagatattctaattactgcatctagttaaaaggagaataaatcactgggagattattttaagtgccttaaatataataaaaaagaataatggacgttgaacagcttgacaggtttgatgaatgcagactatggctgatttctgctgctttctaatggaaaaggagagcattttactttctaggtgtattgtcaaagcaaatttttgttagggaagataaggagaagccttatctttgttgagcacttgccttgtaccaggcattagccaaggcagtgtattatctcatttaatttcatttaatcctccccaaccttgtagataatgttatccccattttgcatctaagaaaaatgaggctcagagaatttgaataacttgcctcagggtatatagctgcaaagtaggatccagactaggttctttctctttatttcattaccccagtagggttgtgatgatgatgtaaatataaatgtaaatataattgtctccactgttacaaagatactaatttcatcccatttaatttagaatggttgtgtccaaacaattttaacttctttgagcctctgtaaaatgggaacagtcaggtcactgtgatctaaaaggagaatatatgtgcaaacctctttgcttagtgcttgacagtaaatggggagtgcctgggagatttgttttccatatcatcaacagacaaatgggtgttcccaactgattctaagttaagagttttagatgtttaattaatagactcataaattgtgcctgtaaatttaaaacggtatctgttgagtttttctaaatgtattttacagattagatggtgatagactttcttaaaatgttgtgttttccattggattttgccttcataaatgtatgaaaatatatttagttagtgtggacatgattgcagtgctaatacatggcagattgtgtgtacatatatgtgtgtgtgtgttggctattgttctatctgtaggagggtaaaaatctaaatggtgggcaaataaaatcagaagaaaatgttggttaatttttggattatgttgtctctataagagaatgttattactggtaagtattttgcaaagtttttcatccatgtagtgaatatgaaacatgtcttcttggttgactcatttgtatcttttacagtacattttgggtgccagtttatagattcttttcctaaaatctgcaaagtaatagaagagttagaattcagtacctaagatacagagattctattactccaacccccttgccatatgaagatctgtgtttaaatgagtcaagaaaattaacttttaagattctatgtggatgtatgaatttattcatattccaacattcagttgatggcatttatgggaactatactcatggaaactcagaaacaaagaaacttttatttgccactatattcacacactttagtagttctttcctaaatctcttttgaagtaaagaatactataacatcatatagttttgtgttcacagttttacacctaattttacacattcacatttatagatatgcacaattactggacttactctttgcttgtgttcaaatataaaagcttatagaatcttgtaccagctatcaacacattcatccaaatgtattccgggtttctccattgctgctgtggtagtaaatataaatctacattctcagtggtattagttgttcttagtcaagcatgagaggaactgtatatgagtgtcattatctaataatttttctaactgtgttaaataacgtcgtattctcccttcctttgccatgctgaatcagctgaagagacaaataagtacagaagggatgagtgtggcttcataatcagggatgaatgtgttatgatccatcttgatccaataagcagatgaatatttcacaactgcattattttgtaagtgaggatactgtcagttttgtagcaaaggttctggtagataagattgtctttcttgatcttttataagtaaatttttattgtaaattatttaactgcattctctgaaaaatgtacttttgtatcagagaaatatgcttaggatatatatgtgtaagaatttaaaggacaggtttagttatgggccaaaatctaatgttgtagcatcaacatgatttttattaagaaaagagaatttgatgttgagagttttcagttcacatacagaataagtaaaccttatcctataaactacacttattattggtatccgtgtttttaaatgttttatgtgtacctcatcaaaatgagatcatgatctcctaatttatagtgattgtgattatttaaaactagctgaactaggataacataaatagtgtaaaaagggaatcctacaattgtgattactacattaaaaatgcaatttgcagtataaaatgccatgtgaaggttaaatgatgttaaagataataatgtgtataatgaaatcaagaatagagcatttaacaggaatgtatcactttatgggcatagaaggcaagagagatctttacactgtcattattacgtacatggtagtattttctaattcagtggtcttcaaattgtatactatggaactcactatatgaaagagataatttttttacatgggcacaaacacacaattaccttagcaatggctgaagtcttattcttaaaatatattctttgttttgttgtatatttttctctaaaataaaataatttgaacaaaataaatataggactatccttttcaaagtaatagtcagcgattgaatttttgaagtggaaagactgaatgaaggcctgtggataaagacgaaatcctgaaatatcaaaaaacaatagtttattcacaaaatagatgtttgtgaaataaaagttatgccctttgctttctcaattgtgtgatatttatatgtcttagtgttaatgcttgtggagtagggacttaatatttgttaactgaataaaactgcctaattctatgaagaatactaagtttatatgccaggaatttctcttattttttgcaaatatgtaataataatgttttttataactcctcagatattatgatttactcttgattaggcaaactgtgggaggagtatcagattatacaacatgccaaaaaacattaattatatttctctgtaatgaagacctgcaaataagtaaagatgtttgtaagcagtcaaagtagatgtcatcaagttcatgtgttaaatttgttttgggcagatagtgaacagtcatttactctattagacaaaatatcataattagtgaaaacaatattctgttttttttgttttgagatattccctttgttttgggggttctgcagatttcctgtgatatgtctgcatctgattttgtttatttagtctgcttcttcaatgtgctgacttcataccttgcaaaaattctgaaatcttctcaactagtatttgtgtattgcctcttccttactcctcctctgtttttttaatgaaactcctctaagaaggttttggacaattctcattctatattatgtctatttatgtctatttaatatagtctacttttttttttgcatctctgtttcattcactagaatataagctctctgaggaccatagtctgttttgttcaataacgtatattgagcatttgaaagagtgactcagaatggatgtccggtgcgcaagtggaagcattttttgaataaatgaacgatttctgtgtaatttattctgatctgtttttcactttacctagctttcattggtctcgtgtattgtataattcaagctctgtttcaatggctgtatttttaatttattggtgttctatttgattcccattcaaacttatcttttcattatgatgtacattatttttgtctgtattaacactttaaatatgatcatttaaaaaatctctttcaaattactctatttgtcaagatcttgggggcactaatcctcctttgtgtgtctactgacttgtccacagtggataagtttgtgtgtgtttctaatttttgattgtgagctcatcttcatctgggatgtttgtctcctttggaagtttgtgctctgggttatgggacagttcttacaaagtggttttctgttagtttctgccaatttctcaggaatttcattggtttggcattagtttttacattaattttatggcttgtggttcccaaactaagcaaatagtataaatttagattctgcaactgcatatggaaaagttttcagggttggattactcataggcaactctttctttgcccaccaaagcccttgccagacatgttttctggccatttccctgaatcagtgacataagaatcagtagcctttccaaatctctggctttgtgcaggggtcttaggacctgtgcctctgtgggtttaaaaactccagcccctatcccttagggcccatagatctgctaatgtttccagttctgtgttttttgttctggctgtaaattccctctcagaattccatttcttttgagtttgggtatgtatttaacttttttctcatcatgttttatccaggctttttttttttaaatggagtgtgtgtgcgcgcacgtgtgtgagagtgtgtttggaggagtgtattatttgaaccatcatattgctgagactagaaatcccctctcatttctaagatcaattattatgtggatatttgctttctttttctgagtgtaatattaaatacgaaatggactcgtgaacctggagaatgtctgtcagaaataccgaaccttccttctttcattttcgcctgtaaaatcttacaatttttttaaagatagatatacagccatctagagaatacacagaagagtgatttggtgttcatctttgtgtttgctgtttgctgaaggatcactcgctaagatacgtctaacattgctataattgttctgtttccctttgaattgaatatttagggtaaggcactgatatgtcagtaggatgaccaacactaaaagtccagtatcctgggaaacctctgtctttggtagacctggattgtcaccttagtcttggattccttccggagactgaagaaatcctttaaaaactttcctgctgtggagtcttctggctcaggccccaactacagtgttacattcagacttctttgttagaacaaagttttacatatattcaaatagtaaggataaatattaatctgtttagaaagagagccttgaaaggatcctagtctttttgcataggaaaaatgtccccaatcaatgagaaagtctaggagcatgatcaagacttattttatatagtttgtcttttagggggtactggtggattatacttttagagttacattcagtattattgtggctggactaaaaacccctcaagaatacatttcacattgattttattatagacatctgtcaagcaaagcagaggcaaatgatagcatactcatttaccagtaatgcaaatcaaatgagctagtggcaacaaaatcactcctgacacctttgccctttttctcttgatttgaactaatgacgtgtgtgtgtgtgtgtgtgtgtgtgtgtgtgtgtgtgtgtgcgcgcgcgcagactagcaaaatccagactagcaaacaaaggccaatgacaggataactttcataccttcatgcctgggtcactcaccatgtacgataggagcagtgcattctcttgtgaattaaaaatctatttatccttcctgggtgcataagtcccatagaaggctgggaggggaagtggaactctttatataggaggggcttagacctcaatagcctgtccctttgaatgacaaaatgcccaccagccttgccacaaatagcttctgaaatatgagaaccttttttaattcttaagatccttgaccactgcaactaatgtaaagacacactccgcaacaaacttatacacacacacgtacacacacattttattctgttttataggaatgacagtctttagcagtgcataatttttttattattattttgtttgagactgggtctcactctcactcaggctggagtgcagtggcatgatcatggctcactgcagccttgaccccctcctgggctcaagtgatcctcccacttcagcgttttgagtagttgggatcacaggcacgtgccaccacgccttggtagtttttgtgttttttgtagagatggtgtttcgccatgttgcccaggctgttcttgaactcctgagctcaagcaatctgcccaccttggtctgggattacaggcgtgagccactgtgcccggccaacattccatcattttaaaagctgggcaaaaagggaaggaactagttgagaaaggaaggttctatggccagaacatcagaatgcttgtttttagtttttgcaaacattggtgaaataatagttggcttttttgtaaagcctttccagttggaaactgcaagtacttttttttttttttttttttcgagacggagtctcgctctgttgcccaggctggagtgcagtggtgtgatctttgctcactgccagctctgcctcccaggttcatgccattctcctgcctcagcctctccagtagctgggactacaggcgcccgccaccacacccggctaattttctgtatttttagtagagatggggtttcaccatgttagccaggatgttctcgatctcctgacctcgtgatctgcccgcctcggcctcccaaagtgctgggattacaggcgtgagccaccacacccggccagaaactggaagtacttttaaaagtatgatggaagatacatactttgtaatatacatacatacaaaatttgttctttgagcaaatttattcagttttactggcaatgaaactcataatgtttactcctcagaaattttaaaacatttgtttgttgaatgtatttattgtttctatcggcagtctttggaaatctgtcttgtgatagttctaataatatggtttgaatacagcattgtcatatgtcttatatgttggggcaacattctaataactatacattttttatcttccgatacgtttttctgaataactctttgtgttgactgcaagtatgtttttgcagagtcaccaagttctgaaagtatgcttttaggatggcactaggttactgtgtttgtattaagtataattgtgttcttttgtagatttgttcctatagagctatggtttcatggtctgaagctgaaagaggtttaaagaggtcatcacagttcctcctcccacccttactgttgttaaatatgaatgtacgtttgactattggaggaattttgtttctagaactttcaagagtaattgttttctgtaatttatagtaggaaaatattgatttattaatagttaaaatgttctttgggatgcttgaagaccatgatgtgaaaaacttaaaaaaattagcattgatgttgtttctatatatttgccaatgggagtactataactttgaaatgtaggggattgtttgaaacatgaattgtgaaaaataacgcaactttagttattttatattgggtccaggctagtccgctgaagagtatgaagtacagttttatgtaaaatatatctcagattgagaatgtggaaacactgttctttaaaaaaataaaatcttcagtaagatccttttatgaatttactggtttgttctcatttgtcatcggactgtttccagatgtaaaatattactttcttgaaattgctgttgagtctactatcaagaccaggtgcatgttgttttacagctattttacttctgatttttaatgctgaaactcatagaatgccttgaactgataatttgtttaactctctacctactaattggaccaagaaataactttgtatctttatctcttttccatttcatgttttatttctgtttcaattagtgtgtgcctttggcaaaaaggagatgattttgctttctgttttaggatttgcctccaagaaaaaatatattttattgccacattttctcaattgatccagtagagttcacagacaatgaaaagagtaagaaaactaatttttaaagcttggtagtgttataattttcttccttataataatcagaaaaagaatttgtataacttttgtttctaatatagcagttctgaaaatctaggcttacacattttccttcccattactgctgtttatacttaagtaaaacaaaaatggtcgctgcaggtttttttctcattttagtgcagagtttgaattcttcaaagactgctaaggttttcccaccttaacaatttatgacagacccttatatcttcataggctgagtccgctgctaagagtttgctaactcatgactttaatacaccagtagagatcacactggagttaaaacaaagagagcacgaaccctgaaatgatttaagactgttcttagctgactactggaacacagtgtctcacgtggtgttattggtaaccttaatgcagattataattctgtagtttaaccaggatgtgttggctatggtaaagtgcctttataaggaattgtgaaagggcacaaggaatggaaacagaacctcagttttctcagtgtaaatgatgatgacaagaattccctgtgcacatttgttgttgtgagaaagggtgagatagaatagattggacacatagtaggtgctcactgttagtttttctcattcattcattactgtgtcattctattggcatgctcacagtcatgtagtggaatatgaagttacatcgtgatatttttcattcattcaccactgtgtcattctgttgacatgttcacaggcatgtagtggaatataaagttacatcatgatattttaaaagctaccgatgtggtagatttcacagtcttgaaaaggggttttttttaagctgaattttcagtttcacttgagaagagtcctgatnnnnnnnnnnnnnnnnnnnntatttgttgaaccctcattctgttttctcaagttctgtccatgcacttcacagcattggctttactgcatgctgggtgccaggcactaggagcagagatgggaaggaccacccctcaccccccaataccttgaaatgggtgcaaaccttaatgcagattataattctgtagtttaaccaggatgtgttggctatggtaaagtgcctttataaggaattgtgaaagggcacaaggaatggaaacagaacctcagttttctcagtgtaaatgatgatgacaagaattccctgtgcacatttgttgttgtgagaaagggtgagatagaatagattggacacatagtaggtgctcactgttagtttttctcattcattcattactgtgtcattctattggcatgctcacagtcatgtagtggaatatgaagttacatcgtgatatttttcattcattcaccactgtgtcattctgttgacatgttcacaggcatgtagtggaatataaagttacatcatgatattttaaaagctaccgatgtggtagatttcacagtcttgaaaaggggttttttttaagctgaattttcagtttcacttgagaagagtcctgatttgcttgtacaaagagcagtagggttgcagagaaggaaagaaggcaactcttttaagtcccagccgctactctgctgtgtcttattctctaaaacagtgaagaagtctgggtggacattctagtggtcagaagcctaagctttgtcttttgatgagtgcagacaggggagggagcaactgacgagggagtagaggggcttggagccccttcccaagtctaccatccctcacttatgtgtctcttcctcagtaaagcacccccagtgcccttatttgctgtatttttcttcatggaacttactgtctatgggacctatttgtgcattcatttatggtgtgtctctgcattgctttccctttcactacccatgtaagttccatgaaggcccagtcttaagcattacaggttgagcgtccctaatctgaaatgctccaaattccaaaacctttgaacactgacatgagatagtgacacctttgctttttctgttgttccaaagtacgcaaactgttttatgcacaaaattatcaaaaatattttgtaaaattacctttagcccatgtgtgtaaggtatacatgaagctgcatatgaaacataaaatacatttcatgttgaaacttggttctcaccccaaagttgcctcatgtatatgcaaatattcaaaaatcccaaaaaattagacatccaaaacacttctgatcctaagcctttgagataagggatacttaacctgtactgggtcctcagtgcctggcacagggtggatgctcagtaagtattttcttaaaagaaagaacaagggaaaggtagatgagacgataagaggtggaggtacagggaagaagaacacagaaacatggtgatgaaaagaacagtctgataccttatttgggccccagaaaatgattggtactgaagggattttattagtggtcatttaagaaacttgtgttgtactgtttttgtgtattggaaggaggctagacattgttacatggaaattcacagttacattttcactaaatgtttcattgtgaaaaacgtcaagaaaggttggagaaggtctaggaaaacttatctttgaagatactgtcttatgaatttccagctcagacttgcagcttttgggagctgaggctatgaggtgatcttgagagcagctgaggaggctctaatgggttccagctgtgtgcccagagaacccaccctctcaggataacattaaccaggtagaccctgccctgactgacttcctctgggctttatgggtccccgtggtctgttgcattgatcttgcattttcaggttttatagcaattctaaacatgtgagggtacatatttgctctttgatgtgccctttgatagaagccagagtgctttacctgagcctgcctgtaataatgggggaaggtgggttgcatgccctgcagccatacgctccctgggaggctggttttattgcggttgttgattggcagactttaatcaggggtgtttcttgttgtatttttgaacatgaagtatattaaggatagttaaacatgtagtcctgctggtgttttgttttgttttgaaccacattttgttccattgtgccacttgatagaaaggagggcagaatggaaacatatggggagcagaaatagtaacacttatgtcatataactacactgtgttggtgattttttgtttttttccatgttttataatacctttatgtacatccctattaagaaggcagctattgtgtctccatttcacagagaggtaagttaaggaatgtggaatttggaaacatgcttgccggttagtgtggatggaacctaaattagaattcagagctcttattactagataggagaccaatcccaggcagtcatggcatttctgtgaactctttcgaagagtaaagggacaggaattgccttttcagagtagaactcagtgcatatcagtggaattatagaactttagggttagaagggcctttgatgggaccatcctttaagctagaactgcctcttgaagtttgcagtgtgcatgacctgcagctccattgtttatattccaaatctatgaaactagtgagagaataggacacatctttgtatgtttaggtttgacagtacttatcagaagtggtcatattacggttttctatcttcctttggtggcttttcagctttccttggtaccagccttccaaaagaaattagctcccttgtgccctcactttaatttggaagagattggtttggaagagccaccaagggcccactagacagctccttagaagttgctgtgacttggcagatggcacctgaggtttaaggattggggatctagccatggcgtgttgatgatgatgatgatgaggatggcaatgactattaactccttaatccatatttaatcatatcaccagaactgatggttgttcattgaagattcacttcatgaagtacaagctaggtgattcctttttgaaaataacactgtgggcctaagatatatggaccttatgtggcttaaaatgacccacttctctgtgcttactcctaattaccttcttatttctttgaatttagtaatgggagtaaatccgactttaaagccatttgtggtggcaaaccctaactattcaatgaaatacaaatttggtacatttgcatcctatgcaagttttatatttttgacagctatttttgtatttaagcaagaagccgaaataaaaatttctaaacagatatgccagattatattcaccatgtttgagtatagtattgattggtcatggctgatgtttatcagactaagcaaagtgtgtctgtattagttgtctcaagagggtctttattcttaaatgcttatgaattccataataagtcttggaaagtggaacatacccaagcacaatttataacttttctaggctttattggtattctgagccatccagtgaggactggagtcattcacatgatagaataacacagataccatttattaatctgctgaatattgatcacatttagcaaattgctgaatattagcagtgaaatactattcctctacaaaatagtagtagccatagtagtagcaaaattatcctcatgtgtccatgcatgatttatatgtatgtgtgtgtttatatatatacagtgtatacatccatatctctatatttctattttgctatctttgttgggatttataaggtaacttttaattattttccttcccccattctctacttagcgatcctttctttataccaatcatcatggtaaacactgggaatataaagattaataagtcacagtacctatccttagagctggaagcaaatactttttatccagcataatgagtgttacgagagatggtatagaaaatgctctggtaggcctggtgtggtggctcatgactgtaatcccagcagtttgggaggctgaggcaggtggatcacttgaggtcaggagttggagaccagcctcgccaacatggtgaaaccccatctctactaaaaatacaaaaaaattagctgggtgtggtggtgggcacctgtactcccagctactcgagaggctgaggcaggagaatcgcttgaacccgggaggcggaagttgcactgagccgagattacaccactgcactcccgcctggatgacagaacaagactccgtctcaattaaaaaaaaaaaatgcaaaaagaaaatgctctggtatcccagaaaatgcctactctgtttcaggaatgcaattcagaaaggtgtaccagagtgtcatttgcagtctagtggtagtttcatagaatgtctgtttcaagaggacccttctctatagatctgtagtttttattagttataatttcttcacacttctgtcagaaatgtttgctgttaattttgaacactgtttttcatgtgaatatattttttaagtggatatctttttcattttgtttttttcctcctggcttttaaatatatatttaaaatatttttatccatatctaatttttgcaactttcaaaaaaactttctaagcagtcacctcctgaccctctttttcccccttagctgtttcccccccccttttcagggccacctcccctccttcagagcccccgcataatgctattcctttaccgtccagccatctgcctgttttagcctcttcttcactctctctgtttcttctatatagatttccccatatgtctgcttcttcctttatccacaagtccagacactcctccatagctttcttaccaccccatcctggtgtcccgtctgttcataaataactctttcatccgccttgaatcccaaccccctactctttctaaaaagagtgtgcaaataaacctaaagtgcacggagccaagatgcatagcatagttttgattcagaatagactttctccttccaatcacctgttttagtccccattttttgttgcttggcttctttgtacagatccacaattgccgttcaatttttgtatgaaagtggatgcaaagttatttaatgtcttcatgacaaagtttttgcctcttactggcaggttattttgccctaatcagttacacagtcttgtgcagcctagtggttgctattttggagtagtcaggtttgaaccttttgttcttcagaaattaacgtattatctcagaaacagcagtctctgcttgcgtgcttggcaacacaaaactgcgttaggtccttttctaagtctgagttctaggacatgtgccatgaaaggagtgttaactgaatcacctgcagaaatggccacaaggagggctttgtaatgttctagatatttaaaatgttggtgtcctcctcctagcatggtgtgctagtgacaggctcctttctccctggtcaagagtaaacattggcaatttacttccctttagaaatgtgttactgtagccatcgcggagttgccagtgtttttccttcctaatgtcagtgataattttactcacagattccctgcagagattttagctcagcaggaagtaaatctaggtaagattgccttgaaaactgatctaaaacaataaatgctaactgtatcattcctttttatttaaaaaaaattggaggcataactaacttgattatttgtaactggtgagatctaataatcgtggttaagaccccattcgttcatacattctctcgttctctctctcactgcttctttgcctatagaaaaataaaagtcagagattgaaatgattcacactatattttttaaggatgaaatatcatagtagaaatgaaaggtagaactgtttactcatgagatgctgagaaaatctaaactgtagctttcctagagtttaggaagctaaatattttattggtatcaaaatcagaaatatctaaagaataagatatttagttttaaatgtttcatactttctaaaaagagtttttgctttgttttgttttgtttttgttttttgagacgagtctggctgttaccacccgggctgaagtgcaatggcacgatcttggctcactgcaacctccacctcctgggttctagtaattctcctgcttcgacctcctgagtagctgagattacaggcacctgccaccatgcccggctaatttttgtatatttagtggagatggggtttcaccatattggccaggctggtcttgaagtactgacctcaggtgacccacgcaccttggcctcccgaagtactgggattataggcatgagccactgtgtccagccaaggtcttttgttgttgttgttgttgatagtcaagaatgagattttactgaaacaaggacatcagaataaaaagaaatgtaaaaaatgggaaagacactgaaaattacaacaacccatattactcattcagattctttttggaatttcaaatagtcaataatgaagagacataaattccttggagaaacgtagcttagggtcagctttcctttaatgacactagtgctatagtcacttatatgtagtatttttggtgttgtccaatttctgtggattctgaacattagctgtacacagatccaagtctgtggctttagcatatttttgcttttacatcttgtcaaaaatatactgttagaatatcttagactcgagaagattttagaaatcactaataatgtaacaactgttattggttatgaatgaacaaaggttcagttaaagagtatttccaggtaaggctgtacatatccacagtatattatagagacttctgggttatgcactggatattaatggtttggattatggtgatgtttctgaatgtgtgaagggtgaagttctagacttcatttttattaaatgaaattgattttcttacccccaccaaattacttaccaaacattagatacctaagatcttaaacatagccatcctctaaattatttgttctttaagtgtccagagaatatcgtgcagcttccagatcatggagaaaccagttctgtgctcttgaagttgcagtggtaggagaaatagcagtcttctatgacagatttttcaactttaaccctctcactctctgctaattagaatcatacggtcatacacttttggttttttttgtgtgtaacaaattttttctaaagattcaacaaaagagtttcaaggttaccttcaagtaggtacaaatatcttagctctggcttctttttctcccaaattggctgtggactgtaggagcttaattagttcaggctcagtgcaattggtttgctcctagggtgtgtctatacttaaaacatttttttataacagaaaatacgtttttgaccacttttcataacttcctcttgttgtttaccagttttaattttatcttggcaattgaaaatcttgggggaggccaatctaaaaaaaattcttggattttcaagttggatatacatcggtttcctaaaaagaactctctttttcaataactttgatatctcattcattcagcctgtatttattgagagcttatcatgcacgtggtgttatgctttttaattgctggtaccttgaatatttagagaaaaaatacctcgtgcattttgtctctgtgtgtttgacatgtcaccttgttgaatctgcaccaagaaaatgatgaattccaatgatctatggtagttacaaggccttagaagaaccagggatgtgaatttttggtctgcttcctccgtatttcctattcattgagaaacgtgcttgtatgcatataaacaattccttactatttttctttctggagaggaaacagtaatgggtggattttatcacaggacaaagactcttccagatagctgttacagtccctccctctgctcacctgatttagatgaacctctctttgacccaccacgatggtggtaagtctgccgttgcagttttgtagacatgtatgtgaaggcgatgtttgttatggggtcagtgttgccttaaggatgcgggctagagtgaggggacctttgtggtgggctttgcagacttcttggcagagggaagcacagatgcgtgaggttactattttcacctatctcctcctttctttattgtttacaggaacacttgtctaagtggtgcacaattttgccttgcttacgcttctagagtgaaaaatatctgtccagactccctgggataggttggttctaacatcttggtggattgagcctggaccaggagttttgacttagaattcatggagagaggtgtctgtaaatgtatatatacccctttatgtttgggagaaagcatctgtggagcttatctgggtagcaagaggattttgtgacccagcaaaggttaaggcacactgcctggaaaaatcaattaggatccagttgagggttagatctggccatagactttgcctggtgttggtaaataatctgaaagccttaaagcatctcagagtaatgaaaggggcccaagggttcacagtgccttttctcaggattgctgcaaggattctggattaaaaatccttctgctgtctgtggaacagaacatttcctgggatcaatccttgagccttccatagacaaagaatttcccaaaactaatcttgccccatgtggtgtcagaggtaaaataagtgccaagcatgagaagccagagtaacctttactggagtaacctctgctagatctcttgttatctatgtactcttagaatatcttagactcgagaagatgttagaaatcaccaataatgtaagaactgttattggttatgaatgaacaaaggttcaattaaagagtatttccagataaggctatacatatccatagtatattatagagacctctgggttatgcactggatattaatggtttggattatggtgatgtttctgaatgtgtgaagggtgaagttctaaaccctttttagataggcaagtgtgatgtgagcagtagagtacattttttgtttttgtttcctgaagtggggcacatttctctcccctttgtggttctgtaaatacattgttgagtccagtggaacttcaaagatggcacatagctactgatgacacacacaaatattgtaagttgataaggatgtctgaaatgttataagtggctacctgatgcctgatgtcaatgctggtatctgtaaagcacacacactaagaatagagactggcagctcaagggtgttgatggtaattttattgtatcttcaagaaagtgtgtttccagagaattattatcagtaataatgactaccaccttgttttcttttgcctcatttctctttcttcttccatgaaactggggtaagccttattgtagagagaagcccacatggatatccagcacctaggttccgccgagggcaaggcggaaatgaactgagttattccatttctgtgtaaatcggcgtcatttgctacatgtgcaagttttgggccagaggtgtggaaattgggttcactgttaatctaactagtgatagcctttttaatcatgtattttaataggaaggtagcacagttgagggacctcttttgcctcttgtgcctaagacagctgggtttgaaactcagtttttaatgaattatttaactttactgtgtctcattttcaaatctataaaatggggttaattgtattttgcaggattatactggagaagatgatagtacatttcagatttctaccacaaatatggccctcgaatttacttttctctactactaagcaacaaaataaaattgaggaaatgggagtctctctacctggtctttgatttagagtgtggtatttcttcattatgggtagaagagtatttttctttatagagagtcattaaccttcaggaaaaaaaaatcaatcaaaggttacgtggaatgaagaagcgatgtcatgtaattgagatttttttttttttgattcaaaatgtaaactcacttgatttagaattgattggaacatggcatgtgaaaaaaacacaggagacatttaaaactgtacctaaatctgatatagtagttaagaaagctagctttataggaaattaaagggggctgattagagtaagataggagagagagggggaaaggggatatggtgggtagctagaagaaaggcatacacatgcttagaagtaggaagccagagatggaggaagacctaggatgggcttggaaaacttctgaagccttaatgaactgatcttgtcacacacagctgttcatttgagttgtgggcctcagagtattattcctttttatcactgtcttttgaaatgctaattagataattgaccattgttcccagttctttggttactttttattcttaaacttctagagactaggccttgaatgggatactcagagcagcacaccagatgggaaattattctctggccttcagttgccaaatgaccaccacagtagtgcttgggatgtataaaatccagctgagaggcagaactagcctaaggggtggttagcatacttcttgggatagtccttcatcaatagatttttattttgtaatgatgaaggggactgcctttgtatttttatacagatttatcagatttacttaatcaataacttaatcaatattgattacttaatcaataatcatggtcttcttgaccatgaaaggctcatttaaagaaaagaacacttgaagaatatctgaaaatgattagcaagatacctttggtttttcatgaaacaccattataagtctaatgtttgaagaatgtttttattctacttctgacctagttaactcatagttttttttttaaattgaattagataatgtgtatgaaagcatcttgaagaatatacactcagcacaaatgtaagatttgattaataaggtggttattaatgaataccatatagtaacaatatatctgagtcttgcagaaaaacattcttgaccaacaggacgtgatctagtagaagagctgcctgttctacatattttataaagagaactaatcatttttcttctgtatactcaatccgatatcaggaaacctcatttaggtctattcacactgtagaggcagcaaaataacatgcctgaccttttctatgtaaatattaaaaattattaaatctgcatgttggaaagattgatttcggcaataccttctaaattttcagtgaatatttaagtgtaagtttgcagatagtttcatgaaaataattgacttttagttttggtactagaacaattggaatattggtggtatttttcattttaaatctgtgtgaactaaaattttcttatttgtctggcatgaacatcacagaaaaatcctttcccttcaagctatttttttaaaaaaattgtaaaggagatactatgtattgcagaacatttagcaaatagtgaaaaaataaaaagggaaagtcaaaaattccctcttattagttcagtactgtaacagtcgattgtattgcctgggctatttttttaaaaaaattgtaaaagagatactatgtattgcagaacatttagcaaatagtgaaaaaataaaaagggaaagtcaaaaattccctcttattagttaagtactgtaacagttgattgtattgcctggtggtagtctttatatctgtacacatatacatacaatttaaaatatgtatgcaattttagattatttaaataaattcatacttattgttatatatttttctttttctttttttgtatttgcatttttaaaaaactgataagacctgccagggttatgtgtgctgtagtgtttcctgaatttatttaactactatggtttttctgttttctaatttattaattcattaaacatttgttattcctttgttttcttgggtcagttttatagaagtcattttccttaaattgactgttgagttaaattatttcactcttatgttccagatcatgaatttgtattgtgtaaaaatttggctgcattccataagttttgttgataatgtaatattctctgtgttactagtttctgaagttattttggcagttttttccttttaatacaatagctaacttgaactctcatttaaatttcaaagagattatcaagtttagcttttaaaattttcataactgttttctagttttattaaagtgtggccagtaaagaaacagtgtattttctgtgtcttaaaatttcttatactcttagtgtcccaacaaatgatattttaggaatttctcagtatttcagatgagatttatttttatatttgtaatagttggaaatgtggcttattttctgtagtgtacattttaatttgcttttcagtttttaaagttttttcttaactagatctcttttgaacctagaaagatgtgttaaacactcccacaaaataatacatgtttctcatgcataagcgattcatgatgactgtgtgtttatggtagatattttcatctttgatcttcagtactccctcttttattattatctctttttttccatgtattattgtaagagaacttttcaagtttgtcgtctacatcagtgacaatttttctacaattttatgcaaattttaattttgttaatgcatttttagttttcttacaatatttcctattacatccatctgcttttacatctcttcacaaatcttttgtgttgacacctattttatagaaatattctattttatataactgtcaaatgtgatgttttctagactccacttgtattttttatagggtgaaaatgtttttcaaagtataatttccctctgaattatgagtacatatttccctatattttattgtgcagatttttttctcactacacagtttttaacatgttaaactttaggacgctgcaaatctgcctttcttaatatattctgtgatgttgaggctaactacatatattttgtaaagaggtatgctggtctccatgtcagcctctaccaataggaggcgctggagggagagtagaaggctagaggaggaagaacttggcctttcctgttcttgttatcatcactctggtaacatcagtcttttccagtttttagttttgtctacattcctaaaattaacctccttggagataacagccccagtctgctggtgtctcttcctcatcacgtctctctgagcttacaggctctggaaacccaaccgcttccctgtttccccagccgtggggatggtagctgtttccatccgactgttcatgggtgcttcttctcaagtctaaagccagaggactgtaaatgtatgttgtttaagccacacatccaaccatactggttcaggaaggcagcggtcttccagtagttagttagctttctaaaaactccctttaaaaatgagactttagaaagaggatgacaaatcctgaggactcgtgtcttaagcaaattttctgtctagatatttattataaacctaattgcatctgataagtgctgtgtatgtcatactctatcaaaggtaaaagggttattaaagtaacctgcactttttagagcaatggtggatggccttgcagaaggcacatggcctttatcagtcaactcactgtggggaagctggagaaataaagttcaggtgagagtaagccgacagttctggtgtgattttcttgggaggataacgtataatgtaggtagcaaacacatgggagaaagaaggttttgcattatgagatttgacttaatgtgtacagtttgcttttggtgttgtaaagcagtaaagaggcttattgacatctctattgaaggtcattgcagtgcatgaaatgtaaatcaaagtgttattctttattagaagctagaagataacatttacataacatgcttttaaggtaatgagttaagttcattattttttattactataactgtttgaagaaagttattttcatgctaaaaatactcctacttgaatccgatttgtcataatttttgcatgatgtataatctattgttaggaaacgataattccatttatttttgtttctgggggaaaattgttagacagctgtttcagtctttccaaataaactcgcttccagaattcctagtaagtagcaatgctggttgataggaatgtcaccatttttctgacccccctcagccttatcacaaagacatagtgcagaagccatataagaaatttgagaaaaggaaaagataccaaggcctaggtatttcacaaactggataattagactctgaattgcgacgaataggctgaaagaaaaaaatgtcacaagcctatagtggcttaaggaacactgatttcacagtgaaatctttctacataaattttatggttaactggtaataggaataaaactgtggagcaatgtcagacaattctgttatgattcctgcctaatgaatggcaggctttcccttggtattttctccttaacctgcccattgccctttctgtatgatcacattttctttaaccagttctttgctcataaataaagccgtgtgttccggttcaaaagttgcatcttcatttataaattcacagaatatgtttttcagggaaaaatgtaactcaatcagctttgcatggtttacataatgtgatagtctcatatttactatgtggttaacaagaaataactgttaccaacaaaaatcagagaatttaaaaacaacgaacattttgcttgggagcctatgtatatctctatataaatacatatagacatctataaacatcatcgatccttcccatgtgcacatgccatatatatgtggatgtgggatgatacttgtttttatatatacatatctatatttatatagctgaagaagtgaaacatattgctttttatttaagtgactcaatgcgtttatagacaagctttattttacagtactttatcaatgccgagatgataagatactgctttgatttggtcttctaaaggtcaaaatttgaaagaataaattgattcctagagacattcttatgctatcattggccttatattgaacagagaatttctaggaaaattattattcctcaatggaaataaaaattcattttaggtagcttaatcaatttgaattattcatttatggcattgctttcaattgttgatgagtgtatttgtgtactgggtgtggggaggtcttcaggggatgggaaggtggagggatgagaagattcttatagcactaaactgaattttcaattccctgctaaagtgtgaagaaagaagtgaagtgcttcattttcttctttttagaatcatttagcaaccacagttcgtactttatattttttatggagtactttcaacaacttgcttttgcagttgggaaatgacacttacctggattttcttgggttctttattcatgacatcaatgaagactactgctaatgaaccatagatgaagttacacatatgctaagcagggaaatgcaggaagaatgtgaaggtcctagagtatctcaattcagcatgtaagtgagttgtgtgcacagtagcacagttctgtcttatggctggtcaatgctccatattatgaatttacataggctttattttaggctctgaaataattatttttattatatttctcaaatttgccaaagtatctctgagagagattcagatcccatctgtttgacagctgaggaaatggggacagttggtacaatggtttctcaacattagaacacatctttttttttttttttctttttttgagacggggtctcactctgttgcccatgctgaagtgcagtggtaccatcagggcacactgcagccttgacctgcctggcttaagcaatcctcctacctcagcctcctgagtagctgggaatacaggtgtgggccaccatgcatggctaatttttgtatttttttgtagagacatggtttcacaatgttgcccaggctggtctcgaactcccaggctcaagtgatctgcatgccttgggcctcccaaagttttgggattaaggcatgagccagcacgcctggccagaacatgtcttaactttttaagattcatgatcctgttgggagtcttatgttgttgctaatgttgcttatgtaatttactttcataatgtcctgtttccacctatttttccctctttgtgctgaagactattgaagagcattgactagtgacattcagataatagtctggtgagtttgggttgaatgttcttttttgtgtggcatgcttggatatgtgtaaatatgtaagaatatagggaactaaatcttacttttcaagatgctatcgtgacacctctgcttgttaaagtgttggataattgtgagaaaacacacaaaaaaatacaaggaccccgtcacacttctttattctctttcagattttatacacttaaacagatttacagcaaaaaatcctccaatgactttttaaaaacactgttatgttactgataaactgatttttgtctgtgtcccttcgtatatattcacacaattttcatatttctgggttattcatccttgcttcacatgtgttatctcacggttaaaaaaatttttgttggatgatcaaaagcaattaaaacattcttattcagtgcttacatacttttgtgttctttttctgtgtcattttttcatatacagaatatgttttccaatagtttacattctgaattttttaatgaccagtgttaaactgttagacttaccatcatttacttaagtctctcctacatatttggtgattttggttatttctgtatctttgcacacgttttttcatttttgtttctattttctaatatgcagtttttatagcttcttgatagagtctttgaaattttgtttctgtgaaattgtgtagtttcatagaactaaatttgctctacttaactgtacctgatgaattcatattagctataaatatttaaacattttatataacagacagcaaatcatcatattgctgggaatgtaaggaagataaactccatgcattctagaagtcattagagattttgcatataaagaccacagctagtttcaagatctaaatcttgaagcaggcattcaaggtgtttcaataagtacttaacggtaggccattaattcatgtaatcatttaggataaatgatgggcagaaaagttactgtgcaaaaagtattatttggagaataatggatatatgaaaacttacataaatgattatttattgtaatttttgttactttcaatttcttggtcatggcaaaaattgaaatgcaaggtcaaacagaagagagatggagaaagctctaaccagcaagggcctggactctcacacttccctgattggagctgctgtgtgtgtctgaggagtcaccattgctttactgcttatacctaaacagaagtatatgtagctttgcttgcactgaggatgtttataaatcctctgggttttacatttgatttactttcttcctcagccttcccatctcatttgaagacacctttagttttttcatttctcagacttaacctctagggaattattcatatctccattttctcttatattgtacatttaaagtcttcctaaatgttgttagcttatatttattatctatcgctgcatagcaaacattccccaaacttagtgatttaaaacaataaccattttattggcacacaaatctgtatgtagtttacctgcttggactgagctcagccagttggttctcttgttgatgtcaatggtggtcactcatgaggatacagtctgatggcgggtggacaggagggcctggttggtttagggagccatcaactgaattggctcacttctgttccatgtggtttaggcctccagaggatagctcagggttcttcacatcatggtagaaaatcacccagccgcacaaaagagcaagatcaaatgagtaagcactttttaagtctctgcttacatcatgcttgcagatactccattggtcaaagcgtgtcatgtggcatagtccagtatcagggtgctaagaaactccacaaaatcatgggtgaaggatggtgttattcattaggagctcttattataaccgtttcccacaaggttctgacttttaagaattcaaccacttttcctaacctctgttgctaggactttgtagcactctggtaatagtctgctaactggactgcctgctttagcccttgaccttagtctgttttttaatggagcagtgatctttaaaacataattcagatgttattcctcctcttctcagaacacttcattgaccttacaccttatttagttaaagccaaagaccttaaaatggtatgtggcttccctggtacctctgtgatatcatttgctttctctcccactctacaccagccacactctttcttagtgttctgcaaatgcaccatgcaagctcccacctcagggtcttcacatttgttatcctttctgttaggaacacttgactcaggttctccatagttgggtccttcatctctctcttcactcaaatgtcatatcagaaagccttccctgaccacactcttgaagattacagtcatttcctcttctaatgctcaccatcgtgtttcctacttagtttttctccatccaggcctccggatcactctccatcctgctctgtgtctcaagaggctaaccttctacagttgcataatcagactgcctttctctcgttctctcagtcttctggttgggttcacctaatgggaagctgtagctttcccttcattttgcttataaacctttaaaaaaaaacccaaaaaaccagacagtatattattttagatttagataagaccaaactaagatttagtgagcattttccatgaaccaatttctgtgctttcagatatgtcatagaaaaagttaagtgaactgtcatccctgtttaagagtcagggatactgaggttgaggttaaatgacttgttcaaggtaacagttagaaaataaacaaacaagacttccaaactcatgtccagtcatcttttccatctacagccctgtctccgtaagtcatcactgaatgatcgctgttacacacacctttggaatttgtcttttatcacatacacaccaccaccaccattttctggaaacttcttttaaacccaatctgactttttaatcaagtctatatttgctagtctcaatagctgttaccttcatcctcttacatctaagggcatgttcaccaggagtctttctccggaatcaccaacctcctcttctctcctgactcttcagcattttaatatgctcatttctcctatcttaaaattaaagatggatttttaaatttaaagatgaatttaaatacgcccacccccctccaaattttgagactaacttttctcttcattttgttctgtccttttcaagccaagttttctcacacgacattctgtatataatgtgccatgatctggcttctttccacaacactctctgaagattccacctcaaaacgtcatcagtagcatgtgtgattggctttgacctttctactgctttacctctttgaagcgttggactttggaacacagccttcttctatacctcctactctctttcaaaactcagctcatgtctacctcttcatgggagtttttcttaacacagaagactgatctgattgtccctccagcttgtcctcttgtatgctggggcatatgccagcaatcacagctgctgagatgcttagtcttcctgacggaactgtagtttttggagtggtcaggatcatgtcttcagaacttgcaccccagccatgtgtctgcacgtagttcagtgaccagaacatagtcaacactcagtacatgcctgatgaatgaacaaatgagtgtgaccatacttaacttggtgaggccatttttttccgtgagttttatactctgggttgttttcctaccttggattctctgacttttttctctctcatctacttgcctgactttcttaggtcttttaactttgtttctccatctttacattaagtgttgggatacagggctgaacaagaacaggtaactgtcttatggctttacgtttatgtgttttcctctgaaattaggcaaatttcctaatcttgctgaagttattttcatccttaagaaagtaatattataggtctttatagagtggggcaggatcaaatgagcatgtttattaattgcttagcattatgcctggcacaaattcaattaccattatatggtaataattttaatagtaataaaccatatattacacatgtattattcataatcagatgatgtatgcattatataaaaattgtactattctataaatattgtaaaaaaagagtaaataatatacatcaattgctttgtgcatccatatatttttacgtgtgctccttttattaaatcatatgtttttcctcagtttattggttgctttttacttaccaaaagcttctgtccaaaaaaaatcaaatgctgcggctgccctgagcagagttcaccttggaagaggctttaattgtgatgaacctgtaagaacaaagtttaagaattgagataatcagcagctgtgtatttctttaaatttttatatttaatgatttatttgaattaactgttaccacgtttacatcttctagattagtttttaggcctttacttttccttggctgtgggtactgaccagcatggtggtaggtatgattggggtgtgtgtgtgtgtgtgtgtgtgtgtgtgtgtgtgtgcatggatagatgtgtgtgtatgctcatggatgtgcatgtgcatgcatgaatgcataatatttcaaacacatgctcagtgattgagtcactgtcaggaagtaaacttggagaccatgttgctcgatgccacaatagtcctgttattgcattgtcaccacaggatgccattaaaataggtatgaagaatgtcagtgttcattaatttggttctcttcagagaacattagccatggggaaaagatacagtagaaatctgagaagagatggaagataggagagaaacctggcttttgaagaatgatctttgatctttcagaagaggaatacatgtcaagagcttatctatgtgaaagaatttacatgcaaagcaaatcaagaacatagattttgcttatctttatagattatagtttcatcttagatggcaaagaaaagccaggcttctctatacaaagggatttgcatgtttatgataactcaattagccttaacagagactaccagtatatgctggctgtctggcctcaaactttaatgcatatgtattttcaaagagaactaaaagattttgggattgtaacacagagaaagaagagatagagaattatcaaacattggggatcagctttaaaattataaaacaaattatatatgttctgaaaaattacttcaggaataagcagcttttttttaaatatgagaaagcaaaatcatatcctgtatgccattaaaggttattgcgttttccaaatttatagttgcaagtgatggaaattttctttaacaaactgaaggatgcatttgtagtctaaatggtagctttgagagtagttagatatttatggaaaaattataagaagcaatgtgcttttaaaatttttttttcaaaaatagatattggttaggaaaactacactctttcactatttggtaatgcatattctgactcattcacacagtcattgtggcacctaaagtgttgcaaaattagacatttatatggagatgggctattgatgtaaaaaaaaaaaaaagctgagggctaggaatgataagacatgagtagagggttttaaaaatgagctctttgttttccactcttcatcatgcctagatctcagagaggttttgtccagtgagaataaagaacccatgggaattatgcagaaatcactgtccagtaaaaggaatagttttccttcagtgaccaagggtgggacctgaagtcagcactagtcagtgacgctgttttatcgtcttcatgccaggtgaagatttgcataggtgaaatgcccacttattaggagaattacaccctgacagaaatccaaaagatggtgcccctttatcttctatcaggggatttcatctaatactagaaggagcagtaagataccatgagtttgttaccagttattcactggcctgatcctgaaggtcattgcctttcttcagtgttatttgctcagtatcctgcctgctacccttaagcacttactttgcctattgaaatcttactagctattcattcagaagtaccagtatttctttcaaggttgatcttatgatgctactgtattttttcttgccttttaattatttttttaactttttattttgaaaaatttttaaacacatgcaatgtatacacagtagtagaataatcttctgtgtcaccatcatacagtttcaatatttaccagcattctgccttcttggctcatctatatataccactcccactcgattttgataaattcttaataatagactatgagatccttgaaatttgaaactataattaaatatctgtctatagacaccatacacatatatatacagctatatatgcacatacacacatatatgcatagacacacacacctacccctttattttattttttattaaaatgtaacgtatcctcattgtggagatagccaatgttaatattttgattactgtgtagattctatcttccattggtttttaaaaacataacatgaaatttgtttattgcttttaaacttcatattttaccatgaatattttccaatgtccttgaatgttttgaaagtgtgatttttaaaggcagcgtaatattccatcacatggatcttccataatttattttaagagtttgcaactgttgaccacatcttaaactccttgcacataaacacttgtctgcatttgcaaggatgttattaggatagtttcctagggaattattaggtgaaaggctctttatgtatcttgccaagttgctatctaggaaggctgtgccaatttgtattatttttatcttattaacgtggtagtcgacatagtatctggttgtgttcttttagaaattggcattttctggattaatgacactgaacgtttttcatgttcatgattcttattacatgtgtaaaataaggtgttatctggaattgtagtgaatggtacatgccatttagtttagctccaaatctagtgctttgcagcaatgattaattatttttagtatttcacaaatcagtttttgctgtctttggaccagaatgtctgcctaagtgcaagttacattagttgagagttggtcttattttactttttgagtattattttaaaaaattgtcactgtgtataattttctccctttatgtcatgtaactttattgagaaatgcaattcaatcaggaataatttagtttaggtaaaacttctttgtccaagaaatatactgtcaggtccaaatacattttaagttttgaaaaaaatatttatttagataaaaatttgtaatcactcagggtatttgactggatttgaagcataatttacttccagaatgaatttagaactctgttgttaaagtacttggtacaatttgtatatccagtaaaataaaagttgccatttttgcaagtcagtgttttaatgctgatttggtacttttgctatgtgaaattccccatactccagtataggaactgaatgaaaacatataccttattaaaatagtagaggtaagtattttcagcttcctaaacagcagagaatgcttttttttttttttttttttttaaacttttggaattactctattacctacatctaagttgcaaatccaaaaataaaactaggattttattaacatattctgcccttcattgcttccggttatactttgctgaactgtgttcgagtatgttgaaaaataattccgtgtattgtgtgttgaaaatgatattaaaagtatatgtgttatgtggaagaaacaatcaaaacagacctactcagacatcaacaggatattattaccccaaagaaatgacgacagtttgccagcttgatgcgtaaaggaaggaaatttacaaacatctccaagagaggcatgttgaacggttgaaggaaatgaggcacgtcctgcttttattgtgcttattgcagtgggattcccagaagactgaacaaggctgtcctgagacctctgtttggcagagatcttgttgattcatattttatttttgtttcagaaaaggtctgctattgttcaaatttctaatgtagctcataaacacacagccagtatcatttccccttctactgactgatatatacaaataaattaaaatctacggtcatcattaactcatgttctgtttccatggagcacaggagagtaacaaggaaggccccttaaaagaaaggccttttaaagtggaggtctcagttcacaaactttaaaagtttacgaagtagtattttagaattttaatcaccagatatattgggggaatttattacttcctattcatatggaagaggacagcagaggtaaatatttatgtaacttgtattttaaaagcttactcttgattaaaatgtttgatctatcgacttctgtatccttagaagtttgaattgctggacatatttgactggggtttttacaaaggcttctaggttgaaatgcatggttcaggattttggtttcaaatttctgtcaggttggacacatataaatgagaaagtaatgtggaatattataaacatttctgcttttttaagctctaacttttttttgctatctctaccaaaatgcctgaaaatgtcatgactctttagacggagaaatagaggaatggaaaccattctggatcctctgctgtgactcagtcagtctaaggggcagactgagcgctatatctggagttttactttatgaatgtgcacctttaaccttgagtcagaaaatgtggttactgtcagtcttactcagtaagtggtgctgcatagaacatcagggggagacttggccttggtttagtagaaacttgaaggagacaaacatgaaaagcagtgtcagaaaatggaagaccagtgttaaaaatctttggttttgctttcatttctcttggttatttcttaggattattgctttagatcattttcccaggcattttcatggatgaagaattccaaagaaagttattatttcaactcttgaaagctacgcttcagggtgaaggtagggcttgattatcaaaggaatttccctggctgcagtcctaacagtttaacttcctgtgatttccccccgcccctttccctttatttttggctcagaacttcagtaatgtctggattgatggaattcctctgggaggcagatttgagggtctaaaggtgcttctcaataaagattttgaggaatgatattaacttattagaggcaaccctctattgttttagtataaaggggatgagatttgggggaatcattttggatgtcacattaagccactagccattttactcttgatgaccttagttgcctttaaactgtatttttagtggggatcattctttcaacagtccattcttttttaaacgcaatttggtttataattctgggggctgcctctacatgctgtactgtcaagagagacatcaaatattttctgagtagttttcaacacagtgaattaaagctgaaaaaacaagtagcgatactaccagcatcttaactgagtatgtggtggtggtgtttgagtgtttgtgtgtgtgtgtgtgtgtgtctgtctgtgtgagtgttttatgttgctgtacctacttgcttttaggtagctacagttttaccagagaagagaataacttagattatatcaaagtttttttttatataatggtttaaaaacctgccctgtgtctagtactcctttacgaagtccgcaagacttggggataacagtggacaataatgttccttaaggacttacagaaataagacacacacagatatatttaaattccaattaatctgatttttagtgtggattattgaagggctaggaacttagactcagaaatggagtatttttcctgtttaaaatgtaaagagatttaataacatacaggagtcttgctatgatttttgagaggagatttactctaatgtttcagataatctgtttaacagttaataaaaatacgatttacattttgtttggattttttaaagtcagcacataatttctaaaagtaagcaaatttcttgcagggatggtgaaatgaaaccttgtagcatttagcgtgtattgcggttttgttatttgcagtttgttattaagtgttcctaggaataaaaggaggtgcacagcaacaatgtttactgtgccgatttctggtattttataattaaagagcaagtgtgagctgggaagggtgggctggaaagcatggattctggctctaaatctcagctcgaccacttactacctgtaacctggggcaacacagttatttaatttctctgtaaaatgaggataatacaagtccctgcttcattgggctatgagaattaaatgagtgaatgcatctaacattgagaacagtgttcagcccatagtaactgctcagtgagtatttttaagctattagcatgatcaaatttagagaggagaaatataatggagcagtttctcagttcttgttagaaataatcattacatttgaaaatccaacaaaatattaacattcaaaacccattttcagaagtggtggtggtagaattgctataacggaggaaaatttaggaatggcagcctggttaaaagaaagggcgggtagacctggagtaggttatagatcaatttaaagcagcaaagttttctaaaggtgcttctagttttactttaaatgagtttgcagttgcacatatcaaataataaggtgttatttgccagaggcattttgttggtggggggtgggagaaagttttggggtatattgtgtgtgttgggggtacatttccccggctgcctttttccactgctgctggtcctctggtcaggaagcctccctgtcccgcactggttctgttatttgttcttggatagcatcaacttgaggatgagactttataggcaacacattagcctcagtgtctcctcctggttgtagtcatttcccggttacatgggtcagtttctccaccttacttgagtgaatgcctagaaaggctatttcagcctagagaatttttaggggaatggagaagctgagggtaactcctcagcaccaacacttgaacccaatcaatacttgatagattactcccagcacacacaatacacccagaaatcttctccccaatccacacccaattaagtttcagccaaggttagaattcagtggttccctctgtgtgtgtccccttagctgttgctgttcaggtgcaaaggtgttcatttctttgtctacccatgtgtagttgcctgatatccaactaaactgcatcaaaatatggaacccctaggtaggcaaaaaagataattagaatacagtagtccccccgccccccttatctgtagtttcattttctctagttttagttactgtccatcagctgtggtccaaaaatattaaatggaaaattccagaaataactcctaagttctaaattgctcgccatttgatgaaatctgcactgtcctttgccatctcatccgggacatgaatccttactttgtccagcagattcacactccagacactccctgcctataagtcacctctaggttttcagattgactgttactatggcagtgctcaggttctagtcacccttttttgacttaactatggccccaaagcacaaaagtagtgaatctggcaattcagatatgccaaaagaaagccatgaagtgcatcctataagttacaagggcaaagttccccacttaagaaaaggccaggcctggtggctcatgcctgtaatcccagcactttgggaggccaaggcgggcggatcacctgaggtcaagagatcgagaccagcctggccaacatggtgaaaccccatctctactaaaaatacaaaaattagccagacgtggtggtggacgcctgtaatcccagctacttgggaggctgaggcaggagaattgcttgagtctgagaggcggaggttgcagtgagccaagattgtgccactgcactccagcctcagtgacagagcaagcctccatctcaaaaaaaaaaaaagaaaaaaaaaagaaagatcatatgctgaggttgcagtatattataattgttctatgttactcttagttattgttgtcagtctctcactgtgcctgatttatgaactaactttatcataggtatatatgcataggaaaaatcatagcgtatatagaattttgtgctatctgaggtttcaggcatctgctggagatcttaaaacctatccctctcttagagtgagtactgtgattatgtttaaataaatgaatgcatgcttgcttgtggaaatatttttgtgtgtggggtatgtatatgtgtgtgtgtgtgtgttgcatgtggacattttaatgtgtgtgtattatcctagctgatggttttcctttggacatttgggttcattttgtagaaagaaaatgcagttttagaatcaggaagctgattggatgattccatctgaatatatgtgtgtgtataaataaaatatattatcaaaagcctgacttgacttgggaactgggaagtagcagcctcaggtcctcctaggtttattggagttacacttattagtaagtagcctaatcctctctgcaaagagaggaagtacagttttatgatagaatcacgtgggatgaggatcattgaaccagagagaaactgctgctgtttgatttccactgcaggtcatcagtatttcttgatctagaacaatgataaaaagtgttctggtctttaagcaaaactcagatttaggctttatccttagaatctgatctttaaaactggaagcacaagctttccagctttgaattcactccatttcagagatgaagaaaccatttctcaaagaggtgtctctgttgaggtttcacagtgaacaagtcaggtcagctgaatccaggtctagtgttatttcctgcaaatacattttatttttcatttttgcagtaatctttagattaaacccactcctatactgttggattagttaggcacatggactgggtgtatgtttcccagatttgaaggttggttctccatgtcatagttatttgttctggttgctttttttttttttttttttgagacggagtctcgctctgtcgcccaggctggagtgcagtggcgggatctcggctcactgcaagctccgcctcccgggttcacgccattctcctgcctcagccccccaagtagctgggactacaggcgcccgccactacgcccggctaattttttgtatttttagtagagacggggtttcaccgttttagccgggatggtctcgatctcctgacctcgtgatccgcccgcctcggcctcccaaagtgctgggattacaggcgtgagccaccgcgcccggcccggttgctattttttctcagttttcttatctgtacagtggcggtagttatttcatagaatcatactgaggactaaataagttatttcttgtaaattacttacatgagtacccagcataagtgttagctataataattattatgttattaatgattatgtcattattatgtattgttgatagtaatataataatatattgctttttagacactttagttagctatccagcatatgacaataaaaaggtggctctattgaagagaaggattccataattttcttgtgaaattagcgccataaatcattgaacatcttgcttcagttttgtgtgaattatttggattgactaagtactcttggtactgggctgagttaccatctgctgtgttttgcttccataggtcaggcttattctcctagggaatggtgaggtggaaaaaaatgccaataacctaaccccaaaatgtatcctaactgtcttgttcacatttataggacagttttattgctgtaggtaagacggataactgggcactattccagcatcttggcagttttccttttttcaaggtactaatattaggattagcatgttgttttaaagccattgcctttctgcaccttataattgcttgttcttgggggagggttggaacatttgaattacggtttttctgccaaatatgggagaggttgtctgttttgttttaatacttcgattggtttttaaagttggtactacagtccattttgccaacagacaacacaaattagaggcagtgtgggcacactgtgtatggggcagatgcagagaggggcagcgaatatgcatgagcgagaatgttatagctctgtcagtttttgtatgtgtgcctcagtttatttttggtattgataccaatgttcggcaatacagtgatttgcctcctctattttgtttctaaatcaaagccttggcagattaaaatgactaggaaaagattaaattgttaatggtataatcatatttttctctaaagcattgaagaattacagtgtctatacttattagcatgtgataactttagtgattgaaatgtttagctagttttactcaaatattagtaggatttctaattttcataggagagcctagtgccacaaaagttactggtaactagcactcttcagttttcatcttcatgtaactgttgtgagcattcaaggaaggagctgggaaatggtttagtcttcatagatgctcaacagatgtgagttctcttttctcccatgtatacgtttcttatctttttgtagagttcatgggagcagcatttatggattcagacttatattgttgacaatgtccttgctacctgatagatgatcagtaagtgttgcagaacgaatacatatgagagcagcagagataggagtacattagggcaattagaatagattcctttttttgtttgttttttgagacagagtctgttgcccaggctggagtgaggtggatcggtctcactgcaacttctgcctcctgggttcaagcgattcttgtgcctcagcctcctcagtagcgggactacaggcatgtgccaccacacctggctaatttttatatttttagtagagatggagtttcatcacgttggccaggctggtctcgaattcctggcctcaagtgatccgtccacctcggcctcccaaagtgctgggattacaggtatgagccacagtgcccggccattagaatagatttcaaagaaaagttgactgtgccaatctctgctccctcctgtatgttgttaagtctacagggccatattgcctaaagaaacggagttccccaagaatgtgttaggaataacaaaaattctgtactttgacctgaaaattgcggttcttgagctggttatttttctaggtattgttggaagttatgagtcagagttaggtacttattcgtggataacacaaggacttctgtcagagatctggatgctgtcagtagaatctctgtttaccctcttgggctcagtttattcatctattctatgaggaggagtatgcctgtttggccttcctcttaggttgcttttgagaatgaatgaaataatatgtgaaaattctgttcataagtgtagaagatggctagtgatgatgatgatgatgatgatgaaattgatgatgcccaaaatatggagaatctagactgaatttatggctttctaacttcgaattttcggctttctaacttcgaattttcaggaatgcatgatgatagaatgtttttatttctgatatccactgcattgtttctatagaccttcaaagtttgacacaaataactaaattattttgttttgttggtgaggatcacttttattttagcggtgtatcctgttaaaataaccttgcatgaggattctcaaagttatactaatgttgcactagtaactaaggcagttccaaaaagagacatttagaatgaataaggataaatcaaaagtaattcatatccattggtaaggaggtggcacataccaagtgtcaactgtagatattttagaaattgaagtgttaccatggaatcaaagtattccactgtaaggttgaatatctcaggatacctactttaagtcgtcgattaagatgaagttaatattcattttacatatcctgcttgaaacctcttatgctgtgaaattttcctgtctattaagaatagttttagaaaaatgaattagctaattccttaacttgtatgtaacttgaatataagttcctttccttaacttgtgtgaaaatcagttctcctttgtgaagagcatgagagatacctcaataaaatagtaattttatattgacatcggttgcagtttcaaagtcagagttttacacttatgtgcccctatattgtctagctttgtaatccccactttaaaaggcatcccaaaatagcaacagaagaataaattgtgacttgggtgtattagatttgtatgatcttgtttattgagctgctttgttatgtagttaccaaggatgatgtaagcttctcatccaagttttcctttactatgctgcattgtcctttaaatgtcatgagaatacaaatattttcaaggtagcagtgaggaacaatctagatgagatgaccaaaaggacctctcatatgaaactgcagtgagcaaaggtttattggtctttggatctctaaatagagtgactttagatatctaaatttagtgaaaaccagaattcagtgactttagatttcagaccataaggggttgtaacacctactccttttctctgtaatgaagaaaaatgaccacaacaatgtggtggatatcagaaatagaaacttttcatcgtcatgcattcctggaaattccaggttagaaaggcataaaagagagagaaaacctgtcatagttagtatatctaccttggttagtgtttttcacttaggggattgcaaattcatatgagaattgctgagagaaacaattaatttagaacaaatattctccttccattgttacagcctgtaaaatgttacttctgagttgctacttatctatcaccatttctctttctccacttcattgttagtgtttgtatgattagggtgggcgggggtcttctggatggggttgctcacactccacaaagccttttccctcttctgttgaaagaagacacagctgaaatcagtctctttgccttttcatgatatggggatgcggtggaatcaaagcaggcaggatgaaagcccaaaagcttcctgtttccagctgttttcttcagcgaaggttttttttttttctcccaaagatgatgcttcctttcaaggggtttttaatctgctaactgtttcctcagtttatttcactacagtaaaatgtgttccctttaggtcatatctgtctcttttaaaacccaacctgtccttttcagccgtgttagttgctactcaaaagaacaaacgtgatttataaaagtccttttaatgaggtacaaagaccaataaacctttgccactagagtttcatcttttcagttgctttattttcatttatgaaaaatttgagatgtcaaaaagccattgagaacactattgatttgaccatttaatatttgtaaacaaagccgttaaaaataaaatatattgttatggccttaaggttggttgtggtttttttttcccttccgaatgcagtataatcatatgtaatttgtttaatgtaaattctttaaaattaaggcactggaaactgcataaatgctaaaatgaatactaagagtggcttgatttattaagtgataatgtgcatgaaaatatggcttttttgcactgatgtttattgcttcactttttgcattgatgttgttttggaatttacatttctaaattctgcatcctctagggataaatgaaatataaaaatgaattcttttaatcactcattaaacattaactagacctttcacccatttcctagatcttccagggttctcagtaataatcatcatcattatacattgatttataaaggaatatcagagtgagtcagaatttttctgtttctttatcacttgtctttccccaaatatccatactgacctaaacgtaggagaatttatcagcaagaaggttcacattgctgccctgttatttgagctcattctttgtgatataatgaagccagtggcatatgggggagaaccacctcatttcattttcactttaatgctaactctaacatatgcttttgaattgaagtggggtcccaaatgccaatatatgttaaaagaattaaacactttgaaaaaagagaaagttttcccttatttactcctgttgcccactctcttgagggtgagaggctgatagcgcttaaaaacatgagcatgcctattttatctgtactgtttaatagagagctatgaaaaaaatggcaattaacatattcagacagaaaatcatcctggctgaatgactcattaaatagtcgtataaacaggatgtgccgaaatgaactggttcagaatttagttccattggtcttttcagcacacactgctcattatcagcactttaagaagcagacttgtgggtgcttagaggacacttaaatttcttttctctttatttttttcttaaatacttctcccctcctccactcctttcccctgctattcctaattctttgcaggctaagattactcgtctaaacatgaaacattctgttggcaatcgagttaggggtaagagcttctgactttcatccaggtcggtggtcctaaccccagatgacaatcaaaatgtatttgaagatttttttttttggagacaaagtctccctctgtcgcccaggctggagtgcaatggcacaatcttggctcactgtagcctcagcctcccaggttcaagcaattctcctgcctcagcctccgagtagctgggattacaggcgtataccaccatgcctggctaatttttgtatttttagtagagatggggtttcaccatgttggccaggctggtctcaaactcctgaccttgtgtgatccgcctgcctcagcctcccaaagtgctgggattacaggcgtgagccactgtgcctggccatgtttttaaaatatgcagacattgctgaacctcatttttttgggcttcccattcagtaggtctagaggcaaggcctggtagtccgtattttaataaaagctcccagtaggattcagatagccagccgggcttggaaactattcactgatttgtgtcccctcacagtaaaaatgctctttccccaggtacaggatatatggccatctggcctggatatcagtggtttgcagacctggctgcaaattagaatcacttggggagcttggagaataaatactgatgtttgaccccacccccaattaaattgttggtggggggagtagttaaaacctccccagttgattctaatgtacagtcaagttagagtacttctgtcctacataaacagatggagctaggtttagctgaaaaagtctagttttcttttagaatatgctttaccctgtgctaaaactcctctgttactgtgcctccctagccacacacacagagcttaaacgtattgcctctactaaggctttcacatttattggtaccctgttctcaggtgggagtagaatgctaggctctcacgttgtatcagattcctgtttcttcctacctgagtatcacatctgtgatgtgcagatgtgttggtatagcatgagcaccccacaaaggctaagtaataaggatgaagaacaaaattgcagtttagcaaaggaaggagcatccatcttttgagtccctgtatactccaagaaaaattctgagtaaacaagtttcttctttagcaagttgtgatattaaatgggtgcctttcattacattggctaacatttgcatttcttggacctgttctggaaaagggtctgagatgaacccatcgttgaagatctaaaaaacaaaaactttcaccatgtcaagggaaagaggaaagatttccataagtgtaatcttgtattctggatggtacatgaaaactctacttcctaactgcccacagggatttaaggggtattttaaggggtacttacaaataaaaggaagaagatacattacatcacattctcattaccaaggagaaactcatcctctctaggaaaggtttctctcctgtcttacgtgtgactttccacctgctaagtccccttgaagttactgagcaaagacactcttacaacactaagccattggtgctagaagtggaagtagacggagcccctgaggttcaggtgccaggtccttgtatctctgatggcgtgggaaacaaaagtcagcagccatttctcttcactagagactcagaggaggtaaaaaggggggattcacgaagtcatcttgatttttccgtatcttatggcgaagtcttgtggtagaccccagaaccctgatggttggtctcacgctcgtaagtttacataaggctttctcaagaaactgacatccagagcgcttgccttagagaagacagctgaccatggtcatgacactggcaggtgttaggactggctggtctactctggtatggcagaaaccctgggcccctgaataagggaggtgattatgctttaaagtctaggcttaccatgtgtagggctgtgggactcactgtcagggttgtgtaaggcgagggccatcgcttgcagaagtctgagtgtgtgagcacccccttaaatattgcccccaggtgctgtacttgcttaaccccggacccagccctggcagggagcaacagcaggagggaaaaccattggtaatttaggtcttcacatcttatgcttcatttaatgtggttgataaagagcctccttgtaaaaatatcttggtgtagactcccagggaaggaaacacttgtgtgactgacaagctggcagtgcccatggccacgtgtgtcaccctggtggaggataatcgtcctattattttttgtcagtaggtataacaagtgggtagtgctttgtgtattccactgtgatgaattaattttgtgttcattgtagtagcactgatcataatgaattaatttggtattcatgtggatgtcagaggtttttttttccccttccaatttcatgtagctttagttaatggatactttaaagtacagtacatctgatctgatttctgttctctcattcacttctcataattttccccccgctggatattgtgaggtcttctgtttttaaaacatttaacttgatctttaaataattaatgttttaatagctttacatgaactcaaacattcctcctgcttttaatttataaaataaggaaaataaggtaaatagttataacaaatataactgctaggttgaatgatatacttaataacttgtatattttagtttggtttaaaaagatctgaactaatcatttgtaatttgtagccttattgaagacaaatattgtatccccttatgcaaatatgaaataatgaaaactgcatgccgtatataatagtttgctcttcttttaatttcttctctctttccctcatagacaagattgataaatgtatgtgcatatattatttatctgttcatataaggacatgtaattgactattagatatggtaattgcataaatatatcttattcaagctcatttccttttctgtttataaaataaatgtttttgttaaattggaatatgtactgaaatagaagtgcctaatttaggattcagaaactaggtacacaaacaaaaatcaaacaaaattctgggaacctttgacaaacttgttctttaacctatatgtgtttaaaaaatttgttcatcatgtttgctgattattgaagatatttataatagaataagggtttccttcatcactaacacacctgctcggctgatttgctcccagtggaaatatggttgaacctttagaaagaacgatgtttttttgccttacgagtatcaggatgccatttttggtctttctttaaatttaaacttggaaatggtatcctccatatattctcttgtggctttaaactttttttttttttttttttgtaattttacagctcttgttcagtttgattctcagcagcagctgtattccattgtagactgctgtgtttcagcaattgatggatcctgtatatattctactatttagagtatataaagaagttgggactcttgcaagtggcaaggactatataactgggttactatggctttcattatttttgttattattgtgacagattgtacagtaatatgctaacaaagatttatggcatcatgcagcagtaggaaatgttgggatggaggagaaaactcatgttaaaacaaatgtctataataataagaggaaaacaaaacttcaaaaaagctgagaattgtttctagtataaatatttttattaacatttgttatggttgaagatcttgagaggaactgttcatgcatttctgcagtttagattatgctgtatgcctatttgtgcatcatcgttcttaggagattgttctttcttctggttttttttttttttagtttttttgttttactggaacacataggtattgaatatgcaatgaacagaaaatttatggagggcagagttatgagtatctgaggaaagtttaattacttttataatttagataagcttcataatttattgtaacacgctgtactttggcacaatttgtaacaattataaagcacttgaatttaggttctttacttggcagctatcaacagagttagctgtatgaaaactttaagcatttactttccttcctccgccttgcattacaggcttacgctgtagtagttttgttgctcccactttcatttgccacatctctgggttttatgtatcacagtatagtaggcttgtggctatacactaggaagcagacgaagagagaacctgaagatacctcctgatgcccaaacctaggaaagggaaaaatgcagaagaactcagacgactcttggaaatgattcttgcctcaattaaaaagacctcaccactcacctccatgtaaaggacaggtcgtgaattattcaaatgattcagaaatcaacatttaaaaaaatgaacataaattccttttcataattaaagagcggtggaaaatggctcttttcttaggtctagattatattgctgttaaaggaattgctgcctagtatacaattttttgacattgttttctacaacatcaatcttatttgttgtccttttttgtcacgcctgttaaatgtgtatttttctgtgttgatattgaaactaatgtacaaagtgtgacatctccaaaaactgatttggttgttcctaaaaacattggtccttaaaagtatatttatttgcagcccaggaatttttagcttcacatttttcttttaataactaaactgtagaacagaattagctctcataaaaccttgtacttgctgaacaactctcataattaaatgaatataatgattttatgtgacactttgaacttctaaagttctttcacatctatgtatgtttaggacaagatttaaaagttaaattattctacagttggagtagaaataagtggccaagtatccaacttttgtatctcaaataccttctttttttttttttttcccaaataccttcttatattctccaccgactttttgggctggctaagtgtgacagaaatgggaactttagttctggcttttgattctctcatgttaatgtaggtttttgataagtcacttggtgcaaaacactgaaacaacttatctattggcttaaatgagtcaacagtctgaatcaaacaggttgtgaattggttaaaataataaaccagtaaccctgtggttgagctcttgatgattaaagaaccagacctaagaatgcatttatagtcttttaaaagagagtaaagactcccacttctttgagctgtgtttctttgtgtagatttctttttttttttttttaaagaaaggcttcattatctgtttcagatctttatagatgttgcaataaggtactcctttctattagtataggattgaaaggatcaaagttaataacttgaactgagatgctttaaaataacaaaatagtttattatctctttccttttcaagatttatgttcttacaagggtacaatgttcatgattgaatgtggtcctactggtaaggcttccatgtaatagaagagtaattcccttgtctagcattctctgggttgttttaatgttgcaggtgaatgtgttctgctgtgcaaataaatgtagttctcttattcacattcctgatgacttgcatccttaaacccttttggtcagggtattattgtcctttatcctgaaaaatgtctgtgattgtagtgccctaatactataaatcaatggggactgaattcagcgcctgctaagtagagtgaggcaaccctttaaatgcaaatgcatcagggctagttttaatgtaattttaataaggctgaaaccattttgaagtagacttaaatcataatactaatcttaaaagactctctatttagctgagaagtccctttattctcactggccatttttcctctgtgtgcatccaaaccacctttcatgtgattccacagtttttcatttctttttttttttttctcaaatagaatatatgtacagtttgtggttactttattagttggagaagagcttgtattgactaaaattgcttcacttctttttcttcctggttgtacatgcctgactaatctgtgtgtgtgtgtgtgtgtgtgtgtccataatatttcaatcacattgctgtgttttggtcagagaagtaaaaatctagctgtcaatgccaactggagtagttatttaagaatataatatttaagtaggggagtatatgcaaagtaatataaaaatgaggaaaacatttacaaaatcaaatgtgacctcaagtccaatatttttcaatcttctaagtctgttggtttcaccacctcacattatttcaatgtatgtgaaatatatcttgctgtttatatttgggttgatgggacaggtgcaggatctttgacctggggaaataaattggattaaggactagcttaactagtctacagaaactgtagactacaaaaactgaaggcaagaacctactgtcacatcttttgcagagagacaaaggcattttggtatttggatattttacttgggatatgtattttgtgtatttgtgtaattttgtattaatttacacaaacttaagtaaacaatatattaataagattcatcaagtaatttataaattaactttcccacatttttctgtgttcaagaattatcaaggagatgtgtaaatattgaagcctatactatattccattatttgcttttaatgtatttcatataattcagaaaacagtaatttatcatttacattacttcccttttcctattgagccttctgaaagaataatgtagaccagcattttaaaaaaaagcttgtttcaagacatgttaatagaaattttattttcagtccattctgcattaaatattgtaaaacacccctagagagtgatattatttgtaatgattcccaaattgctttgaccagagaactccttttttcatgaaatacctcccatgtggaacattctgcagaagagttttgtgaaatgctaactcagcccaaaaggttttttaaattaaggcctttcaagttggtaatggtatttagtttcttgttttttaaaatagactttgtttaggacagttttctagggtcactgtgccactcatgctgactgtcctgtcgtcttgaaaaatactactggtaacatgtgaacagatatggaggtcctctacccgagtattttaataccaaataatagctatatcttctcagatattggtagctatgtcaatggagatgtgaaattggctctatcgatggcttttgtccattctccaagagaggcctgtctttgtgggtggaggtgttggtggatatgtgtatgtgtctccttctcttaccctcttaacagtttggtcacagtggtgaccagtgagtatagagcagagccttgacaatgcacctgactttgggctttagccagatagtatgaatgagtgaagcagatgttaaggagaggtgagtttagggcaactggggcattcgtgccccctcattcattcagttaacatttccaagaatcctgtgcagggcaaataagatctatctcaggaccagcaatatctcatccttggtatgaagataagaagtcaggagacttgagctgtaggtttggttgtctccttgcctggcaggcttgcctaatttacagcaagtagaaaataatctgtgtcttgttcaaatctaaataacaatgctttaaaggtagtgtagaatatttgttaaaaagaacatattaattatgtttttagaagcttctgtaaggaagaaagaagtttgaccccccaacttttctcttttctagaactgcaaattactgctattttaaatagactttgttgtttaactgtacatccaggaaaatctaggaaattaaagaagcatgcatataaatgattgtgtagcagaacatgaacattaaattcatacagtgaagaaattaaagttagaaatactctcaaacataagaaggttctagaatcaatcctttaagcacagtctgagacatggtatatctttgcacttacttggaccttggtttctattcctgtgatgattattggatttgatgccatctgatgtcctgttcctcagattctatgaagctgagtctgagattaacttaggtctgagattgacataaaggggaaccggtccctagatttcctcagggctgagaagttattgatttctcaagtataataggactgcacagacgcacaatttgcaccaatcggaacaaaatgtttaacaagttctgagtatagaaaacactttgcaatttgaatttctatgattccaaaattcaaaaaagctcctttttgattaaatgcactgccctcaaccacacatgctcattttctctgtctactgctttgtcattctgtttatttaactttacttggcataccagagttttaacgctgagattttaaagtacatatgcaaaattggaatgtgtcagagaacctaggaacagattcatcaaaggagtcatgaggcacattgcacatgctttaacatcaaggtgtaaacggagcccattaaactattagttaagtggtgatcaggagcaagagcctgattagattacaaaatcttctgtgtgtgagcgcggtatgtgaaaacataacacttgatcctcaccatagtgccaggaagattcaattagagaactggtatgtgcccagatttggggacataaagggcaactggattttgaaggaaagatggtaaggaaacacctgcaaaaatctgcttctctgtgcaacagactgggtaattgcatatgcagatggatagttagggatataattgcttgatttgtgaacataaatgccctttcgattgtgtcagtgttgaattttgcagtgacaggtgcctgcggattgctgtgtgtgtatcctttgcacccctgtttaaatatttggcctggagtatgtcttccattcattgtgaatggaaccaccgccgtcccgcccccatgatggtctgggggtattgttatagctcttaatgtctctccaactttttctcataaataataaccttaatttgaaaccttaactaaaagaaggactgcatagaggcatgtggtgaagggcttacgaattatgcacagaattcattttttaaagctgctggatgtaactcattagttttcattgttttctcaaaataaggaaaactattaaccaacactgcagactaatagcctggattttttttcccccataatcaactgaagtttaatggaaaatcatcttttgaaagacttccttttttctccttgctttttcttaacctttccattaatactgttccaatatcttctctaatctctctcaactaaatagcattctcagtcattccttttctatgtcaacatttctataccgcactgaagatgtttgtaaaaatactggtgcagtccaaatgggatttatttttaaattgaagaatttgttaagcacttacttatgtggaatggtcaggtcatctccgtattcctttctctggccttatggagaaagtggaggaaatggtgtctgcctttaatgaggttgctaacgtgcctgaactacacaataagttattaagtcatattttatgtgattattcagtttctttttttttttgctccattctaaatcaaactatctaaattatttttgtcaaataaaggttaatttcagcagttgttgataataaacacttgcatgtactattcatatcaacgtgtatgatactctgctaagtatagtacatcagtaatctcatttaatctgtcaaacagtatatattattcccatttcacagatgagcaaactgagctataagattaagtatattactcctgccatatagttaataaatagaaagggattggagttcagaaatatgtgcctctctagcccacgtttgttgctgttttggcatctaatttgcaaatataaataaatatatctaaataaataaaaaatatcttgaatctgcctttttaaaggagcctgccaaagagaggcaaaataaccgcagaaatcccattttgactggctttgatatgaagacttcacacaactcttattttaatttcttggtatttccttatgctttgctgctcttctgaggcacattttctcagtaagatattctttatgctttttaactaaaaatgtggggattaaattttacccacaaaaaggtttgaaaccgttctttctaattcttcatgtgtcattaaaaaagtatccgcatgtattttggtgcgtgtggagaaggagctggcactgtgtgctcaaataatgctcagaaccacctgctttgaatgtggtctgattgaatcaaatgacgactgcttttcatcaccgagccgggattgggatgtgggggaagtgttttgttttgatatttcacatgtgcttaggtgttcgtggtttcaggttgtttaagaacagactctcattgagtgttggtgagtcctgtgggggagatttgaaagcaacgttgaggatttctaggtctgtttcaaaattacatcctcttgtgtggtgcatttatttgtgttcaggatgcagattgccttgtggaaaatggcaaatcattttccctcataaaaggtttcttttgtttttttgtttgtttggtcttcagctattttttttggtagtttcccctcctgagttcagattatcagtactttcatcatttataccactcggttctctggagttcttggtgcactgtgggtccacttttcttgtttggggtgatgactaacatctgccctgatactcgcctggtacttgaggctctgaactttattatcttctcttcaactgcagctcgtggcacttgtaggcaacgtgcctcccaaagagcctgaaagagattacagctcacttcctgccatcagacagtatgtggggaggtcaaggggtgggcagaggagaggcttggtgaaattcagacttttgggccccatctagaagaatctgcttcagtatctcttggagctacccaggaatatgtattttcaacagtgctccagatctgagggacagttggaattaggaaaactgtggctctaactgatgccccagtacttctcaaagtgggtgcccccacatcctgatatgctggatgtgttttgtaactgcagattcctgggctccactgggagtggtggccctggaccagcctctgtcatgtgtccccaaccacactcttgggattcgtatttgtatgaactttagagaatgaactgccacagagattctaggtgacaggaaattgtggggtaaattggaggattacagatcatgcttctaatatcagcacaggtacacacaatcgtcaaaataggggacaggtgtgtttggaaagcttgttttgtaaagaaagtcttttctccctttgacttctcttctttacgtggaagctacacttctgaattacaaagagacagagaaaaaagagaacaataacaacaaaaggttcctgaggcatacctaagctgcaggagccaagggagtgtcccttgttttacttggtgatggctgtttgaacagccgtttgctttctccttcctgtcctctgatgtgaggatgcaggattggaatcattagaaaccctaggttagtagcatcaggctccctgccctgtgtagtctctgggaggacagagctgcagcttaagttgtgcttttgtcttggcaagcacctttcaatttttatcctagctcagttgctttgtttggcattttactggccaatactcctttttttttccctctcttctccatctcctaattctcaacctcttctggggccaaaaacttggaggaaagactttaaaaaaaccaatttcactcctgtttatgtaatcgtttctatattacagaaggctatggtatgttttaaaatgtatacatctctttgcttttctcccttgtgactgaatttttgaaaaatgcttgaaatacggacaccaaaacggaatgtatgtgtgtcacatttaaacggaaaaccctgtttgttttgtatattagactatagccaatgaaaacccagggagtaaggattttcatgaccacaactgaatatagaacctcataggtttctgttataagtataaatattgagaatagttttgtttgtttatgccagtgcagttttatagcaaatcctttcaaatggggtgcaaagccatccatggatatttgtaaaggctttgcaaaatcatacataaaataaattgtccatttgatttgaacaagttttgcaattatttgtggctttaacaggggcttttgaagggcactgtatatatctaccagctggttctacttttttttttttaagaaaatggagagctttgtatacaatcccttgggtaaaccagtaataaactatatatcaggtagtcaagtcatgccatttcaaatctgttttacattttaaaggggtaataatttgtgaatttcatctcatagaaatttttatgcttcaaatcaagttgttatcccatccttgtctattttttttttatcgatcccctcactcagtgttttagagaaataaagcatacaatggaatctcttgctgggaaaaaatactttcttacttattatattgtatcttgtaataatatatttctatcaccatttaaaaaacattcttttagttattgatgattattttgtcaaattatatgaatttggttctgttttctttttgtgacaaagattctgaattttcatgtttaataaatgcacttcttcacatgacaaatgttcattgagcccttagccaggcattggtgtcaaccctggttcataggtgcccagagttcctgtccttctgaagcttgcatcctggtggggatcaataaacaaagataccaaccaacaaatataaatatatgtatgtatgtaattgattgattgatatctgtgtgtgagtgtttcctcaatggcattatgcatttatttattcattcttcatgcatttgttgtgtgggaaagaatgttttccaggttgaggaaagacacgagactcgacagccagggatatattaggtaacggtgaggagtctggtgtgattgaggcacagaaggaagtgccagtgtaaagtaacatgagaagaaagtacacacagatcctgagcaccttaaatgctagcctaaggaattttaagtttatacccaaagcaatagggagccactgaagatttttgtatggagaagtgacagttgtcagtggctcatagtagattggagtgggcacctttgctgaagttagggaacctgttttcaggtccttattatgagacgtgctagttaaaagaggaaaggaggggagggggttggcaaaggctgcagttagttacattgagtgaggtcaagtaaaatgttttgaagcatttctatggagaagtcccagatcttcttacctttcatgactttgttagactcactcttcagtgaaataagactggtcttgatttttccatgcgtcttgagttaaagcgttaccctttgctacctgggctctacgatttcacctgttctctggccacaccttggaattcacttctttgtgctctccaatatttgatttccttcttgtcttcttttctttgttgttgttttttgtttttgatacaagagtctcactctgtcacccacgctggagtgcagtggtgtgatgttggctcattgcaaccttcgcctcccgggttcaagcgattttcctgcctcagcctcctgagtggctgggattacaggtgtgcgccaccacgcccggctaatttttgtatttttagtagagatggaatttcaccatgttggccaggcaggtctccaacttctggccccaagccatctgcccacctcagcctcccaaagtgctgggattacaggcagcatggccaccatgcccggctttccttcttgccttttcttaagagtcctgcttcaaggaaacttccgtctccttttcaaaaactatttcagtaacaatcccttggtgtttatttaccatttgtagcttaaacttaaaactttttccctgtattagttatttttcaaatatactttttgtctcttcaactaaattttgagctcaggattcataatttatttgaagaggtacaaacagaaaggttctgtcccatatttctaagtagtaggatttatttttccttctattgaaatgaaaatataaatggcctttgaggctccaggagagcccacaaaattttatttagtccaaaataccgtaaaacttcagtattattaatacttaaagatggtttgcctcaagcaagaaatatgaagctctggggaacacattctgtgtgtgtgacacatccagacagtgtggtttgccaaatggtagctgatccagagtgaggttcttaaccttcatcaagtcagggactgctttgaaaatccaatgcaagctgtagactgtcttcccagaaaaatgcgtatagctaaatacatgaggaaaattctgcagtccttagtctgtgtatgtagcatgtgtgtaggtatgatattggtaaatccaaaagaaaaaatgctttttagttaccttttgtagccattaacgttacctgtgctaagtgctcattaggcatttgctggctgattctattcatgtgagggccacagggaccaggagaggtgagagcaaagatgcatgcacagatcagagaagggttaaatggggaattatgcagcatgtaacttatacatttcctgaaaatgatgcttctgtggacttagacaaaaatgagtggccaggagaggattgccgttggatagatgaagtctagatttatccagagttggtatttcttgttaaagaacctcagtgagcagtaagttcataaacctactggggtgctggtggagggggagatctactgtttattttaggatgttttcagctgcaacaaaagaaaaccctgactcaaatggacttaaacatagggaaatgtcttacattacgttacctattccaaaatctctggtggtttccttcctccgtgtactgccttcatcctaggaatgataaggaaattcctgctttggttctgggcatcacatccaaacagaaaaatcatcaaagaggataagtggtcgtctactgatgtgtctctttccttggagtagggagatatttccaagaacccagtagaggctgcacctttgtgtcttagtgctcattttgaaaccagtatctggcctggggaaggcaaggggtgtgattggctgtaggacttgggggtttccctctggaactggaaatgaggtcacctgttcctgatccactaggaggagtggtggctatgtgaacaaatagcaattataccaaaaactgctgcacgttctactaagaaggaagaagagaaaaatagatattggaccaacagaactaacagtgtcattgtatcttctgataaactcacattctgaataaaaaaggaagtcatgtttgtatttttaaaatttatctaaatctgttgttattttctctaccacaacacatggggtacagtcatatgcttaagtccatgtgagtgagcttttataatagatgttctgtccacacaaggactggtttccaaggcccgcactcagtttacttatgggccccactgccatgcacaattaagaaaaagacgagattttagcaacttggactgaactatagactttgcctaaactcattatttacagcagcacttttcttcataggtgaattgttaataggtttgattacttattcttgccttggagaattttcaggtatggcttacaaagtgatatgaattgtcatctctcaaatgcatctttaatttaaacatattctctatgtttctgggtagaggaagaggaaaaaagtctatgaaaatgaatttaaaatgcttctcagagtcagtattaatttaaaccgttgcggttttctgtggggcatatttaacccaaaagaaaagcccttataattaggaaattgggattctgaataattaatttgaaagaggaaatataactttttctacagagaacatctttcatccaaatttggagttccagtttctgcagatgtcacttctctctcataacataagaaaataggtaagaggcagtttggaaagaggttgaaaggagaaattataggttctcctcccagcttttccaataacttgccttgaggacttggaccaagccctgactttctctgatgtataaagttgtaaaggaagatgaaatactgtgcacgaaagtgctttgaaaaattgaaagcagtaaactgctctaggatatttattgttagtgtggtggttctggttattataaatgaagcagaactttaaatattaatggtactcttgttcatcaatggggaagttataggggaaaggttttccaaaaaatgctgagctataactgccatccaagtaagtgacgcagaatgcctaacccaatttgtatcttgctatcacctgatcacagaaagctgtttcactgtagaggtaacagttgttttctcctctgtcctgaggccaatgattatataatatgtatcaaatcactagggtgcatatcaaagtgagcataaagaggcaaatatttccctttacaatgaccatataagagattatttctgtcaggggataaggcatacatgaagtctgactgtttcactgcatttttactatagaaatcactgagcttgagacttgtacattaactccatctggtcatgtgactggcaagtgaagtgtttcaatgtgttaagaggactgatctgcatatttcttgctgaatcttaatctgtacttgcatatttgtgaaacgaatgagtatttaaattatggagaaaagatgtattgtgccaaactaacctttatagcatacctgtggttgtagtttctctagctaacagtggacaagatgaaaactcattatacattttcatcatgttaggtattcttctcaaagtcacaggagcactgcagaatggttcgtaactttatgaattcagctggcattttggatatatggacggcccctttgaggggctaaagacacagccatccatttcaccaagagtcgccgagggtgccttattgcccctaccccgtgctgggtactgagggtgggatagaaggcaaaccagacacatcccttgtgtttatgcagctttttcttcagtgggcaagacattacttgagaatcctaaaaatataaaattacgtctatgacaagtccaatgaaggagaaggacaagacacttgattgaggaggacatttattgctagtcaggggggacaaggaaagctgacccaaggaaatgatgattcagctgagttgatagaggagtgaaatagtcatagtaggaaagtggagtggtgggagttgggaggaaagtactgtatttgaagaaccacgtgttcaagttctgcagcagaagggccaatgaagtacttgagtgttgtcaaaggcaatcaaggtaactggaagagagaacacgagggcgtgagggtatgttatcaggatgaccttgatgttcacaattaagaaagttgctctaatcctgacatcaataggaagactgaagtatctgaaggagggagtttgcatgtctgttcacaaagacctcttaagcaatacactgtacactattaatatgccagtggttcttggggcgctgtctccaacctgtggttgtctcactactgtatactctactccttccccagtgtgtgctatctgtgtgatttgtgtgggatcactacatccctggtggactactgtgactggactaaaacaatcaaggtaatcctatccctctcatcacggtgattaattcgggtcatccaggcctaagcaaatccatgcatggtattttttggctttagggattgttccatgatggtcccaatcaggacaaagttcagcaggaattttgctcttttatagactgaacttgctgccattgaaagtcaatgaggaagcaagtagatctggaatcctatgaccatgagagaagcctgctttagggtgaagttgacatggaagtgtcagaggtgaggggtacaaagaaccattttgtccttgctaatatagtagatccactgtatctcagattgcacctgatacctgttgaagttttcaggcttttctcacccctaggcccttctccaatcctgatgctagctgttgacaacagtcattattaaataaatatcagaaacctcatctgaattcaaggaatctcccagctctttctaaacccatacttgctcattgtaactgtagctcaggccaagatggaatagactaccttggtgaggacaggtgtatgaagaatcactgatttaaagattgttcataacgtatcgcagtcattaggcataagtctatttcttgagacattgtaagggattattcttggaaggacataggtccaaaatgttgaattggacgtctaggagtcagggtggtaaaaatgaagtatatattgattaagtggagagttacatgagtagagaagcaaaatgaagccgagtagaaaattaaaggttttgggaggagtactgcctgaatttagatgtttttaaagtacagctttctgtcttcatgggaatatcttttcgatatactgagaaaaagaaatccaggtgttcttcacttttgtaagcatcctggtttttcgtgcagggagcacagacaacaggatttcttgccaatcagttaccattgtgaggcctgatttttcatctgtaaaatgaggataatacagtctacctgagtaatggctgtgaaagttaaatgaagcaatttgagtacaaatacctcacaatgaatgattgttttcattgatgtggtggtaaatgtttaataacctctttttcaaagaataaaagccgttattggtcatttttgccaatttccatggtgtaaatacttccaacattgtgccagttccgagttaccagtgtgttacaaaattgaaatggagttagagaaatacacatataatgccggagagctcaccaggatgccactgctttctttccttctttccaaattacatacatcccagattttttttttttttttttttttttttgagatggagtcttgctctgttgcccaggttggagtgcagtggcacagtcttggctcactgcagcctccgccttccatgttcaagtgattctcctgcctcagcctcccaagtagctaggattacaggtgcctgccaccacgcccagcaattttttgtatttttagtagagacagagttttaccatattgcctaggctggtctcaaactcctggcctcaagtgatacaccctcctcagcctcccgaagtgttgggattacaggcgtgagccactgcacccggcccataagccaccacgcctggcctatgccagattttgtacaaagtaaaatcaatccttgtcccccaccactgtgatactagggtttgtttgattttagtgacatctgtattagggttgacacagaattaataactgaatcaataaagagaccgggaacagggccacgccttacacaaggtgacatgaaaaatgttgaggtgtagcagtttattcccttaggttaatcatgaacctttctgttaggcccctttgaaatttagtatcactctgtcctaaatcaccagtaccttgcaagtgttgattctagcccatataactcacctttctcaaaaattctgctatgtttgttttagtaaccaaatactgtattttattttcgtaagattttcttcccaatctagattatatatttcagagagaaagcgtcctattttatgtacattttgtatccttttggtgtcaaatatcatgctatgaccataacagtaagtgtaatacacataatatcctccccccgcccccccgcttttttttttttttttttttggagttcctactgtgttccaggttccatggtaacattttccttgttatctgtaatcatcacaacagtactggagggtaaatacggtcattcccattttacagatgaggatacattcaatgtgagatgttaaagatgttcttcagaatttcccaggtagcaggcagctcatggtattcaaaaggtaatggttaagagaaagaatggataatgaatatcttgtgtctattttcttgagacagacgagactgagcagcctgagaacatttggtgctcagagggaggaaatgctaagaggggaaaacaagtctgaaagggaaagaaggatagttcaaagaccagtttcccctgcttcagaattctgactggtgccagctctaactgcgtatgtttgctttacttggaagatagaatcatagtgccagaattcacggaagtctgttttggaagatgcattagtcagggtatgctaattgctggaacaaacaatccccaaacttcagtagcttaacactgcagagggttattaccctccggtgtcacagagcaacgtgggtgggctctggtcctagcctggcttcttccatggctcaggtctgctatcccctaggaccttggagttcactagatattggcatcaggctgatcaaagaggaaaaggagagtggtgcatagacgattacatgggaaattttaagggccaggtctggacaaggcaagtattacttctgctcacattttattggccaaatcctagtcatatgatcccatgactgcaaaggaagatggggaatttcagattcctaggtggtcacgggcagaaagagatggggattggtgaaaacatagcctggctttagccacagagggttacaccagaggcctgcaagtttggtgaccactagttttcagaggtattgggtatttgataaaatccagtgtcttccagaggttgagcatgagccacatataaataactttcccagtgacgggccatcagcagtccaatgaagacattgggtcttcatgtcttcattggactgctgatggcctgtcattggggaagttatttaccttctctgaggagaaaataataacttgcatttcagagtggtttgggacactaaaggaaatcagaagatggaactgatttgttaactagaaatggacataagtattggttacaggtttaaaatgaaacttgcagtgtttgaggaagaaagggaaaatgttaatgcaaaaacaaaaaaggtaaagaaatggtgggaagtagattattggcactttttctttggaaacccattgccatatttcatgtaattaaacttcattccttttaatgaaacaattcttctaaataatacagagatttcccaccaatataatatttaacatttataattttcaccttaaagtttgaacatttttaattttaaaactgtttgttgcagtttaaatctccttatgccacagaactgtggactttctctggttgcaaaattctttacagtgtcttgaattgaaaagggcttaagtaaaaaaagctgggggaagtgggggccttttacaaacaaattacaactcatttggtacaataaggataattcattttgtcttgttttgcatggctgtatattgttttgaattcattctgcatttcggaagcttgcagtatttcttttctgtaggtttcttacttgtaactgcagatttcgcggtttcttttgtgtaccacttgcctcccagaatttggcccaacagttttgagtagctgaacaatttatcggggacagatcagctgaaatgtggctcaacttgagtaaagcagaaggaatgacataaggttaggtgactgatgtgtgagtttttgaatttgatttggttttacatggaaaggttgaagcaatgatccatgtattctaataaaaatcatcagtacaaatcaaataaaatctggcttagtggctattttcccactgtatcactcatggctagcctgtgctgttacagaccacatttggcaggcacggctttttcctacaacaaatcttaaagtaacattgcaatctttgctgtgttaaaaaggcatcttttctaatcaaactgtctgctaatctcatcagataaatcattattctctactgacagctccggctttcccggaaccccttccctgcttcttgttttctctcaagatgcctggttatcgtcattcttcaggtctttgcctctatctcctttcacactaatgacatatcttccattcctgaggaagagttacagctttttaccattccacttactgaattggtaagaccagtacctcagagcagctcatctctttctgaccggtattccactagttatcagatgggcaaaaggcaggatgcatccaagttgcagacctactagaaccaaaaatgcctattcccaggaatttgatgtgattaaacctaagaaatcatcagttgatgcgttctcatctctttcagctggactagtaaagtaaggcagatgtattttcactacttcagtagtgaacatgttttatagaacctgaaagtgaaagtaagggaagcagcatggtttagaggaaaccttggtccatttttccgtcatagacctgtcctgctagcaaagtcctgggcgtttcttaaactgatggcaactgcgtgtgccctggtggtgaaatggtgttgcagtatgcctgggcactgccctgtgaaaaaggacacacagaggggagactcacagttttgttttcattgctgacatggtttaaaaatgtacgttgctagctgtgaaaactcagtcattataacaccgtacacctttcttctttcagcaagtattccttgtgaacattagcaagtattctattctctgttagaattaaacaggtaatcgtaatagcatgaaagggtgaaagtatgtcttatgcaaaatagcctcttttatatagggcatctaccaattttcttgtgatttttgttttttcctcttttgaaaaatgattttagtctgctcgtgtttaggtaggtaacttctcttgatcccaattttatactttaaatgatcccagatattgcattttaaatgagatgagtatataaaaaataggaagcagaaagcataattaaaaattgtggttacattatcgtgagaccaaatgaccagtcagactcctctgaccaatttcatagaaaataaggaggtatcatttgaacaagttgtaacatatgggaactgttttaaacaccatcattaatatcaagaaactattaggaaatgcaagtttgtgtatcgtgtgtgtgtgtatgctgattttacacacacaggcacatgcacacacatgcacacacacatttataagcccaagtaagagaaacctttgccaatgtctgccaggcatttggctgaagtggaattgtgaggaacattttctcagcctttataaatcacagttgaaatatgtcagcactgttcagtttataaaatgacaagggctgtaggctgggcatggtggctcacgcctataatcccagcattttgggaggctgaggtgggaggattgcctgagcccaggagtcggagatcaacctgagcaacatagtgagaccctgtctctacaaaaaattcactgggtgtggtggtgtgtgcctgtggtcccagctactcaggagggtgaggtgggaggattgcttgagtctgggaggttgaggttgcagcgagccctgatcgcaccactgcactacatataccctagatgaagagcaggaccccatctcaaaaaaaaacaaaaacaaaaaacaaaaaacaaaaaaacaacgagggcttcatctaaaggttaaagggactgtttctaccttatattgattataacaagttaactcactcaatattgtatggtatgcttatgctgtattgaatggcaaagttcctctcacagtcttttttggggtcacccttcactcttcactttgtgaggtggctagttcatttgtatacctgctctctaaatgtgggaatatattcttttaaaagtggcaactcaacttatctcccccttctaaaatattttagatgtttccaatttttttttttgtacgtcagcccatggaaaccacactaaatttttctgtgtcatgagtatgcttgtctctgcatttgaatttaattgggaagtgcctctgaaatggcaggtctcctttttacacagtggtttacagaatgtggtgggaggaggcaccaaatagcctgttaggatagcatggctccaaaactgattctttaacttgcctttatacattgcattaattcacaagtggatcagtccatcttgtcttcatcttggccaaattccttcaaaattaatagtaaaatatgcctaaatatattcttgttcctgccctccccactcccacctaggtcacagggctacaactaatcattgtctccattgaaatgtcactagatgatcaacgattgaagaatatttcttaccaattcaaatagaacagaaacttcagtcaagtttagcatttattgccctacatttctgcggctgtcaaaaccagttgatcagagacgtgaagatatgtaaggaaataggaagctgtgatgggttatcgcttgtctaagagtggtacaagtgagacttgagggcattatcactttttaccttatacatttttgtattttaatttttttcaataagcacatacttaaaaattagtttgaatgttcttaacgaatctttccataggttactgattagttcaacagggacaaattataatcatacattgcagaatttgcatgccactttgaccaggtgatcaaaattggcatagcacatgaggggcagaccaacatgccatcaaggggctctggaagtgatgtcctgggaaggacaccagaccactattgtagtattatatccactggaatataatcatgaggaagcatctgatcctcccaaattgagaaacatttccataaaataactggcctgtattcttccaaaattctaatatcacagaaggaaaaggctgaggaattatgtctgattcaaatggataaaagagatagacaattcagtgcagtgcatgatcctggactttgtcttctaccggagagggaggaagttccctattggaatatggattatggattggatctaagtacccacagtatattttctgattttgataatagtactgtttttgttcttaggaagtgcacacagaagtactaaggtgcaaaaggatataattgatgcaacttacacatggttcagaagcaacatattatataattataactgcactgtaattgaaaacttttaaaattagcctggtgtggcagtcccagctacttgggaggctgaattgggaggatctcctaagcctaggaggttgcggctgtggtgagctgtgtttgtgccactggactccagcctgtgtgacagaacgagaccctgtctcaaaaacaaacaaacaaaacaaacaaaaaccccaaaacttaaaaaaaataaaaatgtaaaatatgggaagaatgaaaaaattatacattttccttgacttcaacccttgatcttttcttgatcagttcccaggtggggttaggatatctgtgttttttatgaggttccttggagtatttgggtggtcagccaccatttggagatcaccatgtagtgcctagattataaattatccttttagaaagagttgctggaatcatttcaagattggtcaggtaccaataaataagtaatagaaacaccctcaaaattggaattgaaagagtggaaatttattttatttagtttggggatatgaacatggtataatattgtcgcattttttctggagtttagatgaataagagcagcctacagttgaccggatgacttaatatttttttcgtaccacaaaaattaaatgctttactaaaactttcattctcttacaattctgatgaacaaggttgtactgtatggttaagtatcacactgtaaatttaggcaatacatgtcctattgagcccatggagtaaaatagattttcccgtgatccaagctattacaatttcagatgtgtaaagtatttcaaattcattttaatagactgcttcccttcaaatacatgtggaggtagatttatacaactgtaaacagtttatgcatttttacagattttcattatatgtgtttgatactaatttacctctttttaattgtaggagagataaagaattagtagtttaaaacagtaggaactgcgtgttctgctgtgatcaaggaattagataatctggcttgtttgcttaaggggtctgtatcttgagacttttatagggcagtattaaagctctgagcctccttattatgccagtacccagaagattgctttaatgagaagtaaagggcctttttccaattacaagggaataactgcattaagttcctgtgttatgtcaacctgctttgatttgattactatgaaagaaatggatttatctgtcagtgttacttaattaagccttctcattgatgttttgcagagtaatatagtgtggtttgcacatttgagcctaagtacagagaaaattggcctaaaactaagacatgacccctgaagataacatgcaagattgatcatttgtcattgccaggtcataggctgcagtgttaaacataggtggaaggattgccatgttgaaagggtaaaatgaaaatcagtttatgggagtgagtattttaagcaaaaggggttgtggtggaaaactggattttagggaggagttttgaatatgtaaaactattgacttcaccaatattagtcaagcatctggaataggaaatgacaataaaacaaacaggagaagtagattttgttaaagtataaaaggaaatagaagaaaaaggagaaagcaagaggaaagaatgccgtttgggagaagtagaccattgtggttaggcagagcaattacagcctacagatatttcaattaagccagcctccccttctcagaacctcacaaatggcaccctcgggagaaaagaggtatcaggaaagaaaagaagaaaagaggaaacagttccatgtttcatgttggctaacctctcccaagaataaattcaataaattatttaccaaataggcattttaaataccagtttgtatatctgaagtcattacaatattatggattttgcactataaatattacatgtatggtttgaaaaatacacatgtaattacatgtagacattatcagaggtatatattcagttttattaggaaatgaagcatattcttaaatgtattccttagttgtttaacactttgttttctaaagtatctaccttttatttcttgcactctgtgatatatctttagaaggtgatatgtctttaggaggtgccaaacacctacttaaaaacttccttgcaatattttcacatttatttaagtactttgaaacttatctgtgtaatgttgaagttagatggtactttgatttttttttcaaagtcttcagatatggtaacttacttccaattgttattctcacgcaattcgcaatgtttactctccaagaaaactgtcttagttaagactgatttttaagtgcttttagattggtcacatttcgaaaagtcaaagaaggtatatatagttcacgttatactcttgcttgagttattcatggctcttatttgtaggatattgctttaaaaggtaggatccccaaacgactaacttctcttcaagaggaagaccccagctagccagtcccatacacttgaaaggttgctaaatggcactcatctctcagcatttcacattatatattcaagctagggtataattcaagttagatgatcgttgacacctccaaatatataaattaatataaaggcttcaatgtacgtttggttcagttgcataatgtaactgtttaccaccttgagcttcaaaaagatttctgagtttcaatataaggaacaccactgacatatttgtaacataacagttacccacttcattttgttactttctcattatctgaattttatgttataggaagatgctttccctgtttatgacagcacacaatggaattaactccatatcttaagcagcagaaatgtagtgttcatttttgaaaaacaggttattttgaacttaaggaaaataatactgttttaaaggacttattaatggaagtttaagttggatgttaattaaggctaaaatattgcagtaattgtctgcgaacacttttttcctactatactttctcaccagcatatctaccctttaacttttcttatcatatgaaaaatactctaagatgatctcatgcttgacctttgagtttcagatttatttggttaggaaatccattagctctgagaaagccagggttgacagcagtcatctgaaaatggaaagcccaggtctgtattctttatatttgacttatcttttttttttttttttgagacagagtcttgctcagtcaccgaggctggagtgcagtggcacaatcttggatcactgcagcctccatcttctgggttcatgtgattctagtgcctcagcctcttgagtagctgggactacaagtgtgcaccaccatgcccagctaatttttgtgtttttagtagagatgggttttaccatgttgcccaggctgatctcgaactcttggcctcactttttctagtctgatagttttgattgctgtccacataagcaaagtagagctttgagtaatcaaatcataatccacctgcctcggcttcccaaagtgctgggattataggcgtgagccatcgcacctggcctgacacatcttaacatttgtgtgggaagcattgacacaaccctcatcctttgcttagtcagatttgggaagtgctggaagcttcttgtcgagtttcttgttagtgcccagatcactcattctgaagcaccatttcttatgtctaatagaaaacagaaacaatcatgcttgtgtggacatcatctgtcaatatttgaatctcctcaactcttcctatgtctgtaatagtactcaaatttgacttcaaattactctacttagagctcttattatactgggtgctaatgaaaatgtgcacatccttaacacgctctttgctgatgaaatattttgaactctaaattcatctggcactgacggagagcatatgccatctcagtttgtgtgagggctcagccaagggttcttcctggactaggaaattagtaggagccacagatgtacgcagtctgtgagtctccataatggtgtagaggatatttaatagtgtctgttgttgcaggaagaaggttttgaggcagtgtagacttcattgtgtttcagaatgattatctttcctggaagaacttgacatcctatctctgaacgcattctgaatgtgttgaaatttttattaagaaatcaatatatttccacaagagcaggaatctgtagacttagagcaatgcaaaataccatttcaggcatttttctaatttcataaaactctagggtcctgggtgattggcatgttgtaggctcagagtatagaaaggacaactacacagctctacgtcaaatcaatctaggtaactttcatacttgtttatttcaaatcaagctgaaagttacatggtatttagtctgtgttcttagcttgggactctgatcagcatacataacttctgacaacatgtcatttgtgtattacacatagaagtacactgagatataaagagaatactctaatggtaaactaagccactgaataaatctaatgcttactgaattcttactctgatagtgttatacagggtcacggagaaggtaggattgtttaacctaaacgttttgggtgtttctaagatccaggagagtatttaaaaatcactgacctgtttagcagaacaaggagtcataaaaatgtaaggctcagattttcttagatattggagggtattattaaattaggcactcatgataaatactggtgactatggtagatatttactacggatcaagtactttcctaagtgtttaacaaatgttagttaattcatttactttaacaataactccttaatcttgcaaatactatcatccccttatcttctgttagaatactgactttggggtatgtcttgggttttcacttctgttctccttgactcaagaggccattacattttcaaggctgacagatgtccccagggcaaaaaatgtgttttcttcttccctgggttccagccttcactttgattttggctccctgattccttgttatcttgtctgctcagtattttaaaatttttcaaaaaactgttatccatcatttttagttttctgtgggagagttgtccaaatatactagcctgccctatttccaagaatggaaatcaaacttgcttatttcgtagttcacaaaaatgagtacggagaggccagtgacttgctcagaccagagaactggtcactgcagagtccctgctgaaatccagctctttatcccaactcccagtgctgtgttttctaaagtttgtctagtctgtctgatagttttgatcttgctgaccacaagagcaaagtggagctttgagtaatcggattacaagtgtaatgaatgtggatgggaaatcgcagaaggtaagaattatgtctgaacatctttcccctaaatagagtgtttggtcatagttctgcccaaactgttgtgttttggcactgatctgtcaaatactttatttattatttttttttttgagacagtctcgctctgtcacccaggctggagtacagtggctcgatcttggctcgcggcaacctccacctcctgggttcaagcagttctcctgcctcagcctcctgagtagctgggattacaggcgtccaccaccaggcccagctaatttttgtatgttcagtagagatggggtctcaccattttggccaggctggcttcaaactcctgacctcagctgatctgcccgcctcggcatctcaaagtgctgggattacaggcatgagccattgcacccgaccaatgtgtcagacactgtagaggggactcatgcagaatgaatcaaataagatgaaaatttgtggattttcagattgcctcctaaagcagccagcaatcccatggaagagttactaaatctatcttggtttagggtaaaataagaaattagaaaaatcttgaactgagcccatttcagtcttttggaacaggaatttctatcatctacttgctttcttcctttctttttgcccggggtaatatctttctctttattctcccatcttggaaaaagggtggcaatagaacaagggggggggggcgagaactaaatagattcagcagcttcatcccaggcagtttttcatttgtcactatgttgccttaatggatttcacacatctatttcctgtatattgtttagtctcacctctagatgtaaacacttctcataccacaatattatcttacttttcactttctgctgttttaactcatttcaataaagaactaatgagcccaccattgtacagtaccacacaagatgttatttgtgtcaagtatgtttctttcctataataaacgtacatcacagttgggtatgatataagtatatagctctatagctgtatatatattcacatggttatttggataataaattctgtgtacttgctgaactatcgtattgagccagccatacaagttttatcattgtgcctactgttgatactatgggctgctatgggatattctgtcctctgtgttgggagctcacagatattttctgtctggcttaataccaggattaggtatgcttctcctggacactttgtgtgtttttatctgatggttattgtcaatcttgtttccctctctgctttgtctacttaatagcttctaaagttttgacccacttctagcaaatagccagtccttcactgtgtgcattttgataaactcatcatacctctggccttactgttctgctacttttattttgcagtcacttgggtccttcaaatattgatttcgtatattttgtgttgtatgtgtttctgtaatcttttgtggacacaagagttgggtataaactcccaaataaatatattcactctgcgtggggagaagtgacaggagggaacgttcagctggttagacagagatgtgacattcttactggggagtctttacagcagtgggcagagcttcagcctccttttgtgtccaagctctgccatttcctgatcccttgggcaagttttctaacccatctgagcctcagttcagatatataaaaccagaatactagtaaggcatttgagagtttagcgcagtgtctgacatacattcaagctcaccacatgtgagctgttactctttctttgagaggtgaggaacagtttaggcagaaggaatagcagttacaaaaacatggtggtataaaagaccgtgcagtgtcctggtaccctagcaggagtaaggaatggccaggtgtaggccctgtgcaaggtttacatgaaaatgagtctggacaagaacttcttggatgctcatgtgatggaggtgtatagtgaatgctgctgaaaccagcaacccagacagcaattttaagatatggagtgagagaggctgctgttggtggtgtggggcatgcatttgtcttgtgttacagtggagtagtcctgtggttctcaaactcctgtgtgcataaaagttacctggggacctgttaaaaacagttttctcagccccacccccagagtttcagactgagtagatatgagacggaccctaataagccaatttaaaaatgggcatacaggtgattcaggtggcggatacactttgaaatgcacttggtggtgcactggaatagttattgaggaaatgctaactaaggggcaggcctgacaaagttcaaggagagggaagatggaagaaaatgacttcaaagtaacatgtttacattcattatgaattaccattgcgcatgctatggaaacactagtttatagtgtcttctatggatatggataaatgagcaccggtcctatagatttttttcaaaggtaaaatataattagaattcatatgattattctatttattaggtttgggagagctagtgatttgtcctcatccttgagatccagcaggagaccaagggaaggggaagcctgttcaacagagagcaatcaaagaaagaaaggtgcagcagcgtgaggtcaggaagtgggaaagatggaaatgggaaagggtggaaaaagagcagtcagatccgattggtcaggaatctatttgtgaaggaacccagccagtatttaacctgctttgaaaaagctagacttccagcatttttaattagtggattgctcgcttttgaaattgcccagttgggaatactcaagttttgatgtgttttatctgcctgctaattagcaggctgcttggttgaccattacttttccttttttctgtggacagaagatgtatatgaaggtctcttggtacattccagctcaagtctagcttaaagtgcataagaaaaactgtgtatttaataagagttcttactaaattataaatcaaattttaatacatcttttctccaacttgattccttttgctctagcacagggcttctcaatctcaacacaatttttatttggggtcagaacaccaaaaatatatgtatatatttttagggacagggtctcactcagttgcctaggttggagtgcagtggcacaatcgtagttcactgtaaccttgaactcctgggctcaagggatcttcctgcctcggcccctccaattagctaggactacaggcaagttccaccacacttggctaattttaaaaatttttgtagcgacagaatcttgccgtgtttcccaggctggtctcaaactcctggcctcaagcaatccttctgcttcagcctcccaacgtgctggtatcacaggtgtgagctgctgtgccctgcacagggtatttcttactgtggagagctgttttgtgcaattatgagatatttaatagcaactcttggcctctgtgtgatcaatgccactagcaacacccaaattgtgacaaccaaaactgtctcctgggtggctttgccaaatgtcctttgggatgcaaaagccccactgacctggcagtagcgtcctctttcctccaagtctctgcctacttttcatgtttaaaatcctcttttaaaattgaaaagataaaatgagtccaaacaatttgaaatcttatggtacttatagggattcaaatctgttcctccattactttttggccaaattcaagaggagaaatctctcaaatgaatccaagctggctgttataggtgaaaagaaagtcaagatgcgccagacttttaaaagcttgcagtggttgagagattttgttatttatacactttttattttggctgaaaatatttggtttttgtttaagaattaagagaaccgtgtaggctacaaaatttatttatgtgcgaatcccagagggttgtaagtagcttctttgtgtgcttcagttcaacatatacaggataggccagcatgttggattgttaaacagcagatctggggaaggttttacaccttttctctaggcttggtgcagtcccgagagctttcttgacatgccttgaagctcacagtgcactgatttaaactgtccataggggacatctgtttgcagtttgtgttatctgctgaagcaccaactaaaaggaagtgaaataatatttgtcattaaaaaaaaaaagagaagttaatttaatggtaataacttagttgttgttgcttttctatctcttaagatattctgaaacaccatgtactctactgtatcccaaaataaataaattaattatactatgattacttctgctgataataaaatagcagtaataataaaaggaatgacagtagagcattaagagaataaacagtatcactgaaatgtgaggaaacacaataaatgggattgtgtctcctgaaccttagtttcacacttcctcctccacttctgtcagagggtgtttgtgatggccgtctgttatcagccgtgatcaaaataatataacagtgaaactttttatacttatgaaggccctttcatcaaaaatctcacagccatttctaaatatagagcaactgatctttaaaacacttttatgttttaagcaattaatatggtaacttagctgttagactttccatcctgcgtatttgccatttggagcgtggatggaacatttcgtaatctactcagcattaaaactttgctggtattgagtttagaattccaacttttcgatggttcatgtaggtcttttcactgtcatctatcaaaacaaaacattgctttataatggaataaccacattcatttccacatatcaaaacccagattaaggattatagaccaaatggtatgtctagtttaaaaaaaaaaggaaagacagagacagtattgtcttaacctaaaaaaaagttttgtttcagtcctaatatccctgtaatgtgctggtggaaatagactactgaatactttctcagtctcattttctgttgcatgtctggtgtcttctgtgataagcctgggctatggaacaaaaaggatccaagagcattatggcgaggatgctaaaggtgttagtgtggatatttaccttaatttaactttttttgcattaaagttatgttagtgcatttttaaacttattttatccaaaagattgtaataaaactttaagtacagtttcacatctataaagactgaggctatcaaacactgtgaaggatggaagtaatttttatgtttatacctctggttcctgagggtccagttcatttctactgtgaatttaaatgagttaatttaagtagatgggtcagaagccactatcatcatggtagcccggtgcctggttcttaattaaaggcaacaggagattaatttgaaacattaatttgaaagtgcatatacaaaaagaaaaaattactgcaagaaagcctaaagaacttttctcttgtccctagatgtagaagacagaagtagctcagggtcctgggggaatggaggacatccaagcccgtccagggtaagtatatctaatcttttctcccacaaccagacatcccacatatgtaaattgacaaacagaaggtgtgtttctctctctctctctctctctctctcacacacacacacacacacacacacacacacacagaggcatgggcatgcacacgcacacaaacacacacgcatatatgtgcatactaagtttaatgaggatcagcttgactttggaatttttttcccccattctcttattggatgctgttattcaatttgacacctgttccacttctgctaaccagaagaaaattccttcgttacatgtttggtctttcttttgtcagttattgatccatattacataatgctatttgttgtagatggaaaaacttaaaaaaattcctaatatccctataaggtattggtgtgaatagactactgaataatcccaaagatacactatgaagttctatcctaccagtataatctacgtactgaatctgagttgatttcgctatgtagacatgttatcattccaccagtagggactttgatcactagatggatcattcatttatttgccctcaactttttgctattcttctccacagttttcctacatgcattggttgtttcttggggaagacccaaggaatataatgtaataggaatgtaataggaagaccatggaataagagttgggtgggtggttaagcaatacgtgtttcttgtatgtatatgatcttgggcatgtcatttcacctcttgggtcctcattttcttattttgcaaaatgaggaagtagatccagaggatcatctgtgtttcttccagtttaaatattcatgattttgtatgaaatttctttaactgaatcattgctaggccctctaaaatccatgtcagtttttatgatgtacatacaatgccccagattaaaagtacacttcgtgtacatggtaaaaccagcatgtcttcctttcccaaccagctatatatatatagatgaagcattctgcagggagggtaacattttactgtaagtgttcacacaaatttgggttgggggaaggttccattttggcataagaggcagggaaggtaatcaagctgtcaaaatgagggcatttcagcaagtcagagctagacatttccacctgtccttggcattgtgatccttagtctagtgttcagggtacagcaggatctctaagcttaccagtaactttgtgagcccttacaccagctgtcgagcttgacattctaatgctttatatggatgggttgaggaaatctttcctcctcctcatgttacagtctgcacttgcagaaataaatccattccccttgacagcaagtggagatcatagaactcccctcaattgtttagttcatccagattttcacaatttcttatgatttatccattcagtacacatggtacttttaattgtgtttcagaaaacaaggtctgtttagaatcatcttaatttaggattaaaactaactagcttttggtttttgttagctgtcctgccatttttctcaaggaatatattggtgaataatttcaaaccaattttgtgtaatttatattttctaaatccagaagtttgcatgagacaaatcatttgtggcagatttatacccaggcgtactttcaaggtctctcttttttcatcttaacatggggatagtgtctaccttacagcactgtgctgaggattaaattagataatatatattaagcttttagtacactatctaggatgaggacacttaataagtgataattagcattatgcaatgcctggtatagagtgagtgagtgtactatgatgggtatttaaaatgtagcctctttttatagatggacatgttggcagaattagattacagtatcaggcaagttaattgttatacacgaggaaaggtgattgagaacggggtagttttccttaaggttgaggggatgtgtcttttccttgttcatgcagcagccctctcttttgtgtgggcagattttgccctttggctcacatgcaaccgatacctctgagtaaatttgacttagactttcatgggcagttccaccagctgagcagaatgactttttcccccctttttggtcactttatgcactttagtagactgaaagttgaaccatgtagtatagatgattttaactctttcctattgcgttatcaaatttccccattaaaattaagtaactggacagcttaagaacattgttttaattttaaattccccttaaaacaataagctgattgtaataatgaaatatttctgtcaaaatttgtctgccttacaactggttgttttttgtgacatgctttgtccaactccagaaatgctaatttatgctaatgttttgatgttcatatcatagttaaaccctaatattcttaactttcttatgtgttaattacttatgtgacaatctagttctcttacaaccacaataccacaatagtaactataataaaacattgaaacttcagtatcctaacaccaaatgttattgtttgaatggctctatcttggtctttgaaaagcaattcattgcatgctatgcctaattttcccttgtggcacaattttgctttaatgtggccttattaaaataataatttttaacataagcaatatactttgtatgtgtctggtgtcttacatacactattttatttaatcatgtcaacaactccatgcagttgataccattattattattcctaagatttctcagctattatgaggaaaatttggacttcgtagactctagagctttcttttagccactatacctgtgaaagtgcagattccttctagtgaagttccagggagggaatagtggactccaatttctttggaggggagaagttttggtagtggagctatgtttgtttatgtgctgtttattaatataaaataataacttacactgtcattttatttacagaactatggagatgggactccctatgaccacatgaccagcagggaccttgggtcacatgacaatctctctccaccttttgtcaattccagaatacaaagtaagacccattttaaattaacttacactttttgaatgctcaagttttactatagaaggtaaaaccatgtcctagacagaggttctgcttttagaaacttggatatttagtcagttcacttgtaataatcttaaattgcagagaggattggcagtctgtgtttggtaatagtgcattaaggattaagttttacaagcatatggaatgaaatgcttttagtgatactgaatctatgtggaaattttgttttccttagacctaaagcacggaccacagtttcaatgttgtatcagtagtttcctaagttaaggtagatgaagtcaaagtggtgaatatttagaataaaaatatcactgggcttgttggttggcagtgatatatagtcagtgttaactgtgatttctgctaaaggggttatgaaaataaatggtgttaatgggcttagtgtgcttaaatcagagtagtgcattcaagttgaattgtaaaatctgattgtatatttatcaaggcatgaactttagtgctaatggcctaggcagaccccatcctgctttattaaagcaagttacctgttagtttgaggctgtctgtgaatctccggcatgccattcatcctggcatcctcagcatgtttttctgcttttggctaccctgtagggatgtttgtttaacagcagtaacttgagcaatgaaaagatgattcctaatggcttaaaaggtcccaatagctggctactttagttttgattgaaaaaaaaaaagatctttgttctagtaaacatgagttcttaacaatattagtaaatctctcaacctggccaaattctcttgagaatctgtcaataagtgaagttaaatttcttggtacaatctgttggacaacactccaaggaaacacacacagcgatgattatatttttctgagaccataactgcaaatgcttctaaagaatgtcatgattttaagctttggaagctataccagttacttcaggtccttgaatctcaggcattctttgaaaaatcaccatcaaatccatctaaatggatttcagatatttaacacaaaatagtcaaagcagataaatactagcaacttatttttaatgggtaacatcatatgttcgtgcctttgagtatcttaccaactttgagaaccacaaagttggttttggtcatagaatgttcttatttttgtgctatttttgccttcaaagtagtaaatttcatatttacgttttaacattgtaactcaagcaggaatcccagttctttatcagttgttgatagaaaggtgcattgtttcttgttctcaggatatgtagatacaggtgaccagatatatttatcaacttagattttaaaaggcagcttttgactcttcagtgtcaatagttatgattttatttctaacacccttgcttctctattcatctccacacaaccacttagaataaaagattcacttgaaaatgtagtcttgagaagtagcacctaaataatatactaacttccttggatcctaaaatgatcctccaatgagctacagtaagaaaaatagaataaataaatactcatagggagacgcttatgttatctatgtgaaaaaagttttaactctaaagaacaacttgataaattaatattacagaatacaccaagcagtacaaacagattaaatgattgttctgttcatgtttcctcatgggcaactgctttacaaatcaaattagtttttcaacccaaatagtatttaaaatataagtggcctgacagtctagagcggagagagctgattcttttcacttagttgttgtttaggctgcaaatccatgtcagctttgctcttttatcctgtctgccctccttcccattaaactcttaaatatggagaccaagacagtctcctgcattgtgataggaaatgctactatgtccacgaggcccccacccactgttcccagtgaaaggacttctctgttagataagctgtctggtttgaaacatggctctttattgtttacaaactgctacattttccacctcgagcagatttttgcacagaaaagaattgtgcttgggctaaatggtttatctgacattaacggcgcagtgtcagactggggtcagggaagtcaccctcagagcgagagggtattgcgcggtatgcaaaaaaaatggaaaagggagaaaaagacattgaaacaagtatgaaataccttacatttttagtttagagaagaataatttttttaagagaattgactcttatgctgcattaaaaacttcccatcgctataatttctcacacacccgatgccttcttgattggcttgcgtatctgaaggctagattcggggaacaaagattctcattgattttgcccaagctgctgtttatttaaaatgaaaccacttttcagatgagccatatttggtgttatgttacagctttacaaagaaaagatagatcattttcaagaaattaacgacaattaatttacaaatgataataaaaacaaagtaagatctattggtgtaggggacagtttgaactcatagcatatatgctgtgttctaaaccgcactttgtgtccagacccagagcccatgttgtgacctttgtggatattttccttctaccaaaagaaggtagtagactttagcataagtgtttgacaacactccagtctccactttcagaatgtttaactggtttttgttaaaactacaaagtatttgtttctgtctcaaaggcttaattctgctgtgatgtcgcatcagggtaaaagctatagcatcagaaataaatcagtcactttattggagcagattctctattgtcaaatcaatcaagcctgtgactgaattaggcgtctgctacagaaataagtgacactaattttataggaaagagttattaactgcagatgacctgatttttttttttcctttttttggtgaactgttcatttagtaaggttttattttattgcaaagaaagaaaaaagtactggactactctttccttttgagagtggattatcattaattatgtattttgttctttatggcagtatacaattttagggaaatgataacaggcattgctagtatatttgtttataacctctatggtaatgaaacccattattacaactctgaacttcttgatttcacatgaatggttttgcattttacagatttttaaacataatacttctatttggcactgaaattccaaaacttagttcatttgtgtctctatttcacatttatgcaaagtgggatataaattataagagtaataaagtgttttagcctaggcaacatggtgaaacctcatctctaccaaaaatacaaaaacttagccaggcgtggtggcacacttctgtggtcccaactacttgggaggccaaggagggaggatctcttgagctcagggggcggaggttgcagtgggctgacatcatgccattgcaccccaacctgggcaataagtgagatcccatctcaaaaaaaagtaataaaatgtttgttttaatttattcttttagaaataatcttgtgtgtgtggaaaaatgcactatttgatagtttgtgaatccctaaagtaaataaaacacccatgtgtggttatacatgcatgcacacacatgtacacccatacacacaatgtatgtatcatgctagaagacttaatgacgtttcttggtttataagattgttctgtattcctgtctgtggttatagttgtcatacagggttttagtggttgatacttgtaagtgttttaaagaagaacctaactaacagaaacaaaaagcaagctcctaaattttttttaaataggtgtgaatagcctttgtgtttgttttgatgttggcagggttgagagatgtcagtactgactgcctacattgaccaattcatatacttttacctgacatttactaagaactcactcgttgctttcattgtgtagatacatgccaggttgcattttgccttagttgaaattccatgcattgttttatatctggagaaaataaatcatttcttccttgtgactgcctatcattattaatgattataatgtacactggacctattggagacttcttcattgcagtttttaaacaatttgatgaaaccttcctaggtggtccattggatacctttcagagtatgctaatggtagaaagggtcgatgagtctaattcctctgtttttttaagagggttatttatatgctatggaatagtttgagaatcctggcaagaagtgtatggaaagaatatggacattaaaaaaaacttttttttcctttgtcaagcactaaacttttgcaggtaattgtccagatatttttacaatggtagacaatatattttctagctaaaactgtttgctccaaggaaggagctaagcattccattttccttttattattccagagcatcgattgaaagctagattgaggataagtgagcaagttgccccataaaattacatacatgcatttgtgactgaagggtgtgaaaagcgatacttttgtacatttggctacagcttagttcagcatcggggctatgctttcacatggcccattttgaatggttcagtttccttactgtggtatttggttctagtcctactcatggtactctcccagagcattaaataatttaccgccatagggtagctgggttctaacctagctcagcagaacatttttctgctggattagattgaggtttcaggcagaactgaagaaagctgctggcttacaggatgacctttgaatctcatctgggttagcggttgatattttgatttggttactgtggtcatattgtgacagctgctagctcattataattcggttccaccgctccgtttgcctagcaggaatatttaggtttgtattacttcagagtgtttatggctaccctgagtttagcccagcataaaggtgaagtgttgtgagtgttttcaaatcccagtggcagaagcaggtgccacagtcttcttgtaaaacagcaaatgtgagtacatgctaatacagggagttttactcttcattgtaaaacagagaataaccaatgaatcagcttttactaggaaaagtgtttttggaagccttaatgtacaaaggaaaagcatgactacaaagaaacataatttttcaaagcacgaatgagatgttacctgacttcatggttagatattttgttctttgcagaagtgtgagtattagaaaatagtaaaacctgtacaataatggcaatcatttgatgtttgaaagttccaaaggtcaaataatctttagtaacttcataagaacggaactgtgaatatagatgtcagctctagaaattttagttcactttttaaatgcagcgaaattaggtagtgatacaagcaggcccctttgctagttcattagttagggacatcttggtgtgcttcttttttttttttttttttccaataacacctttcagcttgatgttatctcgacatcaactcttaagtgttggacttataatgtggcacaagtaatttctgagaaaggaaattattaattgtggtcttatttgattttactttgggaattttcatttctttaatgttaaatttaaaatgccctcctgaaatattaacaagtatgactcgtttgagcctcatcgctggtgtttttagcaatcttgattgttgagctaaggctggtagtcaggagtcaggagaactcagtttttctttcttctacttcttcctttcttcttctacttctccttcttctttttcttttcttttttttttttttttttttttttgagacagagtctctctctgttgcccagactggagttcagtaggatgatctctgaagcctcaacttcctgggctcaggtgagcctcccaccttagcctgctgagcagctgggacgacaggtgtacaccaccacatctggctaatttttatatttttagtagagatggggttttaccatgttagccaggctggtcttgaactcctgacctgaagtgatctgcctgcttcagtctcccaaagccctgggattacaggcgtgagccaccacgcccagccaagaattgagttttctattctgttttgctacagctgcctgtgggtcctctggtcaggtcgttttcacatctttaggttgagggaggaacagctctttaggtgatctctgagataattttattatctaatggtccattgatctttctgatatgtcattttatccttatactatattttctctttggagatgttttattgttctttctaatccattcatctctattttatgaataccttcaagtgactttgccagtgatgtgttttccaaatgtaattctttaaagcctaactaaaatagatattccttttatatctcagctgattccagatctatagctaaggaattggattggttggggataaataaaataataactcattaagttgagtcaccaggagaaaagttctgtgcatagatcagtatttagcatagaggttgtaggacctcaataaatgactgtcgagtgaatcagggaattagatagatagggtttaaacgttgaatgaaaagcccatacattaaagttaggcctataccttactgtaccaagaagaagaccctaaaccagagccagtcatatagaaattcacattttgttctataggactatatccttgactgggcaaaatattctgccaagataggaaacgggccatattacagtgtggcctgtttcagttttcagtacaccacagattattttatatataagcggaaataagtaaaatcaataatattttgggtcgggcatagtgcctcatgcctgtaatcctagcactttgggaggccaaggtggaaggattgctcgagcccaagtgtttgagaccagcctgggcaacatagcgagatcctgtttctacagataataaaaaaattagctgggtgtggttttatgcactagtggtcccagacattcaggaggctgaggtggaaggactactggaggctgggaggttgaggtcactacagtgagctgtgattgtgccactgcacttgcactccagcctgggtgacagagagagaccccattgctaataataataatacttattactatatttatatttttgtaattatataataataataattactattattattataaataatttgaaaggccattgaaaaaagttgcgtttctggtattgagctaagataactgatttccttttgtccagtcagaggacatttccattcttctctcattggtcttgtttcctttccggcctactctgtgatatagcacagctaatgctgtggtcctcaaacacttttagagtccaactaggtttactaatccaagtcgtataacatttagaagaatttctaaacagaaaaatgttacttgaaaactatggccaacagagatgtatagaccttctaaataccaggggaagatttctcacatagaaagttattgacccaaagagaagataaatcatttaagcttcacataaaagtaaaaagcaatttgtatcaggtaggaatgcttttgcttcgaagtaatggaaaatgtgactaatgatggcttaagaataatttttctcattctagaaatctggtggtaggtccctgctggaagtggtttgcagctcagtgatgtcagggctggtggctctgtgattcttttgtccttcccctcattgtctaaagatggggggtcacagcttcttgtgtcaagttcaggtttgatgcagaaagaaggggaagggtgagttgagtggtgtctccccaccacactgcttccccataacccaggccatctccagctgcagaggttggggcagggctgggaatgcagcctgggaaatagacaggagagaagcaagtttgggactcatactgggcttactaacttgcagtgttcaattcacactttaattttttaaagagaaaaatatataattttctatttaataattttgaaaattaagaacaaggccttaactttcatgtaataaaaatatataaaaagatgtctcagctctaatttctggtcagcaaattagagaggaagatggagtaggaaaaaagatactgtaaagaggaagatggagaaagtacaggcatgagcgtcttgcatgggaaggagcgtgaggtctgctgtttgcatctcaccttcaaggcctgtgtcttcattgtcctaagcccttgagcaaggcagcaaccagccaaagccagctctccttacctttgctttccccaggaccttctcttttaggtctctggcttgactttctgccagcctgtccagggcacccttgtcacgcaacaggcctgtagctccagccaccaaccactcttttctccagtcccctgggtggtctttggcagagccaaaggccaggctttactcccagtgtctcctgctgcacccatccagagcaggcctggcaccctggagcacgtccctgggacatgctgctacaagtgacagacaaagatctttctcctggaccattgcccaaacagtttccagggaacttacctccagcaacctgccatgtcaccatgaaacagtcagacaagaatgcctactgcctaggggagaaaaccctctattttcttttaatatgtacacaattgcagttgttgatttttaatgtggaggattaggtgcagccaaaagacatttagttttagacaacatgccaagactggatgaaatggtgagagctggatccaacttttgtccagaagtttcccaaccctattgaacagtctcatgtcatgaatcagacccattggaacagaggcagggggaaggaccatctatcattaaaggtaaccaggatgtgaaataaacagtgctgcttttatttagtagaaaaagtttttctctaggtttttacatttttatttattttcatgtttttatttacttactttctttttagacacagaatctcactctgtcacccaggctggagtacagtgacatgattatagctcactgcatcttcaaacacctaggctcaagtgatcctcccgctttagcctcccaaagttctgggattacaggtgtgagccactgtgcccagccaattctctaagtctttccttgggaagatggtttctctgaattttgcataagccctatacttaaaatgtgtctgtgacagtattaaccagtaccctacttctggactggatcttgggtggcggggttgcgattaaacactttgtgtttctcaaacctctcattactccatggcttcaggagaataacatcagtatagttagggaatcctgaacctcacatccttgaaacttctgtgtccaccttaagtgctgtattcatcctcaataaaaataagactgctttctttgttcacattatatattcttagaaccaaagaagcaaaggagctgttttgagcagtgcacatcttacagggtgtcatgggacagtggattctaggtcttcaggggtcacttcagcataattcttggcttttcacttcctagtgatgggtgatgggacattgggcaaatttcctcagagcccccgttttctggtttcccaggtgaggacagggatgccagcctggcccacccctcccaggctcactgagaaagatgtggtgatgtgatacactttgtaatcactgtgctctgctgtgtaactgttagggcattgcaaggctaaccactggtcatctgtcattttcgtctgggtaatgaatggaaaaatctatagactttggggttttgggtggtagcaattttaaaatacctataccttctaaagagattggaacagaaggcaggagcaggtggaggtagtatagaatgttcacttctgtaaacatcaagaccaaaatgaaaaggcttcttttttagccagtccacaaaacagtaatcctataaaataagtacctctttggggacagctgtgttggattcagatgctcccttttgtgaaatatttgcctacagccatgtttctctccattttaaatgttctcaagtttcatctttaaacacaaggccaagaacaccctggtgtggtgtttgagtggtgagactagggagaacccactgacaaatgcagatttctttgcctgtgttgtaggtcatctgaataatggagtcactacaaggtaccatggttttcatcaaggagatagttttacaaataccttccatattcttgggaatgttttggagacagtcctattccacttcatttctttcttctccacagatgcttggtatagaatgttgcctctgtatatgggattattctctcattccctttactccacagacgcttggtatagaatgttgcctctgtattggattattctctcattccccttactcttaagagtttttgaatccgaaggaaacatgttttgttttgagtaaaaggaggtgttcagtggatctcattttcttttcttttgcggaatatgaggcctaggaactaacaattgcaaaatatatggagcataggttgagattaaattaaatttatttctaagtggttaatagacacagctcgaacatttttcatcttcttgatgattgcttattaatcactccttaattccttgacacatttattaataggaaaaattgcaaggaagcatcatttgaaagtagtataaaatacagctggttatattgtttatgtttaagataaaacatttaaagctttcacgtaggttgaaaatgccacaagagaactaacatgggggaagtggtggatggtggacctagcagagcactgtggtcagctgggcattgctgtgagcaccagctcaccactctccagttctgtgaccttgggcaagtttctttagcactgtgatgaaatttctcatctaagtagttgccctgtgtttaaaagaaataacgtaaagccacctggccctaaaattcagttaatgcaaattattattacacctactattatgttatctagtctgtttttctgttcattgggtccgatcagcttggcaaaagtgatatgctaacttgagcatcatgtagtgaattctggcagaacgtggaagtgattaattaaatgccaccccctcgtgggccatattaaagctgaatgaaaatagaaagtgtgtaatatctgataacatttggtggagaagggggagacagaaaaattgaaggataagagaaaaggagacacatataaagctaattttagagcgatagatcacaaagtaagattttctagctttgtattatcagcattggcttggctttctgagtctcgaaattactaggttactgactggccgtgccttttcctcaccttggctattcagaccaagctgtactcttaacagctcagtagccaaatctgaatgcttcaaatataagcataaactctttatgtgtaactgattgcacttaattgggcaataccaaatcatggaagaaaatttattagtgaccctgtctccttcagaactttcagagtaattggaaatgagcctaatatccgtgtttttgaaagctttaacaattggtctactgacaggattaaattcatactttatatggtgtgtatgttttttcatgcttaagtttttttccttatttattgatggtcttacaaatattatttggaaattgagatgcagtgagcacagatcttaaatatcttggcagaccgcctcagtagctgtggatgatccctgttagctagagaaaaaccaggaaaaaaaaacccaacctggtacacaatagtttacgaaatgatctttgtgtgattttgaacaagctgtttttcattttaatctcagtttccttgcttctgttactgacctaactcatggagatgtggccaggagagggtgggagagctctctgaatttttttgtttctcctgaaataaaacagttctaaatagacatacttttgtgtgattacattttccatttttcgcaaagtcgtaggtatagtttgaacaccaattgagaataaaagaagctgccttctcccagtcttttcaagacattttaatagttaatgagattttgccccttaccctcatgagtttcatttggttctgaaataaaaatttacggctgttctctcagctgagctgatactagtttaagagtggaattgagttcacacctgctctggcataaaaagcctctatgtgacttctttgaaatattcacagagcagaataagagagagtactcactatctctacaactgtagtaactacacggtaatgttgcttgcaagcactttagagaagctgctctataaactgtctctaatctgctgatattgtccacagatagatgcctcccctaagtcacctgtgttcctcaaggtggaatgtggttgtggaaatgcagttggtttgtgtaggcagtgggtctacattaacactgtaaagtgtacatatgggaaaatctttgcatttgctaggccatttagccgttcaagacatggtccgttagtcaggcaacgtacaatggattttctgagtgttctagttaaagagcaggatgtgtaaagtagtatacatttaggcggataattaataattggtgtaggcttgtaaggctgtaatagaatatataaatttcagcacctgttaaagttttatcagagcagatcacctttccttactgtgagggaatattcccgcctgtagaaaaataaagtgctcccactacacgtgaaaaacctttatgatgaaaggaggactggtttttataacaaatattattttccatggtcactgtgattaggtgacattttagcagtcacatttagagagcgttcctagacaatagtattttgtatgggtttgactgtaggtggcaaaacactgcatagaaacaatattttagtgcattctaatattcagatacagtttacttgtcaaagaagccacctccccccccatatcatccccccacaaaacaatagggttgttcattttataagttcatcacaagtaaatattcagagcgaaagccttttctagtggctacgttggaaggggtagagaagatgaaacatagatcccaagttcagtttttggctttggttgtatcataagcagtttttacacttcatatcttagctgtcttcattttcagacatagaggaagtgctcccttacagcagtgagggaaagggcaaatgatatatttgtgaaagcaaagcagactatcttactgctttaaaagtttcattggctgcttgataaataaaattaacatgttatcgatatgtctgcaatcatatggtcctcagtatatgtattttttaaagccatttatataaattccatttattctagaagctgcccaaaatgataaacttcaatactcaaatgagtctttggttcgtacagtcattcacccagcaagtacttttggaaagctggtgatctgcaagccctatgttaggtactagatagtggcatgctacttttcttgctttcaacttggcccacatcctaataaaagaatcaggtagatatcagataattacaattcagagagttggggaaataatccatgtgttcccagggtgttgttgcatacatatcagggatactccaccatcagcttcctcataataatgtctaattttttttttttttgagacggtctcaccccgtccttcaggctggagtgcaggggtgcttactgcagcttcaaacttctgggcttaagatcttccctccttggcctcctggtggcagggactgtgggcacgtgccaccacacctggctaattttttctatttttattttttgtagagacaaggtctcgctctgttgcacaggctactctggaacctctagcctcaagcagtcatcctgccttagcctcccaaagattacaagtgtgagccactgtgtccggcttggctaagatttttttttctttttttccttttttttttttttttgagacagagtctcgctctgtccccaggctagcatgcagtggcgcgatctccgctcactgctagctccacctcctgggttcacgccattctcctgccttagcctcctgagtatctgggactacaggcatctaccaccacgcccagctaattttttgtgtgtttttagtagagacagggtttcaccgtgttagccaggatggtctccatctcctgacctagtgatccgcctgcctcggcctcccaaagtactgggattacaggcgtgagtcaccgcgcctggcctggctaagatttttgggtactcactgtgtaccaggcacttgctaagtactttacacatattatcctgcttgctccttataataaacttctttgttagacattgtcattaccattttacaaaggaggcaattgagaatcagagagattaggttatttgcccagtgttgtgtagctggtaagtggcagaatccagatttgaagcaagatctgctgaactctaaagccttgtccttacccaccactgcattgcctcctttgtagagaatttagaaagaattcccagaggtggaatagcagctaaacatgggttcagctgcaactaatagaatacctgataacaatggtaggttagtaaaacaaaggggtttttccccttcattttaggaggtgtctggaggcaggaggttgcctgtgtgagttcagcaaatcaatgtttctttcttcccattctgccctccttagcatgctgattttcattcttcagctttttcctctcctcttgcatttctttcttgcaagctggctcttgagcctcacacagcacattagagtcccctaaaggaggcaggggaggcagaggttagggtaacatttatccttacatatatcctattccatccaggaagggggaaaaacattaccagaatctggtggccttgagcaggattctgctaacaacttattggctaaacctctagcagacatctactcatagctgcaagggaagcttggaatgtgaactcttagagccatggttgggtctctgactcaagagacaggcaagggaggagggagttaggaatggctattgtatggatcaacatgaattttcttaataatatacgtggtaatgcctgagcttcatcttaaaggtgagttggttagaactatcctgatggaaagaaaattaccagttggtagagatgcttgagcagagccttgggagctggaagacgtaataggaatactggaactgaagtcattctgtgagatgactatgagatgtagtaccacagaggaagggatgacaggttgatatggcttggctgtgtcccacccaaatctcatcttgaattgtagctctcataatccccacatattgtgggaaggacctggtgggaggcaattgaatcatggggggtgggtttttcccatgctgttcttgtgatagtgaatacatctcacgagatctgatggttttataaaggccagttcgcctgcacatgctatcttgcctcccaccatgtaggacgtgcttttgcttcttcttcgccttccaccatgattgtgaggcttccccagccatgtgaaactatgagttcattaaacccccttttctttataaattataattatttataaattataattaaaatctataaattgtaccatctccggtatttcttcatagcagtataaaaatgctctaatacacaggtgaagctggaatacaatcctggccccagagaaatgaagggtctcttgtgtttaggagtggaagatgtcagattttcaatgaagcgtgtggtaaactactcaaggattgattttaaatagtgagataccatgatatgatttatgatttaggacactcaagcaactgtgaataggaggcaacttgagggcaaggagattactcaggaggtgattaaggcaattccaagaggaaatgatgagattgagctgaactgggaacaatgaagatgaagaggaggatggatttgagtgatattaaaatgatggaaatggttggacttggtaactgatgggcaaggcaggggtcgtccttggcttcttggtgtctggcttgggccacttggtggttggcagtgccatttgttaagatgtagaatatatgaggagaagtaggtcatgggggattaaggtggtcagttcagttttggaaataatgaatttttgacatgtctgtgggtggacagatttgtgattctgggtttgggattgcagatttggcacacaatattaatatttcatagttgaagtcatgggaatagataagttccccagagagagacatgaaccaccaccaacaaggcaatttgttgcattgtgacagctctaacttttagaaagttctcaattctgtagctgtcagcctgaaatactcatttttccctctgaagctaactagtattgtgtattgtctctctttccacatgttttgaaggatgctaatcttggcttccttcaaaagcgcaactggaaaactttcaacacattgtagaacatggtttaatcacaccttgtattcccggtcaccatcctctgctgtgttctagttcatctctttttccctccaagtggtgaatccaagtcttaccctagtattccagatctggtttgatcaatagtggatctgctctcatttttagtgttaatgcagtctaagattccatgtatacattcatattttaacattgactgaaaatggagcttgtggtccactaaaatcattaagtgtttttaacattaattgctttacatccagggcttccacatctttgtgtagaatgggacttaatacgtatcctcgtctgatttcttcatgttggttttggtctgcaaatgtgcaataattctgtcctttcactctgttgatataggaagtgagatggtgtgatgcttaggaatgcaaactcttggatttatatcctggctctgcccaccctttactacctgggtgacatctaagttgctttctctgagtcacagtttcctcatctctgtgttgaagatattataaaatccatctgttgggattgttgggtgaagtaaatgaggtaatgcatgtataatgcatagaggaatccccagaacatcatcaacactcagtaatttttccctgttactattgtagggcatataaggagttaatggcgctatttttgtgattgtggatcctttctctcagtattctttctggaatactttcagtatctctttctggagagaaagtttaaggcaagtggttcatctgtgacgaatggaagaaggaaatgtggttcttgattttgagttgtgtgatgaacccaaatttaccaggcaatagataggatatgatgattactaaatttgccattgactgatagttaactggctaccttgttgggtctcttgagaaaagaactaaaacaagaacaacaacaacaaaagcttaaaattacctgaaaatatgtctctttacctacacctaattttaaggcagaaaattccaaagtgagccagctactcaatacaggtgctgaaggttatgtgaaaattcgggttaacactaatgatagattgagaggtaactgtttgctttacaaaccgcttgccaaggaatgcccatattagactatgaaaattagactcatggcaaattttcaggaacatgattcttgtgataaacaagctatctggagggtgatgtgtgagctcacaggggagttttaagaacaggtttccattgttggacagtaacctgacagctaggcatactcagaggaagggcatagattagtatccaacaacctgttttaaaaccaagcaatgggaccccatacaaggtccaggttgacccgaaccaaggttagatgaacctgacttgtttttatagtaaacgtcacaatggtgacaagccagcagggtcatcagcacactttgcagctacagacttcccactggacaaaccattttcagcttcctctgtttggtcacacccacaagaagtacgaatggtatatttaaaaagctagtccatcttggttcatttataccagtgtgtaggatttctgtagactctgggctggttacaacctagagctgcagaagggtgcagagcttcatgtgttcattctgtactgtgataaagttctttgcacgtttgtggaaatgcaaaagttcttctatgcacctggcttctgttccggtcatttccttgtatatgggttttgatccggtgtgacggaagagggaagctatgcattctgagatctcagatttcattgtatccaattatttataagacctgagaggtgctttattagttaggaagcactgcagattttctctgtagcttttaaaaatcatcctgacttcctatgtgttattttttgcattggcacccattgccaatgctatgtctcagaagagccgagacttgtggccaataatccttagaaactgatggggctgtagaatttatttctctgtcaccctttttgaaaataaaataaagttatatttttcatttacatggatggacaaattggggtctttaaaataaaacctacttccccttttcattctttttctgatcatttgtagcaaaagcttagtggttttctgtagaactgctttgttttaaaaatcaaattgaagaccaacttgattctgcctgcagagcaaagctatctgcctttttagaaaatctggatggttaaattggaagcacgttctgcacatggtttagcagttagtagcctggaaaatgacccaatagccaagatagtttttttgtttgtttgttttttgtttttttaatcttcattgtaagtgcttgtttaaagtgtaagcttgtaatggactattttgcacattgttcattgttaattcttttcaggctattatagttctgtaaatacattgcctgctaagttgtgtcagtggagaaacattagtgctataagaaaatccagtgaaatgtgcttaaaagcattaccaattagcgcatgggactggatcaccgcgatttcttagtgatcctagagaagtcagtttcagttgacttcccatttatttaaaatgggtatgacaacgttctttttggagaatagggcagcacacaaatgcacactatgctgtggcctgctgaagagtttccactgatttgtgactatattactcaatattgctttgtagcacccttagtctaatccacattgaaggagcaaaatccttctgtatcttacttattatacgattatgtaatacatatgttactttatatataatatgtagtagtacttattttactatttttattcattataatgaaaataacaaatttactgggtggtatctaccatctagctcaagctgttctattttgtattgtttaaatttgagaaaagctaatattggttaataattaaaggttacaaaaattgtagtgggaaaggagttaaattctgtctctcagatagtaaagactgccagaacatggacataatcatgggaaataatagggtggatagaatgtgatttatctgcgtatgttaaagaaagaaaaatagtgatcgtgaatgtactgaatatagcttaaactatttatcattatgtacaaatggaaacttacataaaacccctgttgattaagttttatctgaaacaaaggatatgattggaagtggagaatgggagagtattttaagagcatgtgataatccagctagaagcttcagcaagtctgtggtcaaacaagagaagagaaagaaagagcaaggaagcttgatttggttatgcaaatttggagcacacatatgagtttggacctaatggattgttgcactggatttggtcatcaaatgatgcttttcatagcaaatattatctgagccattaattcaaacactgagaaatgcaggccatgtgtaggcagaaccacagcctttttatccctcaaaacaaaatgtaaaagttggccttgatggttagaccttataaagaagaataaggggggaagggggaaaggagcaagtagtgaaggaaaaagcacccagaatggaaacaggcatgcgtattcagacataaatccaataaacagacaccccaaagttatgctgtgtaagaatagacacacagtaagaaatttccagctatcaggctaacaggatggaaaactggagagcacagagcaattacttacgaagaaagaggcacagttgacatcaagtgttatagaggagactggcatgattacaggaagatgttgagaatatcagaaaacatccccaaattaagagtgccaaaaagaagaaagattaccgatgagatcatgataaataataatgagctgtttctcaaagtacctgaagaaggggcctgaaaagtggtttgtcaagcctggaagacagagaaagggtaatgtattgacggacgatggagacactgctaaaaaataaatgaaattttcaccccagtgttcacaaaggaggaggtggttggggacagatgtcagacacagacacaaatttcccaggggagaatgaagaaatacaaaagaaatcaggatcctgctaaaacaggtgatcaaggggtgagaagaagaaaatgaataaaaccccaaaaaccccaaagcttagcggtagtcacctaaaaatcttcaagaagtgagaacaaagaagctaacaagaagaggaaaaacatacccgcatcacttagaaaggctggaaatattttcatgtgtgtgtgtttttatctagttaatttgttagactagcccttttgaaacttgtccttaaaggaagtaagatagaatacttaaagaaaaatgattgtggctgggcgtggtggctcaccacccagagtggaaacaggcatgcgtattcagacataaatccaataaacagacaccccaaagttatgctgtgtaagaatagacacacagtaagaaatttccagctatcaggctaacaggcctgtaatctcagctctttgggaggccgaggagggcagatcatttgaagccaggagttcgagaccaacctggccaacatggtgaaaccccgtgtctactaaaaatacaaaaaattagccaggcgtggtggcacgtgcctgtagtcccagctagtcgggaggctgaggcaggagaactgattgaacccaggaggcggcggttgcagtgagctgagatcatgccgttatactcttgcctcggtgacagagtgagactccgtctcaaaaaagaaaaaagaaaaatgatcgtttaagtggccttgaataaccaagacatctttcctgctaagttcttttcgagttacccattatgcccagcgttgaatgtttactgtgcttattaaggatgatttttgtgtcctaggtgatcactgagtccttgattgggccagtatttactggatggatgcttcttagtgccagggagtgcgctagatcctggactactgggatggaaaagctagatactttctgagggtttttgaagtcacttcttcctcactcatataagcaaccccacctctttccaggcattgatttcagtgtgttcatcatccctggtcttgcttttaaccagctacttgatgggcaaaggtctggagaggggcagcctcctttgttgctggctcagtgtgctgtgctgtcctcagcgtggtgcctgctttttgcccttatcctcagatgtggatccctctcttcccaagctctcctccatcccctgtgctgcaaacaaaactccttgtttgttgctccccaccagtggccacgaaggaatttgcaaacccctcaacctcctactgttttggaattcatgaagtttttgccctgagcaagaggctatactttcaaaagtactttttcctttcttcattttcccaccccctgcctttcaaccactgccccgccctggtgcacacacctccatcccaggctgataactcccatctctatttgaaccacccactcccttctcttggcctctgtcaattttagggctcagcaaaactgggcttactaaaaacacctttcaatttctgttctcagcattaatctgtctttgcttagtgttcaaagaatactttaagatactcattaatgcaaacactgttatgaggagggagcttcacttcggtcccttcttctcaccttcagatactactgtaacagctgtgtgggactggagtatggaatgtttcagagaagctgcttctgagtgtgtaggagagggctgaagaaactttcatccagtacacagttttgtcctgtagtccttgttcccatggccaaaagtcttctggtaaaattaatctccagtgctacctttcctaccaggactgcaggtggtgtcttttagttgaaacagactcccgtggtcccttgattctcatatgtaatgttccatgttcaggtgtctctgaaagctgttagacttcatccaatggagaagggtccattgagctacatcactttcttttttcacatttgcgtttttttatgtagagtgagttgcagtttggttggctttttttctgggaatagatcactcttctggggactgtcagacttggtccctgccctgggtgagtttgccatcttattgagggggtactaacatgtgcgagacaactataatcatagcaataccaaccccacctcaatggctgagtgactaatgagaggagagagtgaggggctgagcagaggcctctaggaagcagctgtggtcaatcttagcctacatttactttttttttttttttttttgagacgaagtctcactccgtcactcaggctggagtgcagtggtatgatctctgctcactgcaacctccacctcccaggttcaagcaattctcctgtctcagcctcctgagtagctgggattacaggcatgcaccaccacacccagttaatttttgtatttttagtagagatggggtttcaccatgttggccaggctggtctcaaactcctgacctcaagtgatccgcccaccttggcctccgaaagtgctgggattagaggcgtgagccgctgtgcctggcctaaacctatatttactttgaatttcactatagtctaccatttcctgatgccttatatatctgacatatatctgatgagtgacattcttgagatgtctgcccaggactcctgaaccccatgagaaataagattgcactttgcagttcttcaaccttgctgtgcatctgagtaacatgtggcccattcatacactgcagatgcctgggctccgtctgtgagattctgtgtttagaggcctgggctgggatctaggcttctgttatttaaacaggaatttctgacctacacattgcttcaaaaaattgtcaattttgttttcaaaattgttattttttcttgaactcaatacttatttttaaatcctttttcactcaggaaaagtgaatcatcacctacttagcacctaattatttaccactaagatatttgtgtgcaaaaaattaataatttttagatcaaagaaaatggataacttctaatatgttaaaatcgtgcatatttccattgagagagagaatgggctgaaattatccctcttttatattttaattgttcatcaaattgatagatttaatctactggccctaaagatttgcttctataataatgttgtgaatgaaaccttcattgctgtagattcacaattcaacatcatacgtatgtggtaggtgtgatttttcttgtattaaaggaaaaagggttagcagatttttaccaatttagaaaaaaggcaagccaaattagagggaagtcagcattataaatatttcgaaaagaacccccattcattattttttgtaatgtgtagctaagaccaagcaacagtgaagtgggaatctttgccttatgcaaaatggttagggaaatagctaaggatgctaagaaattagcttcaaaattggttgtaggcatgaatgtttttctcagggacttgggtgattttgttacactttctaatattatctctgctatcttctaggacttattttgtgcagtcaaagactttttaaggctgtctgttctgtaaaagaaatacaaactccaagttgtttgattttatgagttttgttgttgttgttgttgctgttcagtctgtaaaatagtgacgtggataataaagatatttagttatatgtccagtgacctttggaataataaaactgtttttgtctgtgtgggtttttcacatacaggtaatgttttgttcacattctggatacagacctgacctcaggctgctcagcactgcaatttcataggctcctatgaggtccccggctaacattttgactgtggtggtagaccttcacctcttagatttcatatatctttcattttgcttcttttgtgcttctgttgaattctgtatatttaagaaaattaagatgcagagagaaaatcggttaatgtctcctctgtgtcttgtaatatgtggcccaaacagaaagaaaatgtatggaatttagaaattttatttacttgttttcttacatcatagaataccattttaccattgaaattattaaaacctgcttttattgagaattttggggaagttgaaaatgtaacctttacggggaattaaagctgttttattttaatgaataaagtagttaaattattaatcatataaaattatttctctggatgttaataaccatttctttacccaggaacttttttctaatcacagaatcttgattggtggtttatttgaaggcatatctcactattaatggttcaagaatacccataacttttggaaagactcaaaacatattgcataattggattttaagttatgttgtttgtaagcttatttgacttgtatcatgtagtgattactatcagtttttctggatgtaggtaggtgcttcttatgattctttcatagatagtattgagtcattcattaagtctattcctcagatgcttattgagcatcagacttgtgtcacatacttgcacagcttggtgttggagatacaccctttatcaccacatacttggagttgctttttgtctgctgtaagacacaggatgtagtgaacaggccaagagaaatatagggtcctgtgggagctccttacagggagggacatagcacagagaaactcagggtagttgacatttaagttcagatctgagtgatcaggaaaacagccagccagagggagctggcatgggaatggatggaggcgtgtttgagtcatggcagccagatctaaagaaggctacaagtagagagaggactgtgcatttctccttcccatcactggaagaggaagggtatgaggagtaggctctacatgaacatgagagccagctcatgaagggctgtacaagccatgtttcagtgtttatcattcattctgcaaatacatactcagcactatgtgtcaggtacttggcttcaggaaacaaggcagaaaataatgcctgcccttgtggagattttattcaaatggggaagagacaaacagtaaacatggcactagtggttttgaaaatgggtcagaagtatgtgtagtccaaatggttacagactcagcatttgccaatatcatggagccaaatctaagactatttaataaaaataagtttgcaatcatttccagtcctcagctgataactacagatagacttattcttaactcaacatatttacaggtaaagttgaaggttacctatcatttatatttattgctcactcacattgcatcaggcattgggctaagcaagcaagcaaaccacatttgagagaaggtgctacagtttagtgcaatcagtatttcaagttcaccagagtagaacttaagagtagaaggtttatttgttaaataagaatacttgaccttaatggctaccaaaaaagagttggaagaatgaataagatctagtatttgatggcacaacagggtgattataatcaataataatttaatagtacatttaaaaataactggaagagtataattgtattgtttgtaacataaaggataaatgcttgagttgatgggtactccatttacccatatatgattattacacattataagcctatatgaaaatatctcatatacctcatatatacccactatgtacctacaaaaattaaaatacacacacacacacacacacacacacacacacacacacacacacacgaatacttgagaggtgatcagaatgtcctgtattcctggccgggcacggtggctcacgcctgtaatcccagcactttgggaggccaaggcaggcagatcatgaggtcaggagactgagaccatcctggctaacacggtgaaaccccgtctctactaaaaatacaaaaaaaaaaaaaattagccgggcgtggtggcgggtgcctgtagtcccagctacttgggaggctgaggcaggagaatggcgtgaacctgggaggcggagcttgcagtgagccgagatcgcgccactgcactctagcctcggcaacacagcgagactccatctcaaaaaaaaaaaaaaaaaaagaatgtcctgtattgctgtttgaaaacacattaccagaaccagaattcttccctgaagttttgaacaatatcacaataacagaaacatctcaagattttatcatgcagccagcaaacaaaaaaattctacatagtgattgaagtagacatttgcttgtcactcaagatgaattattgtaaataaggagtttttattacaatgaacactttttttggcagaattaataaagagcagaggatactagaagtcagtgcatagaagcaaaaggagaaatgtagttgagcatagtgaatagagaagatttgctttcgtttatttgccctatacattaagaccattgaatgagactattttgtgtatgacaagcatttgaaaaaattgttttactctggcaatcttaggctgatttgttttatttcctttagaataaaagttgcaagtgggtaggaattatgccttaaagtgttagcctacaaaggactggaaaactactcaagggtaacagctgaagaggaaatggctctgtcagtgtcgtgcgcatggatgattgggcacataagggacacaagcagggagaaaggtgcagagagaagagctcataaaaccaaggaggcttgcttggaactaaaatagaatagcaaaagtgaaaagcctggggagccactaatgtgatatagtttccctcgtaacataatgcaaatatgtaaagttgaaaacgtgtgccgcctcttgcatagacattgctgtcatcagcagcacacacagttgggtatatttggcgaggcatttaatctcctggctctctggtctctcagtccatatcaccagaggcatgtattttcaaaacagtccagatcaatgtctggtctttgtatctgtggtacaaatataaagcttacttgtccacataacagcaaagtaaatccgtggtccattaacgctaaattgtaaatagtgatagtcacttttgtccaacagtgtctgtaatgtttattgctaaagcccatacatgtttattgatattatcctaatctgggaacagtagctgctagttatctatgtgccaaacactgtgctgctgtttgcaaattttatctaatagcaactgtttgtgaggagcatttgttatctgcattttacccataaggaaggtaggagggacagaaaggttaaaataatccagatggaggacccactcttggtcactggtatgttttgggcttagcacacagttctgccagactctgcaacatgtgttcttaaccatcagactttatttctctggtgggcaacacaggtagatgtgacaggttagaagtattagatataaatataagttatcgagatgatatgactaccgaattcactactgcactttttttacttttttaaaaacatgtatttcagcacactgctaaaccacagcaagaatctttttaaaaagaccttacaagaagcatgattacaggtcacaaaatcaagggaaaatattgtcatcattattttttaataagtgataagtgaggctgatgagtgtagacctgttgctttattaatagaaatatgtgcatctggtgaggacttgtatttgccaagcacactgctggcctggaattagactcctctgtggaattcaggtcagtgtttacacccatagtagtttacaatctttcacaaatttgagcaaaatattaggaaagcacttagaagcaatttagagaatcagaattaaagtagaatcggtgtagcatgtatgttcagtggagaggggcgagtagaggagtgagtttctctgacagatgatgaatctagtttgtttactttttgggagaccctgtttccacactcactgacatgtgagtttgcatcctggctcaagcacttaaactccccagtctccctttctgtgtgtgtgggatggagataacaaggccaaccttacaaggttgtatagggtaaagtgcccagtgtaagatttgaagcacagtaagtcttcagtggggctaggttttctccttcctccctgctacttacttcatgaagaggatgaataagtacaaatctctgttcagcgctgcaaaggaagattatcatatttatttatttatttatttttgagacagagtctcactctgtcgcccaggctggaatgcagtggcatgatcttggcccactgcagcctccgcctcctgggttcaagtgattctgctgcctcagccacccaagtggctgggactacaggcgtgtgccaccaggcccagctaatttttgtatattttagtagagacagggtttcgccatgtttaccaggctggtctcgaactcctgacttcaagtgatccatccaccttggcctcccaaagtgctgggattacaggcatgagccaccttgcccagcccagattatcatttttaaatgctgaaaacctaaatttcccattgcactgtgctattactttcacagtgttgactttcagagatatccgtgcaccgccttttggtagctccctatgtcctcttgcttctctagttgccatttctttggaagacccccccaacattagttatctcattttccatgagtgattttgaaacccagtttgtgccacagtaaaatttattgaaatcaaagaaacagtggatcttgagagataccaccagcacctgcagtcttaacgcttcatctcctctcctgacctgggtccaactcatctttttttctcatcaccgcctgccgccatcttgtttactccaagtcttcaccgttcagtcagaaatacaaagccctgcatgggtcaggtagtcctcagagaaggagagaagtaagaaagaaagtggaggccggccacggtggttcacaactgtaatcccagcacttttggaggctgaggtgggcggatcacctgaggtcaggagttcaagaccagcttggccaacgtggtgaaaccccgtctctactaaaaatacaaaaattagctgggcttggtggcaggtgcctgtaatcccagctactcgggaggctgaggcgagagaattgcttgaacccggaaggcggaggttgcagtgagccgagatcgccccattgcactctagcctggacaacaagagcaaaactccgtctgagaaaacaaaaaacaagaaagaaggtggaatcaaagggatgtaggggttccacaaatttagatgagatgtcaggtttctcagatgtgttccttgatttgaggtaggtgatcttagaagagctgcaactaaactccaactggctcctttttcccccatgtcttagaagaaaatgtgcttcgtttttattctcttgacaaccctctgcatttgcatctttcagcttcttctaacttgtgtctcctgggacctttcttttcataactctattttctttcatcatctgtctttcccctgactccttttccctttgcttcaaaatgtgcaaatggatcctctcttctctggcagtgattatcaaagtgtggtttctcggcgaaatgtgatcacttacttcaaatctcctgggatgatgtgaaagttgggacccacttcaggcctatgtgtcaatacctcagtatgatatattccagcaactttcccaaaaaactacttagtttccaaggcagtttggcatctcctagagtggcacagcaaattccatgatttttttctagccctgttcgttttgtcttttaaaacctgtctccctcaacatccacaatgttaaaaacgtctaacttgccttctgtttcgctcactactcttttttttttcctgctttctgcttctgtcttcataagtgcaggcatgggaagagctgggaatttggagtcccagtagggtttgattccttaatgtcattgctcagtagctgcgtgatcttgggtcacccatgtatcttcagtagggcatctgctttggaggtttgtgtggcttgcaagtgtcatttttaaattgggagcccaaatgcaattgtttgtgctctaaaaatctgcctcttccagtttgctgttggaaaacttggaaattattggctttgccagggttgtggcctctggatgagagctaaaaggtgaacagccttttatccattctgcttccccccacttactcagggtcctttcctgttacaaatcatagtttgtatggcatggcaagtactggaagggagaaattctctccagtgagccagaaaatgcaacgggatctgtttgtgattgatagagataagagtgcctgatctacttttccctctgccagaaaagtatttttccctgacagctggagacatcaaaggtctgaagctgtgaatacagagagatgaatgttctaatattaatattatatttaaaaatataccacgtaacatttaacatcaacatgtctagtttcctctgtctggtaacccccagtcgtccatatgcaaaaagaggaattccaatcacagaggtcctcactccaaggagacaggcaaccattacgtgtctgtgaatagctgagtaagccaaactgtgatagtttctgatagatcatgtcaagacctaaatagtggaatcttcaggatttggaggtggggagcaagtcacctggattgatgaggactcactgatgaactgaccaaattgttttttttttttttttttttttttttgagatggagtcttgctctgtcccccaagctggagtgagtgcagtggtgccatcttggctcatcgcaagctccgcctcccgggttcacgccattctcctgcctcagcctcccgagtagctgggaccacaggcgcccaccaccatgcccggctaattttttgtatttttagtagagatggggtttcaccgtgttagccagatggtcttgatctcctgaccttgtgatccgctggtcttggcctcccaaagtgctgggattacaggcgtgagccatcgtgctcggccccaaatgggctttttaggagttctcatggaagagatggaagtttcttcttgagtgagagcaatcccagagtctgatatttcacctagtacatgggaagggaacatgttttgtcctaagccaggtgtgaagtatagtcattcatgttgggcaaaaacgtggcaggacttggaacttctgtggggacccacaaaggagaatagaggagaagactccatgaaatttctggtcctggtgttgtgtggatggcccagggccctggccagagagattcaactactaggtgaggtttttttcactttagacaaccctgctaagggttcatttcacttatatgccgtctgtgggcctttgatggttcttttttcctatatttgctatggatatatttatgcatttaaaaaatttgcatcattgtaacttttcattgacaaaatatatttaatatgctcggtttttacagttttgcttaattagtttttttcccacttatatttattttctgtaacttttctcttttttgttgtctgttttgctctattaagatgttatatatcttctcctccttctccagagtagacctctcatcagttcaccaaaatctctctccagtaagagtcaggaagcttaccgtgtgacaaccccttcaaggcaataaggctccaactaagggattaagattgttttttgacaccaaacattgtttatcctcttaattttgagctatgtagcctgaaatccatgctctgtgatgaaatggaggtggtttatctgagctttaatactcttaaaaatgaagataatgatagagcatagtaatgaaaattaaataagatgcatgcatctagcagagaagctaagaaataggagattcttaacaaatgtaacctcatttcttctttagtttctgtaaaaccccaggaatgttagaaaatatctaggtcgaaaggagaagatcatgagtttggtgttaattttgaggtacctttaaccagtcaagtgaagacatgaagtagacagttgaatttaagggtgtgcagatcagagatgtctgagtggagagtctgcagttgaagagctgtttgtagagatgccagttgatggtatgagattgcttatggagtcttgagtaacaggtgggccttgagcctagcagtagaaggattttcaagatttaaagacattcaattgagaacaaaagagcatgccagggactgggagagaagggaaatgtgatgttatggaagctatgctaagcatagttttttaagaaggaggggatgggtgtgtcttttttggtcatcaaggaagatgagtactcaacagtgtctcttggctttaaccactttagtggtcactgttgacattttcagagagttttcttggtggaatcatggaataggaactgactttccatccctcagagttgagttgtctttcatctgacttggcaaagtatttcttttatgtacttctaatgtgatttttctctattgtttatagttgtttgcacttttcattcacgtaataaattatcagtttcctgaagacagaggtcatgcaaaatcccatgtaaattacacctagttaagtatttagtcttagaatcattggttctcatgatgaacaaaacacatttcttggtctgttcatttattcattcattcgctgaacagtttttcatttaccaattccatacaaatagcaggtactattttaggttatgtgaatatagtggtgaacataagatactcccttttctgtaaactttcattgtaggtggagacagatgagaaggaatgaatacaaatgttgagggcgttcagtgtcttcacttatttgttcctcacaacaatagcatgatgtagatgttattcctagtcctatttcattgatgagaagatggaggcatcaagatatttagtaacttgccagggttctcagttcattggaaacagggatgatgtttggagctaggattcaaacccaggcggtttgactctcagatccactttgctaatcatctcactacactgcaaagtgtttggcacggggaaaatcattattcttattattaatgtagttaatagtaactatttctcaagggagctgaggaatcatttactctaattcagatgagaaaatggacactcatacagctagctattggcagaactgaaatttagaagccatatttccaggctccccttccaatgttttcccctcatccagtacctcttctttaaggaatggagtatggaaaagggaaaagaagctggaagaatgaaggaatgggcaaggagaaggaagggtgtgtagaagagatataggaaataattaaacctgttggatttggggtttttgatgctattgaactgtctggtttttaaagtttttttcccccttatattctcaagaggtagatatccttgaaatgatatcttcatgcaaaatagtgttttatttcatctatgaccaaaaaataattcaggagctaggaaaccttagctccttaaaagtaaaagactgtattttgggaaagaacattgttactggaatttatactgtgatgacactggttggtagacacactagaagctttgaggagtgtgtgtgtgtgtctttgtgtgtctgtgtttgtgtctttgtgtgtctgtgtttgtatatgtttgtatattagtatgatatatatagaagtacatatttattttataaaatactggtagtgtttaatttactttgtgcatactctttaggggagagggtattgaaatatttttctgggttggaaaagtttttgtacttacatgcaaggctgctctaaaatcaagcaccatattgaaacatcacaaatatacactaagcaagggacagatgcacaaggaatttaagcagagtttttctaaatggcaaataattagaggggaacagatgcctatgggcagcaaaggatgaaatgaggtaccaggaattttaaaagggagatggaaatacaaatgtagaatgcagttgctctcaaggatgtttaagcctagagggtgtgcttgcccaaagttcactctttttgtgggtattgacttaaatttggttctctcttcacctgtcttccccaaagaagtagatgatgctaatcattctgaagtggaacagattttctgtggaacctcagttttggatgatctgtggctgcatctctttcttctgcctccctagggtcttgtccttttataggactgccaggatatgacatttcacaaccatgtcagttctcacttatttattatttataccccatatccttccaaaagggtttttaggtagcctaccaataaaagacacgtatgaaaatatgtgtgtgtgtgtgtgtatatatatatatatatatataaaattttttgtcttggtttgtgttttaggatggacatgtcccttctttagaaacaagtctgctgtaaaatgggttgtatccatctcagagctattctgcgtagtcttgatgtggaaaaggaaacaaatctccaagaataaagtagagcactaggcatttcccatcttcctgtagagtggtagtttaaacagcaggggcactgagcagagcgattgagccacccagcaaagctgagctgtagcacctgatcattatccctcaggtttaagatttacctgttgtgctcattgtaacaaaagaaatgaaatctctgtaattatattggaagggggaggagatcgtgttttagttcctttgatcttgagctagaataggctctgcttttggaaatttaatttgaaagagcccaacgtacacatctgctttttgtactgcaatttctattgagcttgaaaatagaaatttattaatgcaaatgtgtagagtctgttccttgaggaaaagatatactcattcaaaacacaaggtgatcccttcctacatagctatggaagatgttaatatgttttctgttttttttttttccttgacttcagatatgaggttccttgctaacaaggactaagcataaaaattataggatccattggggaatggaaagattcattcaatacttaaaagtttccaaaggacaaattcattggtgaagagctgggggaagcatactgaatcctcaaaagaaaaaaaaaaagccaaaaacaagtgcatcatcaaaccattctgagaacatgtttgaattgatgatagggcccatgctaagagacaaagctttcatttcaacgaatccaatctgcctagtgttgtgtaaaattgcctttgcctgtaaatggaatggcatgcagattttaggtaggacactttctcacccaacttagcctgtactctatttcattttttccaccattacatgaagcttcacataaatgacaacttgacttaatccttaaagtggctggattgtgtggtctattttgattaaactttttcttgttcttagtgtaaattttcagtaatgcctaaaatgtcatgagcattttgggacataaatcctttaagctattttgcagtcatatagttgttctttggagggtttgagtgctttcctaaactccttctcatctctaaataggcaaaataaattataaattgtcgagaacattcaatcactcttcggatgagcaggcatctcctaaagctggggaaagtatccattttcaatattttgagtaaatatagttgattctttataatatttgtactgtatcaaaagatctcaaaaactgttataaattacctagacttaaggaagaagacatgattaaataattcattggatcaataaaaccaatctgcttttttctgatgtggtgtgatgaagttttttttcaaatggggtaggtgggcctcagtgctgtgtattatccttttgattctattggttactgtctttctctgctccccccttagttgttgtttgatatttttgtgctttttgtttgttttgttttaaagaaaggaaagctgcaagccatagaaagttaggctgtgagttaggaattctgagtttaaagcagggagcctgtccctaactttgtgtttaagttggtgtttcagttatgttgccagtgtaagcttgtgacccttacaaatgtacaatttcatttgggttcagtgattcctggatgagtttgtgatataggatgccaaaggctgtggaatttctttaagacacaaaatcttgagacagagctgattccttggaagcttgtgggtaactagagtctcatgttaactaatctggagggggctaagaaaagtcttcctacccacttccaattaattaatttctaacatttccatctaatcatgactttgtcgagtgacacacatcttttttcctcacaggcaagaaactcacacacaaaatttctatttctaatggcagacagttggggtgccgcagccaagcagtcacccttaaaaattaatgagcgtaatgatggttagaaaagcgattctgatggtggttggagagggaggggccatggggatggcagaaggaggaagaccggactcctcataagtgacaatgatgtgagcccctgtcctcatctcccctcccatccccccttccgcccagtcaccaccccttccatcctcctctctttacaggagccaaagcagatagaaagacagggcgattatgaagacgtcagttggagtgtaggcaggcgagaggggcgcagcgccccagatgaggtccggggggagctgaggagggtcactcatggacgaccgtgtgtgtgtgtctgacagactgtgaaatggtgcgttgttgcacggctgcgctgcacctgggcccttcatctgtgattgattggtttggtcatgtgtaatggtcccatctgctctgtgttgtttttctttttttacttataaacaccgttcccagaggctgagagaggatgagctatgttttgtcatcttcacttacactttagctcaaaaaagtggtcaagtaggtaagctctaaagtctgtccaagtaatgtagtaggaaagtacggtttttcccctttgcttgattgtgtgtgtgtgtgtgtgtgtgtgtgtgcgcgcgcgcgtgtgcctctcctgcgcacgcgtgtgtgcgtggagttttaatgctgcctgttaatatctgaatagttcgtgaaccacggaagaccaaaatatcgcagaaatgatttgcacaactctgtgtattgtgactcttactgcagtgaggatttttttttgtaacggagccaatacttaattaaaaccgctgacatcatggtgttataattaagcgtggcattaattaagctggaataacgatttttttttattaagaactgcttctattgtataagaccattatcgcctaaaaacaaaataattttaaggcaaaaataaatttgctttaacctagcccttttcaacttcccccaaagtccggcctcaggactgtcatcatcagggctccgagtctgtgtgtgcgtgtgtgtgtgagcatgtgcgtgtgtgtgtgtgtgtttggtggtgttgggttgggggagagtggaagtgaaatttgttttttttcacccaaaaatgctgatcggctcctggcattctgatggctaattatgcatcggagagcttcgacagctgcattcatcatcataaaatgtaataattaatgacattccaacaaagaaaaatatgcaaatgaggactcattagcattttcatattcagctttgataatgcttttgctgacaaggttgtaattaatgaaaattcatgtcgcagtcaggagattggatcggtttcattccgctcacaattcccaaatgcttgcattatggaaaatcggcggctctgccaacttttcagggaagaaaaaaacacacacacacactaaaagcaccagatgcaaattaatggtagggagtctttaactctttaaaccacccccctaaatttccatcataggaaacatgtgatgagtgttagcctaagaactagattctcttttttttaataataggaaagtacttttatttgtgacccaagtatgagaatttctggcaaactttttttttaatattaaaaaaaaccccccaaaccctccaccttttcccttctttccttttccctttcaagactatttaaatgtacatagtaaaacatgttaggacagccaagccccagcatgttgtgttctgtcctctggctggcagattcacgccacaacagtttattcatccacatgctttttggcgactcttcatcacgtatttgggcttagatcttctggtgcctccctcggcgtgctacccataaggtcgaaagaaaagcaagtattcgatttctctattcagggtggggttttttttttttttttttttttggatgatagtggtttttttttttttgtgctttttctttttaatctattccctttgtggtttagtgtaagagtttgagaatgtgcccataattctctcactcaacacttctggtttagtgttgttcttcaaatgtaattttaggagacactctgcaatcaaaatggaaacccagaaaccccagagcagagatatcgacaaatatttaacacagagagctgttaatttatgaaagcctctgtgtgttgctttcaaaatgtggaactttaggttggcaaatgtacacttgatgccaacctggtaccatgtttgacagacaagcctgaagttaaactgaaagttctatctggccctcaaggttagaaagaaaaacttaaacagagtctgacttcattttctatttgatctttaggttaaaaaatgatgattattaaaactggtctttttgctgaggcagatgttttaataaaaggtttgtataatgattaagaaaaagggaaaatagaagtgtacttctttataaattataacgtttataagcattttcactctcagatgaataaaatgacttctgggagttcctaagatgcagtttcctgtttatttaaagttaaattgtaattcccaaagttgctagcccagcataaataaagattataatacgccttgttaagggaagagagaaactttgatatgcggggccttattttttagagtatttcagtaaaacagaaagaatcatcagttatttcacgaaaattttaaaataaatcttttttcccttgtatgtgattaagaatgactgggtttcattccttgttaaactcttggggttccaagaaacagaattttatttcaatctcttgcttcttccaacttttattttgtcacagtttgtacatgaacctgtgtgtgtgtacacaggcatgtgtgtaaatgtgtgtgtgtccatgtctaaagattatggtggctctgtcctctctcctgtaaaatctattgtggtaaaatagcaggcaaaagaaggttttactttttttttttccttttagtttatttctttttttgtgtgggcaaactgcccatccagatggtagaatttcacctgtaagcaatctgaaacgataggttaattctgacattttatagagctttttttattttcttttcacacagtacaactaagtgcagaataactgctcaagataatgtttcttttttttttttttttcttttaaagcgctttctgctgtgattggttcttttttcccccaaatctgaatttggggctcatttaaaaatctgtggctttaggcactttgctgttattgtcaaaaccacatctaatgaaatctttgaccagcttctaatatgtgtaaatgaggaagtgatggcagaagtgaaaaagcaggttagtcgccgagaagcagatccttgtaattttataacgctgaacgttccactggctttgataaatttactgttagttttctcctcccaccaaattcacagatgtataccaactcataacttcccaagtaatgcctagcatggtattagcccccggaatcctgggacttgcttttgttgtcagtgtggttagcctctggtggcttatgtgactgagtaaactggagaaaaacttcagggtgattcgttgtcccgtgatcaaggaatcccattatttccaaaagcgggttagaagatgtttttggagtagagtgtggaagggaaagggagtattggagattgtttttacacataatcatggtaatcatgctgtgttgacaagttagttttgaatgtgccaccttcttgtttttatttctagaaaaccttcattttcatgaattatttcttgagctgatgataaagatgactttagagacatcttctcccctggtgtattcctttagggaaacgtttttgaaagtgtttccctttattatacctgtaaggcttgggacctttgtcatggcattgtttgttgttttttccgtttcctgttttgcacgtgttaattcctgtgggcattttctttttaaagtgatgggatttccactgtccagcagcaagccacatttactggagttattgaactctgtaataggaaacctgtgggtgatcagttttaccctccctagaagatactgcttcagtcaatgagaattacagccccatgactgagaattttaaagaaggggttccactaagacacccagatgttttgtttcaggtgttgcaacaaaatcaacatttgtttgtgggcagcgaagccagtgttcctgccagtattcccgttcagtcgcttctcatatttcccttgcaaactttcccattggttggggtctgtggagagatttcagtggctggctggtggaaatgtttgggagaacatttgcgtatcaaagcaacctaaatatttgcaaaaatgtttgcttgagaaaaaagaatccacttaggattaggaagtaactgcttaaacattttaaaagcatttgtgatttccctaagtatattactcatgagccactgcctaacctgaatttcaggggtcactctggaatctgtatatttaaaaaccctataagataataaaggttttgctttatgattaagatctgaatccatacattaaaatgaaaaaacacttgacaagacaaaatatattttaagaattgtttatcatttagtgaacctgcaaaacaaaaggtgtaaagaaagggcctcatgaaatggttggatgttgaatacctctaacgtcattctttccctctactgtagattttttgttggtaaaacccaattgtattgctatgatatgacattccttctgttggagtccataagctttcttccagtggtaatgatttgaatgtcagatctttttcttgagtttaatgtaggcattttctgtccacattattaaagtttcagctacattttactgatggtttggaaacagtatgtgtaaaactcagtgtaggccaatttttccaatttgttaacaaggtaggagttgagcattgacaattactgtacttaaaagcccctcggatcaggtgttattttaccatctggacattttaattagtaataaaagtgtggatctggatacacagaaataggatctacagtacacaatggcccaatgcactctgttggtgctgaggtgtatgtggctacattttataaatatgtatgtatgtgtgtgtgtgggcaagtgtaattatgtgccaggtgtgtcctttttcaaactgggcactaacacaacaccaaagaatttggctacttttcttagataaaaagtaaaaatgtataatctataaacttgcacataagtaaaactgtatctttttaatgctcctacttcctcaagtatggcatgacaaaatataatgctgacatttaggtaggcctgggcaaaagatgtgactcttctctttcatagctgtgtgctctaaggcaaataaattaaccaccaagtatcccttttttctcatattcagaatgaaagtataaatgataattgttatggtatctacctaacaggattatgaggaagctcatttgagcatgtatgttgaaaagcacttaatgaaatataaggagtcataacagttcttaacaattgattgttaatacaggatgcagatgaccaattcataccccacataccatcttttataattcagtaaatcatctcatatttaaaaataagggagatgcaaatataatgttacattagattattaacaaatgataagtttaagaccaccagaaaaaaatgtgttcataagtttcaacataaagcaaaatgactcattcttataaagtatatacaggctcattgacgcaatgttatccttaattaaggcaaaagcgatgcatttgagggaaatagtgaccctctggagaaatagagaatgaaaatagtttagggaaatgagtcttaacatcttctcttttggaaaaattcatgcatgtttctcttaatcattatgaatttcatgtttgcaaaccagtgtgaatacttaaacgataatcattattgtttagaatctacctattactacacacacagatacacacacacacacacacacacacacacacacacacatttgctcaagaaaatcatcctcaggaagtaaaggagttgataaaattaccattggagcagatgagtttggatacttctactgaaagctgtttcagtttttattataggtacagttctcccccgagaattctttgggagaaataaaaacatttgtttttaatttaaatgagtggtaacatgctgtagcataatattaactatttcagtgattttatcaattttatcttcctctgccttaatgtaataaatgcatatcttgattaagtacaaatctttacattacgttgtccctaatgacaaatattattttaggcaacttagttttaatcatcagagtgtcttagggagcttataaaacttgtctctgggacatggtattagcaggatgtacagagttcctttttggtgccatgctaggaggagagactgacagagtcagtccagtccattcattcatttgatagataataagtaaaccacagaagaaacgagaatatgtcagttctgactgtacaggttttaagattttttagacttaatattgaaaactagttttacttaatgttctatcagtttcatttaaatgccctaatccaatgatcactttcatttaaatatcctaatctagtgagcagatagggcttacatagcatttgtcttgaagacgttttaaaaatgcagctgcaggtcctcatctttgaaactccatttggtaaaaatggccatgtctacctttacctgtagatttaagtgtccacagtcgcgggatgagaaaagaaattgtgacacttcttgaaaaatggtctcatcaaagggattcagttgaaaatgtgagggactgcatttaaactttgataaaaaaaataagtaattctaagtaaagtctgtagccaaactccttaattgtgatgcatttgctgagttcccctcttccgtcgtcgggcctgctctgatgccatatggcctaccatggaacatttaacttgtcagatataatggattgtcctggaagcagatttttgctttgagcactcggctcctttcttgcatttcactctcagctccaggctgcaggatgaaggattgtggtagaagtgcaaagaagagacacacagttgattccccttaagagagtgacctatatgccacaaaattttacccacgtaaagaggcattatccccgtcactggccttagcaggctgcatgtcaaagtcatttaaatttccctggacttaacagattgtgtaaacatttcagaactgagagcttaggaataatgaaacatcgtcattttaacttaggcaaaaatggtgcagccatattggccaaaggaggcatattatttattgtgacctacatgtaacgtagaccacctggtttttagattctataaattaagttctctcaagtttatgaaggatgctaaaaaatatatatattatgatggaaatgttacttggctttattgtttttgtttcgtgaatagagaggtgaggttgaaatgatcatttaggaatcgcttcttagccttttggctaagatcaagtgaaatgatcatttaggtggagggacagtggcagctaattatcctaccaggctttctagcttgaaacttaggggcagaccttccattcattctaacctatttgaaattagagattggatgtgttatggactatttaatttttatctgtaaaagtaaataatgtagtctttgttcattttaatttggtgcttttatgagttaatttttttttcaatttgtgctattgtttcaacaagcttggaaaacagtaggaacaatttgtgacttttgcatctgtaggaaaacttctttaaaagaataaacagtgccctacctatatgtgtgtgtacatacatagctgtgaggtactcttctggtataacctactgtaaaccccaaagcaaatattgtgatatagagacacagaatagacaatttacaagtaatcaatcaagcacaaaccagtgggaaaataaggaacttatgtatctcaatttattctttaaatgctacatatttgattgctttagggttgcaaaagttaattaatagatttgtataagacacacagaaatatacatacactaaaagagactttgctaagtgtaattcaatatactcacaaaaatatgtgttaattatgttagaaatttaatatttaatttaattccataaatccttgcattacaaataagtcctcatacaggtcagatagggcaataaaaactactgtgaccttgaaaactgacagaagctcacttctgtacaaatctttttaatgaacaactttccatcgagcagctaagaaatatctgttaaagtcagtatttaatactaaagtgtacttatgtatgtttcttactgatcctaaattgagcacgttagttttatcaatgccactcatcggctgactgtacccctcctcccccatacagatttggtgagacttagtactaaataagtttggggagtgcctggccatagccggctcttgttggggcatgtgcgccctctgctggctgctcacataggaactgactggtgtgtgaggttctttctttcttttacttttcaaggttgggttttttttgttttttgttttgtttcaatttatttttatacaactgatcagatatttaccatgattataaagttgtagcttaatactgagtatggccgttaatttgtttttatttggaaataaaggtgaggttttgttttgggtgtgtttttggtaaatagatagtcctgatagttcaaataacatgcaatgtgtgtaatactcttgagttttttaagtggttgattgtatatcacgattaaccatattttcattgctttcatattccccttgccttgattgtatttgagaagtattcttgttggactaagttgggaatagaacttaaaaggggatagataagtcattgaaattttgaaatatgattatttgtctgtaatggatgtggtaggtaatccctagtagaaaaattcctgttatggttggttgatagttttcacttgctttgccaaggaaaatgagtatatttacatcataatactttataaaagcatttttggtttccttgcaaaccaaattaagctgtgctcactggcagacattgagaatggtagtttgagtaaaatattttttgttttgttttgcttttgcagttgctgtttatagagtatgagatgttaaaggaacaaatcactgatggtctctttactcccaggacacaggactaaactatacaagggcagttacagaggaagagtgtcagcctctctaccattgcctgggtggagagcatccttgggtcctggtagtgaaggccagggctctgtgtaatgagtgtgtcttttaaaaatagcaacaatttttgttgacaaggctccatcaaagtctttataataatttagtttgtataagtgatttctgtgtatctctgaaattaaatgacttgatggagtcagtttggtatttgttgtacagagaaggcagtttagatttttatagttcttttgtcttacattgcaaatttttctaatttgtaagcaaaagccataaaaacttccaaaccaaccgtggagtgatcaaagaacttagagctgtggaagggcagaaatgtcatctacgttttttttttcttttcttttctttcagtttttcccctttgcaattttaggttccagttaccttaaaatttgttttggataaatgatataaatttttacttaatagtctttacttactttgatttaacattgtcaaataactaagaattgcattctaacaaatattaagtccttattacctctgttagaatgtcatcttgcatgaaatctcacatacatgtctctcctgttaccaccttgtcttcaatgaggttgtattgggtgctctttcttggtgcttctctgggttcccattatatcccttactggtggatagcattgtgttactcctggtatttagtcatctaaactcttacctccttgagaataatgtgcattgttgactctcttgcatccagcacatgttacacagaaagcacccaacaaatattaaattccctatattgtgttttttaggcctcattcaccactattcagatgataatttttgcaagtttcaggattaaaaattgtggtctgtaaacatagtatatgtaatgcattttattttcttgcatactttttataggatgaggtcattcttctggctactccttgtctgctttcttttttctctttttcctccctctcatccttccctctgcctctcctcttccttcctgtgctccccaccttcctctcttgattgagtcatgctcctagattcagtcattgagaggcttctcttaaacactgcagcatgggaccattcatctaccaaccttccccttccttgaacaataactagtgctgcaggctggttggactctggggagtgtggccctgcgtatctggcagtttggttattattatgggcccattctcttgaagttgatcttgaagagcaggcttggctggaaaacatcattcttctataaatataatggttagcaatcttcctactctttgtcttccttggaatgtgttttcaattctgggctgttcctcccactcccctccagtttctctcagtagtgcatgtttaggggatataggtcaattgtattcagtgctaaggctagagaaatgatcatttaatatattacagatacgtatacaaatggcagttggattatcttctgtctggggttaaaaatgtcacttatatatgtgtgtttatgtatgtattatacatatctatataccgtatataacattgtcatgtccccccccattcttttgatgtagttttgagtatcatatccaatgtgtatagtttaagagatgaacattgttatattcttgttcactgtaaacttagcttgaaagttaaggccatcacctgtgtaccatggtgctaaaatacataatttttctatatagacaactaagtgcctatgtagactactctataacaaacaaaccttttcctctcttttccatctcactgtggcttatttagagttgtatcatttttatcttttacattgactgttgctaagactctggtggaacattcagttaagtgagcagcatataatttatgattaaaagtgatttgtgtggtgaaatgcggctgctgatttccttcatattttccaataaattccaaaatatttagccaggcaccaaagtcttgcccagatgatgttgtctctattacattcagccagaaatgtcacccatctcctccaatgaaagggaaaggaccggattttctccctcactgtggacttgtcatgcctccacagaacgtggacagagaaggggtagaaggacccttttaaatgaacgaaccaggtcaggttcactagagttggatcctggattctaaaggtgacatccactcttgagatagaagagagatgctttcagagcagcgggccagtgggtctgatcaatgaggagcaaccttaacaaaactccgggattctcatattttgggatactgttgtttattaggggaatcgatttggcaatgtaaaatcgatttcttaaaaaaaaaaaaaacagccttcattattggagatgagcacatttaaaggcctagcacgctgccagagaaaggtttctctaacccatgaaatgtaactgtctgaaatgaccttggggatcaacaagtccttgtcttttaaaaaactctgcgtaaataggtgagtgctagtagtaatctactttttgttatctaccatgttaccaggtctattggagttttagctaatgtaacctatagagctgtgcctatcacttaaattggttgcttgtctccctagctggtcagaataaccagtggaattttatttgcaagaaaaaaaaatctgttgggcatggtggctcatgcctgtaatcctagcactttgggaggctgaggcaggtagatcacttgaggtcgggagttcaagaccagcctgaccaacatggtgaaaccccatctctactaaaaatacaaaaattagtcggatgtggtggcacatgcgtgtaatcccagctactcgggaggctgaggcaggagaattgcttgaatccaagagatggaggttgcagtgagctgagactgcatgccactgtactccagcctgggcaacagagtgagactctgtcttaaaaagaaaaaaataaaaataaaaagagagaatgccagactctaccgaattcacgtaccatggagaagagaacccaggaatctgtttttaggaaaagtcttgctgataattctcctgatcagcaaggtttcttagccatgaattgaatttgaggaaattgcttttctccacactcaccatctcatcacaagtcttccttctgcctaagaacatagtgaaaatattttatttctgcgtgcttttgacacctttagcatgtattgcaagatgagctttttttcatttttatatgaaaaactattatgttcttttgaataaaaaataagctttcaaatgcatatgctgttttttctaagaccacacaagtccttaattgccttggttatatccaattatcatagactcaaactgcagtaaaaatataagatagggtaggcatcactgtgaagatgttattcacataaagccaatggtaagttactcattagaagtaagttgagtgatttcagggttgcccttagtccttcaggtctctaggggacccttgtacaaattgctgattcagaaaatcattactttggtggttcaagtggtactttagtggccttaaagagttatttgacacacctccccaaacagctaagttatccccatgattatgttgattaattgcacactctgtggaattagtgttattttcaatgaaagattttcctgcgttcggaaaatcaagcataaaactcatgtgctttaatttgataatgtgtgtacttctcctaagcaggatgccaagtgaggggctgattttggttgttgttgtctgggccatgtgaaatcatctaggacaatatttttattctgcactgaaaaggtagtttttgatggactgtaggatgttcactcaaaatgcttatcgattcggacattttcatccatcatggaacttgagaactctttgactttatgaattgagtttaaattatttggggagaggattacggtagtgagaaggcaatggttgttgctacagtaggcactaataatgatacatctagaaaactccaaacggaggtggcatattgtgggaaagccttggtactggaactggaggtctgtgtgctaacttcaccacttcatatctgtgcagcctttttaactatatgagctggttacccttaattttagtgacttcgtctataaaaacatggactaaaatgcccatttaatgagcttttagggtgtgttgccttaaataatgtaagttaaatttgcatgcgagatagtgcattacaaatataagtgctctatggagaattgaatatagaatctgaaattcttcacttaggcagagccctgaagtgaagacttttggtggcaccttaagatactatctggggtttcagtacccacactgtgttaaaggcagcacaatgcctagatgagatgaggggaatcagtgatgaaatgcagccaaaactccccaatttccagtgggatcagagctataggccattactgagtattctatttttaggactaaaagaacatcagcggaagagagagttaatgccagtcttttccagaaaaaaatggtttactgcccatttttcattatcccttgatacatacaagctatgtgcctagttagttaccttttcccccatttgtctttataggatttcctaggttgttggatgactagtttatttgctggaatggagttgtaattcttttagcacaaatttattttacatttagatttttaaatgactgtggatgaaggcagagttgtccctgtatcgtaagattctgtaggagagaaccagtactcttctctgaaatgttggaaattgaaagaataatgtcagcttctgcttttttgtaaacccagagtctcacctccaaactgggatcaggagtaaagttgactagctagtcagaacaatgaagctatacctgcatggccacagattaccgtaagacatataagccaatagaaaccagcaaattaaatagtcaaaatgttttcatatcaatttaaataaaataaaaatttaatttttgaacctacatcatttatctgatagaaaactacaaatatatagtaacctgatatattcttagtgttaagttgtaaataatagtagttctgaaaggtcatcagctcttgtattaatagacacaaaaaagatggggacgggcatgtatgctcaagtcagtttaggaaacattgtataaaactaaattgaaagccaagtacagtgtctcatgtctgtgatcccagctcctctggagagcagtgcagaagaatccttgagcataggagttagagagcaccttgggtaacatagtgagaccccatctcattaaaaaaaaagaaaaccctgaattaaatgtcttaactgcagtacttctcaagagtctttaacatgctagatacaatgtaaatctgttggggggcagggcaatagcttgtaacagttcgtagattcttttaattagtctcccttttggtttttggagcccgttgtgggatcactattctatagatgacactgagtgatgctgggttgtcctgtattataattatatttttacttttactcttctgtacatcttaatacaaagacatagtcttcacatagaggtgtagaaatgcagttttctgccatgtttttgttaattagttgctttgtgttaatgtgcggagatggtggcagtttattgtaagatgtcacagaatccatgtgtatcatttgtgcagctataaagtacctagagaccttttaggaataaaacaccatgtaaatgtaaattatcattgcctataagacactttcattaatttcatatcaaattcatgagtgttttgagctctgggatttgagagtcttcagtgtcgggcctctagtttatttatacttttttttttttcccccagagtttaaacaccagcagcatagcatagtgctaagagcacagtctgggcaaacaaactgccagggtttgaatcctggctctgtcacttgtacctgtgtggctgtgggcaattttctagatctcagtttcctcatctgcaaaatggtgtttctattacctgccttatggggttgtgcagattgaatgaatcattttatgtagagctttgagcagtggttaatacatgataaggacacagctattcttatttggacagggaaggaaaaggcaggcatggaaacgatgaaggactgtaaataataacctcatgtatgtgttcagaactactaaaaagttcagttgttgtttaatgaactagtcctttctacatatatatagattcacagggtaatcagagatggatgggactggggatggggacagaaatttattctgagtcaaacatgtttatgatgagttccctagtctgatgccagggaacaaaaggctcattcttcagttcccagaatgaggattaacagtgaaacagccttgcttggtgttgtcctgcagcatcagataatttttcatcaaggcgtttcacgggatgatatattctcccatatagatgaatctatttcagcggtgggtgaaacacctaccatttatatataatttttaaagtggcattttacaaatgaaaggctacacaaccaaacatgaccctgttattatcctactggtcaaccacaagagggatcatctctgttagagcttatctctagaaatcattttattgataagttgctcgtctgtctctagctctttctaggtggtttagaactgtcatgtgtatccaggggcagtaatctaccaaaggtgatccttcttagaagtatccctatgagtggaatggatttatgagatcatttttttcccttcatgtaatattttcattgtcacccagttcccttacaataggataccatggatgtatcggaagaaaaattggaagtcaaatggctgataatacaagaatataaaaatattcaatttgaaattctatagacatttgttaaccatatcaccctcaaataaaaagcaaattttcctgctccttcttgggacagcaagataaaagattgttgaatagatcagcaaaacattgacttttttttttttttttttatatggaagttgcttgcctttcctgctcatattagtttttctgggccaggggaagcaagtgaatcctttattgattgccatttggtgccatttttaataatcaaatttaaatataggctttagcagcggacgggttcgatttggacagaacacatgttgacttcctggactgtttgctcactggagatgccgacttgttctgtagacggggctgcatgttgatctcctttgtctccagaaggattgattgacggatgttgtgtctgctcatttacagcgttttccttgtttaatttaaaaaattgtgacatagtattacatgttcccttgtatacatcatttttgcagaagaaagttgtttagccaatatgtcgacttagtttatgaaatcctctctatagctttcattcagcccttcgtgtactccattaggtcatattcatttcatgcacggcaaatcgtcaccagcagcaaaatttaacatttggtccttttaggtataaaaatgaatcaaatgcctgacaagatttgtttctggtatatatttcagaatctccccccgccccccgcaccaaccccatctttatgggcatacaacaaatgttactaacgggtacttttagttttaaaaatatggacaacagtactccatgcagtaaaagacttgagcgattaatgctacccttatgcctcttttgagtagttttagccatggggcttggcactgccaccattgtctttgtgccaaaaaatatccgcagcggctgtcgcattctagtaccggagggttgtctcgaaaattccgcagtgaacgcgccgggtttgttcatcactgctatctcttttaaatattggaaaaatagaatctttagctctttcaaagccccgttgtggttgtggggatggggggaggcgggtggtgaagaatggagaaaggaggaaagaggctgtccgcgccagccagttggtataagtgacaaaaatccatgcctgacatagagtaaacacagatatttaagagcttttgtgttcatgagcacagatagttacttaaggatcctactcaaacatgttatcagcgctcttgaaaattttattatctgaaacaaatgttccaagtgaattttaagcagaaaatcaacatcaagaccatagctaatttttaatggataatttacacaaaagatagtttcttttctagaaactgaggtgtccttttaaaatggctgcttttagtctttaaaaaaaatgataggaatcgcgattttatgtttgagaaggtgcgtgggctttatccacagtgcctgattattttgctcccaaacaggggttctggctctgagggcagatttatagttgaattggggaacaaaaagatgtaataaagttaaaagcttacactatcagaatgaaatgtgtttgttcatgatctctggaccgatctatttgatggtaaaagtggatgctacagatgaaatctttacaaggagcataatccttaaaaaaaaaaaaaaaaaaaaaaagtccacctcccagcctcctgctggctgtgctgcctctttggtacctcgcagacttcgacagagccctggacgggtgcccattgatgtcatggaaacactcaaattactgagaatgattcatgtctatgctggtctcttatcctcccccacacaaacaggagtagatttttaaccctgacaacttgtaatttgcagtgggtttatttttgtatctggataaatattttttaacaagcaaaattaagattaagcagtctgtatctgatatgatagtaaagaatgctgggttccatgtagccaagagtactttggggactctgcagcgtgaattcatattcttctcctcctcctctccctcctgcctctttcttttcctacctcttgctctttgcattccactcttcctctctttgtttttctcctacttattctctctctccttttaaaatcctgcccttttatctttaaaataatggaaggagtagcccaacttatatctataagtgaggcaaatcctggcagaaagattcctccctcctgttctgtgtgttggagtcaagttgggaaataatgctgagtggtgaaattctacaggggatagcttcaggaattccttctagagaaaaaaatagatgctttttcttccttaaactgtattttacaatttggatttttagaaattaccaaaacaggacactagatgttcagtttcttaggaagtcagagcagattctactttatccatctttctgtctttctgcctgcctccttacctgcccagcttcctgcctgcctatctacctgttaaacaagtgaatattacatcaaagtaagtgatgtaatggtgatattgaagcattcttagatgcaagagcttaaggaaggacacgcgtcctttgatagctcatgaaggtcgagccttttctgttagtaatatttatagagagaagttaaagggtataagtagcttaaatttgatgtacacagatgagtaaatatgtctttgtgaccattcacactgctgatacaagtataaatttatcttttcttcagtgcaaaatcctcatacaatggaagttattctgttagatcttctaagactgacagtctgtgcgatggtgtcttgtttcactgaaattgaaactgatatggggcattgattttatactttgcgctgagcgctagaccagaaatggggcggaggtgttttcccaactttaagattcattaaaatcagtagaaaagttaatactgggaaacggggttaattttaagacttaggtttggctttctttgaaaaccaccatccattttatatatgtaatgacttggatacaggatacccttttgaccacatagaaaaatttatggatataaatgtatcaaagatacattctttgtgtggggtcaggaaggcatactctaataacattgccattgccattgacctaaaagataaaaagactactgttacttttagcattcgtgttgagttgagaggggaaaacttgggggttgtaaacttcagaaggaaatctattcagcctctcaaaatacaagtttagagttttcctgttggaaaaaggaatactgtagtcctatgtatcaagtacaattactgtaaagctccagtcttgacgaaagaagtatcctttagacttgcgtggggtggggtcttaggcacctgcctgcctcttttagccccttttaatgttctggtatggacagatttctacaatgattctccacatgtcactatctggactctactgcttagatctcttgtaatgtgatttcattatcctccctaatgattattggggttaaactttaaaaagaaacaaatgaacacccttgattttattcttagatgtggccgaatagcatcgaagggtctatagatctctgtagagcagtctacagataaaaattgggttgttagaattggaacaagacattcacattccatgatcccttgtcctgctgggtctattggtggaatctgaacttgggttcagagtaggcaatttttcaaaagccctgtttcccaaatgtaaattccatcatcatcttgatcatgatggggttcactcctgggaaagggagtttttaaaaaagagagagagagagagactcagaattttgaatagtttctttgctaaattcaccatctggagagcctgtgattgattagttttggcctcactattaagtgtcaatataatcaatgggaattactaggctagggtcattacatagataatttgcctgctgtgtaaataaaaatgaaattgtttaaattttgtgcaagagaaagtgaaaataaggagttacgatttgtttgttagagaaagtggaggccattggaatgacagtttttggaagtgtggagcagtttggctaagaataggaatgaaggatatttttttccagtttatcatagccagagtgaggaagtgttattccctctcttgcttgcatacattgccagtagtgcctactttacgtatgtaaacatcggggaagagcagtagatgtctgttacctggaggagatttttttttaaggaaaaacacaatttacacttttttgtcgtttctcttggcaggtaaaacagaaaggggctcatactcatcttatgggagagaatcaaacttacagggttgccaccaggtaagtgagaatctctgttgcggaagggttgagaggattaacctggtaaatcagtttgttttctaaattagatgatgcattttaaactgtgacaccaaagatgcaccggcaagtcagatgatggctctctctttaagtaatgaaataacacagagcttagaactaataaacacctcatctttagatcgctgctgtatcagaactacattcatgggcttgtttttattttttaatccatcagccggtaccagtggcactgtttgcaaaccagcaatgtcggtgaaagtggttctattaaaagagtttatttgcaattaagaacttaagaatttcttacgcaggaaatacttcgcggagtcatgtgtcagaccctgggtttcgggtggctattgccctaaattatagttttcataggggctgtatgatgttgtgtgaaaacagggttgtattgagggataaaaatgtctgtgaaaatatgatttgttgtccctttttgtttctgaattgtttttggctggaagtcaaggccagcaggctaacagcaaagccgtctcaagggaagcatgcgtgagctagaaaaataagagtactttaattaaataataaaatgccagtgtaatacaaaggtatagcatgtgtgtgtttgtgtctctgggcactttgcatttgtatactttaaactctccagagagagcctatttctaaaaatactgtcaatagctaaaagtataagctttgtttcaagacaactgagtttttatagatgctttctttttcagttcagtatcagtattaatcatgtatttaaaatcttttttaaaaatttatacttcctttttataagtgcattggtttcttactttggaaaactcttgatggaatttaataatcctctttaatattcagagctctctactgtttttattattcacgcaaacaaaatgtactttttttttttcaaatgctggaaaggggatgcttactctcttgaactctctcaccctctgatgttcttgatgggggaaaaaaatctattttaattttattttaaacagcccatttaatatacccctgaaaaatgtaagcaaagttttgtttttgtaattaaatcgagcctatgaggaaagtttcctttacgtaccagacataggaaggtacgacttctggtgggttggtgtgtttgttttttccctgtatatatttgcatttttaaagtttactcccttggcccagccaccaattcagtcatattcggcatctgaaagatttgttgcattgaggtgaacagtgcttggttaagagctcctgccggagtgcagttcatggcagtttgtttggaaagaattctgcaggaaagaaatttacagccattccagcgcaacggaaacatctttggaatgtgagtgcaaatgttcgggctagatagcctgggcgacaagcctctgagtgctgtgtctctggtgtaaagctctcagttcctgcagaagaccgtgttcctgtgggtctggtttctgagggtcaaggcggaggtcattagagttttggggagaagaaagttgacaacatccttcctttctgcagatggtcatggcagaggtctctgttttcgctgggcccctttttctggtcattgagagaataggcttcctcacccctgtatcctttcttactaataggaattggcgtgattcctcacagacacaaagatttcctctgctgagtaagcgtgaggccccttaacttgtgaaagcatcatccagaccgtgtgagtctgtctgtgtatgtgcagaacacagaccctcctttctccgtttgtggggaatacttccctcgggtgaaactgaagttaatttttttttttttccaaacacaaggtgagaagtggaaaggggcagagggtggaagagaggtggatggattggcatgtgatggctgaatttctgggccttgggaggttcgttttgaggcattaatgtccaggaaaattcttttgtatatagcactatgactgcatatgcttttcttaaaaagccttcgtaatgtagccgtggagtgtggagattccttcattcttaatttgtgcttcatggttgtgagtcttgcaagagtctactatctctgtgcttagcgtggtcgcagcaatctccataaacagtgtgattacttagggataaataaaagtgaaattttggaaatttgctgacagagggaaaatagggactgaagatgaaaaatgtacagagtatgaatttctgctttctgtgaaatttgagaatagaacagaccatagtgtgtcttccagtgaatcagtttctcttgtgccgtattgttatttgaatccctgtctacaacatcagctatgcaaaccaaagagaaaggcaaaatctcagtatcttgggcttcaagtctaaatagcagatcacagctgaaatgattccccactgtgtgacaaggtgagtgactcgtggaggggaggcttttgttttcttctgtttactacatgattgagatacggaataggaaaccttcagatggtgtgccctaaggagctccaaaagctgctttatcgtattataacagtgtatcctatggacttaaaggggtgagcagtgctatatggaaacatgcttcttccagtctcaatagccttttgtttggtgtagagacagagtggtggtaagcaacaggtagcaaagcgctgtcctggaggaatacattattattgtgagacgtgtgttgtttcagaaatatatcaagttaaaaatagatatatattttagatttctcctaaggatttaacactaatactgatggacatatgacgcttttttaaatggatatattttagcagaagaatgaaagccggcaggttctttattagcaattaagttgttttcattaaaaatagtaatgagatattatttcattaatgcatttccacctgaagttatcagaaataaacatggtgactttttgagacttttaaaattgtgttgaaaatgaatcaatagataagcaaaagtagccaaacgaacttttttgagttcttactaaatatgacaaaactaatttaaatcaaattggggtacagaaatcacacccagcttaacatgttcttgccaaatggtaacctcatactccttttaactggcagagaaaatgaaatttataatggaaagtctgacagaaacgaaaatgagtgggaataaagttttttgcaagctagtccaaccttaatactataatagccaataactaaaacttaatgggcatcattgcaaatgccagaagggaaaaaatgtcatttgttttggtttctttttgctgctttgaatagaatgttgggtgatttgcaaacttttaaattttgctaaaatctatttttttaatgagatgatgatatcaaaacaaatacttgttattacttctccccttaaatggaagtttagagttgattatcaggaattgtttgtattttctttctgggatatagcccaggtctaaagccatggtttcatttttagtattgtgtgtgtgtgtgtgtgtgtgtgtgtgtgtgtgtgtgtgtgtgtgagagagagagagagagagagagagagatggggagagagagagagagagagaaagaaagctgcctatctgagaccaatcaaattagaatcttgtgagctgggcctgtgcttttctgacaactccccaggttattctaatgtgcagctaggttttatcatttcctagaatgttctgtagaaatataccctgtattaatgacttgtgttcaacatatgaccttgaaaatgcttttaggctttttgcattaatttgattattcaaggcatggaaatatattgcatatgaacttcatttaaaaggcagtgaaaattagtgatatagtgaaaatcttcaaatctttatatagaattccacaactgaatgtcccagcccatatcttgttttctctagtgaagtccaaggctttaacctcatccaaattctttttcttcttcagcaagtgatcaaataggactttgctgatacagttatttaatgtttacatcttaaaatgactaatggaatttaagaattagacctaatctaggaggttgttgttaatttccagaaacttggagaccagggaggaaacatattttcttagtttgcccataggcttgctcatttttggttcatcgaaattaagcatgtagttgattccaaaatgaatttcacatttcagaattgatttctttgtcttgttatttttacttttgattcaataggtattacaaatgacttaattctaaacttttggcctcttttagtttttcttatctaaagtcaaaatagaaaggatgtaagtgaaaaccgtacaaaattattttgtttattacgaaattggcaattgaggccaattaggccttgcgcaagcagaaatacacatcgctttttaatttactaagatgcctaagtgtttatcctgagtgttcagcacatccatcgaggtcttatgcatccttcctgggaagctctcccttgcagggccttagcacctgtcttcatcgtgctttttaaaatttgccatcatttttatgtgtttgttgcatgctgatttccacaggattctgtaaactcctggagggcagggaccatgtctgctttatcctgaatgtgtaccatgtgcctagcagggcaaaaattgcaatgacctagtgtttctttcctcagcatcacttttggaagccattttgagggagtaaggtctgaatagcaatgtacatgaaccatattgtgagcatctttttcatgcctacgaaaaccagaaaactgcactctcccaaaaaagtcctttggaagctcttccttctaacatgctgtgcaggctctggaaggacaccaaagtcataccgtggagagacacccactctgactttttggggggttgaatcgtctcattcacctggtgacttcactgttctaggcctgtatatctggaaaggcctgaatgagggaattatagatgatctgtggttctggcagaggtgttgttggaaccaaaggtcagcatcctggtccgaacattgaaatgtagcagtgtgaatggtaggacaggatattttaaattgtgacagtttcagacatcacagggcctgagtttgcagtatatatgtcatcgcagctgtgtccctgagcggtatttttcgggcagcggcttattcattttgggggattgttatgggtatatacccttctttcaaaagtcagccggtacttatcaaaggggagaatgggtccattctttcattgcattggttaagaaatacttattgaccctgtagtggtgtgttagatactcaggagaaaaaccaagggatcttgtataccttcccttctatccccaccagcagcttcctggatgttaacggggaaaatcgagctctatttatttatttttatttttaaccttacatagcataaatttttgagcatccagaacagttgaaaaaataataaaatgaatgccacatacctgctatttaggttaaacagttgtttgtatttgttatacagtattttcttgtgtgtatgtataatatgtataagaatacatatttttcagtgaaccaaccattttaagttgcagatttaataagaatgcacccatagatttttcagtacatgtctcttaaaaataagacatttgcctaactaacatactgttattatccctaaagagattaacagtagtttcttaatctcagtccatattcagatttcttcagttgtcctcatgcaaatgtcttcagtagctttcttaaaaaaggcaactaaaatgccatttacgcgtgtcatttgatttctatgtctctttataatttcttttaaactagagctgttcctctatttgtattcttttttaaattgtgtaatttattttttagggatggggtatcgctatgttgccaaggctggactcaaacttctgggcttgggattttcccaagtaatttttttgttggtttgtttgaatgatagtgactttaaagagaccaggccaactgtcctataaaacattcccctttctagaattattagatttcgtttccttgtggtgctgtttaattttgttcatcacttgttttgcctacaaatttaaaattagttctaaaggtttatgcaggttcaggttaaacattttcggctggagtacttcattgggggtgctgtgtatatcaaattacattccaacagaatattgagctatgctgctgttggtaatgctaactttaatcacttggcaaaagtggtgaccactggattgttccattgtaaaggaatctttccccatctgcaattaacaaatagtctttgtattgatactttagcaatggacagatacccctttttcccaacaacctttgacctaatagttttagcacacattgatgacccttgcctgaatcagttatttcaactgaagacttcaaactggtgattcttttaaaattccatcattccttccacatttatagctagtattcttctataaaagggcagtttctttcatcattcattttaacactatcagtttcatgtttcatattttatataagtgtcataacaattactgtttctaatgtttccttacctggaggatgttggaagcattaaagtattcttgaaatctcttaaggtatattgataagaaaagtagttatggctcaggctgatggtcagagaggctttaattgtaagaggagggaggtaattgtaggcatgtttccttgtaaactaaacttcagtattcttttggtgaaatttggaaccttgcaacaacctctgtgcccctagctgtgtttctctgattctcatattgccactctataattgctagtaaacatctcacaaggttgatcatcagtagttgactggccgactcgagggggttgctgtggtgctctgtgaagctgcgctatcagggatcagctaataatccctgcctcagtccttgcacaatccagacatggttgatagtgaatgtcaaaatgagtgaatttctaaaagatagtttgggcttaatctaaaggaagcctgagtaactagtattaggtgccaatataaatctctgagttggttaatattattgtcccttaataattaagaaagggatgctcagagaagtaaagcaagtagacctcaaatcatttgcttcaagtaagtttcagagccagactctgaactctaagatgttttgtttcaaagccagtgctttccaacttgggttccctgctacttaagcccatgaaggagtttttaggctcagaagtccatattagttctcatctagaaaaccctgtctggtcgattccaggcccactgggggatctgggcctgacacagtatctacaacagagtagctgcactcagctccgttcagggttagctagaactctgaacagtcagtagggaaaggcatagcggagggcagatcgcatcgttcctgactgcccagccttaagggggggaaaaaaagattatatgaataatctattcagtaacatcctcagaattagcatgtgcaatttccttaaaaccaatgaggatttcctgtgaaaaggctggggtggaatatgccaattcacattttagcaacagcgtgaacactttcttaaaaatgtatagattatgttttggctttgctttttgtgcaatgtaggcagaatatggtttgctattatataaatttggattcattatagatcacattattgttccaaaaacacaagagctacatacagcgagattctgaaacaatacctttagcaggttcttaaatatgccccaataatttttcgattatggcatttagccctcaagtaaaatatatgaaacaacagaatatgtgctaggagcataggcaagttttatacaacaacagttcaggcagttagtgcataaaaagccattgaaattgctttgagatgatttatgagacaccgaagaaatggactcctagtatccaaattgaaatttcaccagaatcatgggattaacttctcttttcttatgaaaaccattaagcgtttttaaaatagcttctagcaattaggactacagttcttcatctttatgtttctgataggtgtaaagacaaaggggaaaaatcaattaatgactaaagaaataattgatttaatgctgaggtgtatctgatataatttaatgttgaaacgtatctacatatcatgtagagatcagtgtagctctatagcctccttctgtaagaaaggcagtatactcaaaattcaacatcaggatagtgtttcaatgtgaaatgacagaaatatttattgaacgtcatgcttgatattattttattgttgagagctttttactgaaactctttaaaactgaacccccaaattaaaatattggcaacactgaaagatagcaacagaagcctgtaatctgaagtaatggacttattaaggacttcagaaaaaaagactttagaaaagaagcatatatcgttgagtctgctgccgtgcctgatagtgataacctgcttagaattgaagcaccccattctttgaaaaattgtgtgcgctctgtggatattgacgtgggtttgtttacatgtgctttcactcacagatcaactgagcttcctaaagcatggacctttcatgttcagcgtgttgttttctaatctcatagaagtagtttcatagggaggagaaaacagaaaccgacaagaatatttctttgcatttgccttagcatttccaacatgcaaatgttgcttttttcatagtatggcacttatttttgtcagacatttcttgtacttaacaaagggcaaagttacattttggcgggagagcgactttcgcccggcacttcaccagatctcgttgaatagaatatattatcactgttagcattcttagggttcttaatgaaagctacataccctttatctccattttcctctccttttagaagacatcttccaatgaacaatttctatgacttgaataccagatatatgttattttcaagctacctcaaagccatgtttatatgcatttgcgacaataacaattccgtgcttcggaataattatgtaggagtatcattgaggttattaggcaggacccaccctctagagttctgtacatgggggggtctctgtgtgttggggttttactgtgcaagcacacagaatatcctgagctcatttgtaccatgataatgaacagcagggcactgaatctttttagttttattggcattgtatacagtaagttattaaatttcatctctgtaatatacctgcagtaaaataacaaaatattggtgcacttaaagaacatgtgtgtgtggaacaatgccctccccatcatttcagccccctgcaaacagctgcttacagatttcaagatccattgtatgtattccctcgagcccacctctaataatcgagacacatctgccattgcagtattataggcatatgtagttttattgaaaactatacctgtaaaaaaattaaataactcctgcctcaattaaattggcaagctaccttttgcaaagatcatattgcagacctcttgagacccaagtgagttcattttattcttacattacaaatcactaaatatgttatttttatttagctgagtagctagctttcctcgtactttgatggtaagttactttcatccattctcacttttgttttccttctcccctcatctttacatattaaaaaaattatgcaaattgcatgaagcaaacattttgagaatctgaacagaataaaatcaaagggaaaggaccctaacatgcagctttaactctgaagtgattattaaataaatacatgcaaaggttacaaaattggggtcaaatttataactcacgttgtggcttgtgatttttacaaacttctttgagatccatttgatcatcataatggtagaataggaagtaatatgaagaggaaatgagttagtaggccatacaaagcatatgcagatgaattcctattggattaaataacttaacacttactcttaagaaaataatagatacgagatctcactctatcacccaggctggagtgcagtggtgcagtcatagctcactgcaaccttgaactcctgggctcaagcaatcctccctcctcagcctcctgagtagctaggactgcaggcatataccaccatggctggttaacttttttatgttttgtagagccagggtctcacgttgttgtccaggctgtctcaaattcctgacttcaagccatccttctacctagactttccaaaatgctgtgattataggcatgagccactgcacccagccaacagtcttaatacttgttgaagattgagtcagtaatagatgtctgcaaaatagttttttatccaaagaaggaataagagtaaaatatttaccgatataaaaatgtgagcctaaacttattttaagttatgtaaggtatctgtataggtcttcatgtgagttaatcatgccaatatatagtgatttaaccaagaagaatttttttgctttatattttcatagaaaaaatccaaaaagacaagttgcccactatatgggaaacatatatgtgtatatatcgtatatatctgaattatgtatgtctatatatatgaaacacacacacacactgttataagacagtaagcaggttccttatctatagtttcttagttaaaaaaacaaaacaaaacaacattttgtgctattcagatgaactgtgtataactggaccgagggagtggttagaggtgaatactgtcccaaagtgaacatagagtcagaggaaagactctgttgaaagtcagaaagtagatgatttcataggatcaagtcacggataaatatgaggtgatgactgttatagagaaggtagaaaatcgaaaatcaagcagtgatattctttttttttttttttttttgtggggttgttggggattgggtctctatgttgtccaggtgggactcaaacccctgggctgaatcagtcttcccacctcagccctctgaagtgctgggattacaggcatgaaccaccgcgcctggcagaatgttcttcttttttgataggaatgttgattcaagtcagtgagtggtcgtttggttccacttgggcttacctgggcccaggagactctgctcactctgtgttctcccagggtattttgtgccccactgctggttcacagagatgccaggtttcacggaatggagggctgagtcctagagagggtcatcacttacaagtaagatatcaaaccctaagggaatcagaatttaaagtcttagaagggtttcagttttgtcatatagaaaaatattgaaaattaaaaaaaatatatattatgaattgtaaacaaactttttgatcaaaactcatgaaagttggggaatacaccttaacttgcaccctgccactgctttgaagtcccatccctgggatgtggttcactcctgtggaaatatatattatctattacatttgaactgtgaattgtgtttgtcacactgagctaagcagctcagaactgtcatgtgtagagtgactggtacaatacaacatcagtggtggtaaaagatttgtatggacaatgacatgtggcaaagaagaatgtcaacagctgccactgctatgacatcgtccctcaaggagtctttctgcatctctgccatgtaactgtctcagccaaagagaaggcactaacatgaacttcttccccagaatgctactcccaactagcgaccacgtaagactcgcttgagtcttttttgagggtgcaagtcctgggtgccatttgtcaccggaaagaacatttaagtttggagttttatgtatagagggagggattattctttgatttatttcgaaagaacatgttcttaatgtccttttgcagataatacacacaccctatcagtttttggactccagactgtctccatccatatgtcattatgaagcaggtttttatcttattatgatttaggtaattgtactagcctctaaaattttataatgtacctttcagaagctcatagatgccaagatcagaggctcctttggagttccatctaatatatcttccttagccaactggtacagataattttatctttcctctagatagttacacatatagctctagaaataaaatgtagttatcctaaatcagctgtatagagccttaaccagcaatcagaccatttagaacattcaacaataatacattctaccaaactctgactttctgtgttcagtagatatttattaggaaactcaccctgtgtcccactgaagatcctcacatgctctctaggtagatgacttcagctaatagtatagtaaccatgaggccttagtatttatgacttttcttttctttctttcttttttttttttttttttttttttaagagtcagggtcctgctgtgttgcccaggctggtcttgaactcccggccagagtgatcctcccaccttggcctcccaaagtgctgggattataggtgtgagccaccacatctggaagtatttatcactttccaaattcgtattcttacatgtgtttggatttatttttcaagaagccagagtaaaatttggcaattaccaaattgtgagttgagaaaaatagataattcacctttggtattgtgcttttgaatttgaattccattgattggatttcagtccgtcgggattagttcttccatctgtgtcccttggtgtgatgactgactcccagccaccatctgagactgctcggtctccctcatctccaaaagtcctcagtttccagatctcatcaattctgcttgcaagataccaataaatctgctgctgcctcctagacccccagtcaccaccgtggctgcccgtgctgctctgatccctctacccaccttctccctcacatgcctcctgtccactgctgctggagtgacagtctccacaaaacattgttccttggctttggggcctgtccttagcatggtggtatcctggcccctgtttctgcctgcagcctcagccttcgtactcaccattcacatctcatgttccagccctactgagctgcttgcagttccctcaagagttctttcacggttctctctgtctttataagaacctgaaatacctttgccttgcctccccttcttcttgccttacatctgttctaccagctaactcacctgctttgttcaagattcagggaccctggatgttataaccagggcagagcgagctgcctctcttctgtgctcaggaagcctttggagcacttctttttcctcacagtcatcacactgtctacagccagagaagggcaaaggctaggggcaagggctaggcttgccgtctctatctgcagtgtctaacaggggcacccaggaagtgcttgttccagagtcacaggatggatgagtgaatgaatgaatgaactagcaatagtaagaaattgtatgtgagcatgtaacttactatatttaaatacttccatgcaaatttcttgacttaaattaaccatgccaatgacccctgaggctggatttatttatttatttattttttgagatggagtctcgctctgtcacccaggctgaagtgcagtggtgtgatctcggctcactgcaatccctgcctcccgggttcatgccattcttctgcctcagtctcccgagtagctgggaccacaggcgcccaccaccatgcccggctaatttttttttgtatttttagtagagatggggtttcaccgtgttagccaggatggtctcaatctcctgacctcgtgatccacccgcctcggcctcccaaagtgctgagattacagctgtgagccactgtgcccagccgaggctgggattatttttaatccagttttattgataaagaaactgagatttagagagatttgttttcactctgaaggcagagatgggactggggaacaaactcctttggatccagatttggcattttctttgtcacttctttagcactggataaagttggtgtagctttgtgtcatagcaagtagcccacagagtcttttcatagatggttccagctctctattcattattaacttagggatcattcatggaggcacttacctagttaccaggctgagacctctgtctgccaatgagaaaaaatgtgcatttctaaagaggatatgaagaacctagcaatctgtatatcaggagcattgtctttacatagacaaaaaagaatattttgaatgtttcctgtaagtaagtaccagttgcaatagcgtggtgcgtaccgcccatgctatctattgcccatcagtggtacctctactctctggttgtggtgaaaaggaccatggtcctcctggaaatttctggccctgaagctcaggggagaagtgcaacaccagccacatctcatcccccaagtttcattctccttcactctccctggtacaacttggcagaggatggggagaactgggaagaagtggatgcattgagtagatcaagcttttcctcttcatgtttactttatatgattttaattttgtaaccttgttgtaggacataaaaaatgaatgacagtggacttagcttttatttataacattgaaatccttaaagatagaatgttagagtcagaaaggacctagacatcatctggcatccagtgccgctttgtagcaagtggaaaactaaagctcagagatgttgaggttggtcgtcatcacacagcaagcagaccttgctcagacacagccacacaatacaagtaaaattcctagcctgtaacacggaagttttcctttgatgtctttgtacccgctttcttccaaagagcaaaaggtcacctagaccatgaagtaatagccagcagcagccggaaacacatcctgaggaaatttctagacgattgtccctttgttaagctaccattgaatcatactgtcacagagccagagggtgtcgtttgcttgtaaatactgagtttttgaaatgtcactgtaacactggaaaaatgttgtctctgaaggttgccaaagtgacagaatcccgacattgtaaataccagccaacacaagtgcttataaatgacaggaataaaatatacttgactaaatccataataatcactgataacactgtttaccctcagtgaccaggagctgtgaacttggataaaaagcacatgtgtgcagatatcattaatatgtctgagcctctagccattccagaatattttgatggaaaagctccctaaatatgtaaaagctttgcaataactaagaagctagtgtgtaaggtagggtgtcagtcgtccctgatgaaactagagagagccttgactatcttcagcccccagaggactgataaggcctcccttgttctggttagacccaaactctgagccaggctactagggcaggcaatgctgtattttcagtagatgtgattctcagaaggcccatttgccagaagcatgagcccacacctatatcatgttccatggagaaaatgtggaatgaacttagagattaaaaactttggagccataagtgggaggatcccatgaactaccctttgactttcaaagggtggatgggtggtcagacctttccacagtcctaatactctatagcccaggctttttcttaataataacttcctcctctctagaaatgattctctccctcttttttctgttctagtgtaaaaatggtgcctgtgtgtatccgagtctttaagaggaaatggacacattggcaaaccagtgcctcctttggctctgtgatgtggctgctgttactactcaactggagcaccccttatattccagtctccccagaaatgctcaggaacagtggagactcaatgacagagggttgagccctcctggtttttcaactggtgaaagagaaattcagatggttaaggagatagcagagtagccagcactccgggagctgctcttatctctgctatgaggctgtgcatggggaagagtagggctgcttggaatgacctccttacttttcatatattgaaacatatttctttttccttgatatgctcctgtattgtttgaattttattttattttattttttgtggtaagcattgttttcttaattaacaatgaaaggttgtagtcaataaactagtacttgatgagatttgagaaaaactacaaaactgtagattgcaagttggcatttgaccaagaaattatgattgtgctccttggatttttatgcttaggaaagagtgcacaagagggaaaaagctttcggtcagaagatacccattctagtactagctggaatggtggtaaagaatacgaaatggtctgaatgtccatggctgtgtgatattggcgtattttgctgtccatgggtctaagtggatggtattatagctttgaaagagtcatggcaaaggagggaacaggtgtgtcccaaaccctaatgaactcagcagattggcctggcattctggcaatgtagtcattcagcggagccgtggggactccctgggtggggacccagcatgcttctggaggtacctgggaggcgctgggagtagggcctgctgtactggtttgactaatgtggtgtaggtgttgatgttggagagttggtggccagtctcaggctctgttctggcactactccagcttgttggtcatgaatgcagattgagattgaatggctccttacatttcccttgaagaaaggcagctttgtcttccaggaatgagctgatggcagtggccgtgtggacattctgcagctttggcacccagtagcgatggcctgattgccttgaaactgggagcctctagggccctgagaacttgagcagggctggacaagccttggagcagaactttgctgtgaattctttcattgactcgcaaaagatgaaggactctaatccctgatatctacctttccacttgacctttttagtcttcagtggtcttttagaagtaattttacctggccgcggtggctcatgcctataatcctagaactttgggaggcctaggcgggcagatcacctgaggccaggagttcgagaccggcctggccagcatagtgaaaccccatctctactaaaaatacaaaattagcagggtgtggtggctcacgcctataatcctagttactcgggatgctgaggcaggagaatcacttgaacctgggaggcagaggctgaagtgagccaagatcgtgcattgcactccagcctgggtgacaagagagaaaccatctaacaaaaaaagttattttatgaaaaacatttggaggttttcttttgggtatggcaggcagattggcctcttatttggcataggtgaagaagaagagttgaataaaagtagttggggcatagaatggccatgcaagttcccaactaaatcagggtcaagtttaaatgtatttgtattttgttcaaattcatctttatctaaaacaggctgatgctgttttgtctctgtgctgcaggtggatagccacaaatttgactctatagttaccagttatccccctgccaccccttgtttttcttcctgatttctctacttccaatcagctgctcttttagaaaccaatagagaagtgagacggggtgggggcagaggaagagagaaagggggtaagggggagggagaaagaggaaagagaggttgttttttgtcattagtgagtaaaaatctgtcgggctcgggtagtttcttagtgaattcagcatttagtgattagattagaggggtatatttgagctgaagattttgggaactcacctttctgctctacagaatccctaggtttctcctttagctctactttctgattcattccatccccatccactgaccccaccgccaatattgaggtacttgtgaaagctcagaatctccagtgtcctcaaggagctagccccaaagtgccccctggtggctagaggagaaaaagacaagatggaggatgggaaaaaggtcaggtggatggataactttggctcttcttttggctcttcttttctgatagtatttttgttaacagcatctaatgggttgtcttctttcagtatcaatgtgaaccagctctgaataggttagtgtatcaatgtatttccctttttgggtgattttgctgcagggatttctttccctatgccagtttttgttggtctgatttttgtttctaggcatattgcattgacctgagccttctcacagtactgatgacactgggggtagggagaacaggagcagttgaagacgacacatgctgtcacctcatgtgctggtgtgagtggcgcagggaagggctgtgattttttataggcacactgattagccaagcacttgtcacctccactgccgctcattggcctactgagtgtgagcgtgccatctaattgacagctgtctgttgtcagagggccatcttttctccttttcagtttgagtgaacacaacagagacatctgcagagctctctgcagctctgacaaggttgccctgcctgccaaccctcagacttctaggcagcataattgaagagatcagaaaagaatattaacccgttgaccatcttgggctgaggtgtaatgaccaaaaagtcactttttaaggtgactgtgagtctttcttagtagaggaagacatgagattctctgtcagaagagtcaggccagtaggaagtgctatttcttggtagtgattgttcgtggggtttcagttcatctgagcacttggaagaggatgagaagttcattttcaaggtagacccagtgtttcatggtggggttacactgaagcctgaatgctgggtcacatcattcatgtctgatttggcttgtgtaatgacagtagtgctttggatgtgtgtagtttggatgagggttactctttttcttttaccgccaggcctgacactgcccttttagcgtaagattccagaatctcttatgcagtagcatggaatgtatggccaaccccgtagtaacgtggactgcctctttgggacatttcctgtaagccagagatatcaaggtggactttgtgatgggtagattgtttattatacagatatcagcttgggaatttgaatgtttaattatttgccttgtcgtagtgtcttcaaatgaagctctatttgagcatctactgggattggtacaatatgcagacaagctggctttgtgtgggtcgagtcacctgtgcttgcaggatgggggtgcttgctatatttggaagtgatttagtggtatcctaggtttatcaggaggaaaatacatctttgcatttatttgaacatttgatttagaaagggacagtgtgtgggtattggataaattgcttttactctttctttgctttgcattgttctcccctctgatgatttgcaacttagcaagccttcatcattgaacctgggtgaaaaagaagatctgagaagccttgagtaatttgtttcagactgtttatactctagtgttttacagatgtgggcttatttgaggaatagtattggcgaaaggtagcgtcattaaactggttggagaaatttcaggcaagtagatagagaaatttcaggcaactccttttccaagttgttgctcacagattataatagatgaattcagcagaatgttctgacctcctagactaggtcagataactgagttcttgtcctaactcaaatcctaagtagctgtttcttaaagctctgttctgcctctgcagaatgaaggcttggcctatatagtgtatgagattccttctagcttcagggttttgtaactatcagaataggtaatgaggaaggagactatgccctggtagcctttagccatatcacaaatatttaacatactcccaaaatagcacatacaagacagaaattctttgtacttgaagggaataataaatacagaaagcatttgagaagtacacatttaatttctgttaactctttttttcttatttatgtttattattagatgataaatgacttccttttttttagtattaaaacaaggtgatcaggatagtgagaggattgggtcaggtgaaacacatgactcacctgcgtgcttatgattccccttggaagatggttttgggtaacattctgggaaaactatggataaagtcataggcttccatatttaattaattctaagacttttttttcacatttcaacatctcagaaatttatggtatgccaattcaattggcaacttttttcctctcttggtaggaaatagataatgatgtttttgacattcagtggcatcttataggtgatgaaatacaattctgaggggaggaagcaagatttttttttttttaactgagaaaggctacgtgactaagtgacttctttgtttcaatgctgactaaagctgtgatgtcctttttaatcactttgaaagattcaaattgctttaggaagacaattcatgcatggagctcaccctcccagaactccacacttaatgcccactgaggaaggagagaaatgcatgcaaatatatatcccaatatagaaggaatattctagttcagtaacttccactcctgagcttttatcaaatttttctctatagaattatttttgttttattgtatccaaaatgtcagatatctttttcaaggaaggtcaagggactttgccattttctaagccagaagtattctcacctagtccagtactagtcaaagtttttagtaaatcacttagaatttccttttttaaaaaaaaaaaaaaacccttctagagtttgttgataccttaaagatcatcaaatccagctccttatttcacaaatgagtaaaaagaagacataagttgcttgttcagagttcagctaggaactagatagaacctgggtagcctgacgctcccattcttgctgctaaattccatgcaatgtaatgaaagcgggattgagtataaaaccgatactctacacatcttttgttgatatttctgagggagaaacttgaatttctgtaagtgcacatagctggtttccctttgctttgtatttctgaatgctacacttgtcttctgcctactacacttaaattcataggtgatttcacaaggcacagaagcccaacttgtcacatgtggtttaatatatgccacactttatgctgcagtagcaccatttggtcatatttagtgaactctgtggttgttgagaatgccaaagcagcaggctcagctattgcagcataggcctgtacttagttagcaagcttagcttaaaagctgtcagtgcagctaatgttacagtggcttactgagaccttggcctggttgtgatagttctccaaacctgggtgttttcacctttgaaatatgaatctggatttagctttttcttagaaaacagcaacaacaacaaaatggtgaaatctttaagctcgttaatgtgaatgcagtaagaatgtaaatttaatacatattcacttattattaaatgctgttgtaaataacatttttagatttaataatgatttcccaagacatttcgtgctattctttactttgaaactgatggggtgagaagagagttgaatcttaattattattttttagttaattaacatgtgatttaaaaaaatcgagatatattttgtgttagaccctaattagaaaagatgtcaagaataacataatgctaacttaattttaaaattgataaatgagggcaagatgattggaaagtatcctctagatcacacaggaaacgggttaatattcaaatgaatagctctgaaacgctactttcctaccagctcctgaagcaatttagtttttaagacctaaaactgactcacaatctgtggtatgaaggatagatgttaatagtttaaatatttaggcattgcgtgggctgtttgttaaaccattggtagcttgagattgaccacagtgggagtgttttcaccatgcgaatgagcatccctgctcacagtggggcatgagcatagcactgcaggatacggaactgacatttattacatacctgacatttccgttactcttttatttatcgttttgggctgcttgtttgtgtcctatccccactccccaaattcatatgttgaaaccttaatccccagtgggatggtgttaggaggtgaagcctttgggagatgattgggtgatgagggtggacctccgatgaaggaattaatgtccttataagaagaggaagacacactggggcctgtcagcggtgggggacgaggggagggttagcattaggagaaataccggatgtagatgacgggttgatgggtgcagcaaaacaccatggcacgtgtatacccatgtaacaaacctgcacattctgcacatgtatcccagaactttaaagtataatttaaaaaaaaaaagaaaagtaaaggaagagagctagccagccttctctcttctccatgtgaggataccacgagaagatggtcatctgtaaatcagaaagaggaccctcgtggtggctcacacctgtaatccaagcactttgggaggttgaggtaggaggatcagttgagcccaggagtttcgagaccagcctgagcaacacgatgaaaccctgtctctactgaaaaaaagaaaacaaaattagccagatgtggtgacacatacctctgtagtcctagtgacccaggaggttaaggtgagaggatcagctgagcccggaaagtcgaggctgcagtgagccatgatcatgccactgcactccagcctgggcaatagactgagaccctctctctccccaacccctccagaaagaggatcttgtctggaatccagccattctggtcctgatcttagaattctagcctccggaactgttagaagtaaatgcttgttgtttaggctacccagtctttcgtattttgttatagcagctaaattgacttagacatcattaattatgtattttaagtcctgtgttttagcattctggaatgagagcattgaaaatgatcatcaagccgagtaaattaactgaattaactattccaccaaaaaaaaccccaaaaactgaaatgttcgttgttcctggggaatggctatgcacttggaggctggtccccttcctccctcctcttcttcctggtgaatcccctgacttttctcaatcaggctttctgatgtggaggcttcctctgcttcccagggacacactcccttcccagggctcctggagctgctgcatctctgctaccctgagatgtaattcttgcctgagatttcagctcctcccctacacttcagaggcttcagtggactatttcttattcatctgtgcaggcacattgtccaatgtacaacctgctcaatgggcttgttgagttaataaactactctgtgttctgtattatgtggatttagatgttttgcttctttttcagccttcctttcgcaccctccacctacccgacccctgctaagatgctaccttttaaagaaaagaaataagttcttcacacttttctacatttataattcaatataaataactgctactggtatacttaatcacaattagattaaatatgttctttgaaacagggaggtcatctaatgaatagaagtgaaatatgtcagaaaatgtcacataactgagagtgtgacatctttagtaaatagaatgttgagatgattttagtgctaggctagttttgtaagagacatcttatttgacacctttgttcaaacaacttttgtggttctcaaactagcctctattgaaaagaccaagttccctacgtcttctctttgaacactttcttctttgcattaacctgttcttgctagtgcgtccaagtgtggaaagcaaagattagttttaaatcttccgggtcaaaactgttttggcttttttctagagctgataataagtagtatagttttctgtgtaccatgtgtaagagaagagaaaaggtctgactttatgttagataatccataattcggttgctctgtcccactatatggagaccaaagtcacactaaatggatgccttgggtaggggagaaggatgtagcctttcaatcagacttcttagctgcactagtcacatggctagcctggggcaggtatttaaacttgctatacctaagtctcctcatctattaattgacattaatatcagcaccttcttcatagggtttgtaaggattgaataatttaatgtatgtaagacacttagaagagtgtcttaaataatgtgagcaccttcttcattaacattagcacatatttcatatgattttgtgaggattaaataatttaatgtatgtaagacacttataagagtgtgttaaattacagactgtgctcagtaaatgttgtctaatattatttttaaactgatggttattagccaagctataccatatcttcaactttgggtgcacaagagtgggcagtatctttgaagaggtcgttgtttctcaatctgtgggtcaagtattcttagggaaacttttcattttggtccaactcataactttagtgacattagtctttgcaatttcctgctgagaagagaaggtagcctttctattttttttaagttttcaaagcctaattttatattaaaagaaaacaaggtattaaaaccacgtatttcttttaacttattaaaaggaaataacacagtaacattaataaaaagttacaaaatagcacagtaacattaataaaatgttacattgtctttttattctatagcgtgaatggaagaaataaagtaacttttctagagctacaaagtagttaatggtggcaaagattcactctctggcaatgtgtcttgtttcacaaagtaatacaagttcaacacagtatagaattgcctttgatttcaaatggtaacagcatttattggattatttttgtagatgttcaatgccacaagtaaaatgaagttttctctttaaaaggatgatagatgtggcagacccatcactgggtccctggacagtggtaacatgatggggtttaaagtcctttttgaaatagccaggttaatctgcataaaggctatggtgcttcattaagctttttgaaaactttctggggtaggccaagtggctatttgtatcagttaaacgtaagtacaactacttaaaataacatttcttcccacttgtgcttgagtctgggtctatatttttcctgataataacaggataaaatgaatcatttgattccatattccaagaaaaacgtgtccattaggtagaggaagctcttagaaattatctccaagagtggcttgttttgtacctgtcatatttattataaggtaaagggagatgtagactggtgggggtgatggtagtaaattgaaatgagttgccagctgtgttgcccaggctggtcttgaactcctgggctcaagccatcccaccagagaaggttcttaaaccttttgctttccattgggcatctttatctacattttacctcatcaagctcatcaagtgaatcagacgctttgactcagtcataacatgttgatggagagtcacttagttggaaaatatagacaagaagatgggctctgggaagaactggtaggtaggcaatggctctgaaagtgtggggccctggtttacagtgtaatgacacccaccatttagtgcctcagccattattcaagtgtgctgtgcctttcctactggccacgttaatgagagggtggagatagcaagttcctgctgaaattttcacaggaaagctaagcccttaaatgatgttttgaaggaatggtttctctaccatctgtaaaaaaggcttgattaattattttggtggcagaaactatatgctgtgcttcaggttaaacagcaggaacatattgaggttcttgggaagagttttcctacagccatcaaataggtgtccacacaggttaaccggactgtgcaataagaatgtgggacattggcatgccagtgtgaagtctggaaaagtcggatgtgatatatgcaagtggaagagaactgaaactatgaagagtcatttggaaagccccagttgtgagtttgtgatagttgagaaatggcacctcctctttgcatacttaggtttgagcaggaaacaaagaagtgacttgaagtcatgttatgaaaagaagaattgggttggaggtcagactctggattctagacctgattctgagttaactaacattttagcctagtttcaggcactccccagtggcccaatgagccaccccttcttgcaggcctcaaaatgcactgtgataaaactgcatagtattttcttttccttattttcatgttctaagaaatattattgtccgggcacggtggcttacacctgtaatcccagcactttaggaggccgaggcaggcagatctcttcagcccaagagttcaagaccagcctgggcaacatggtgagaccctgtctctaataaaaatagaaaaagacaaaaccctggtgtggtgatgcatgcctgtggtctgagctactcaggaggctgaagtgggaggatcccttgagccctgggggtggaggttgcagtgagctgagatcccgccgctgcattcaagactgagtgacagagtgaaaccctgtctaaaaaaaaaaaaaaaaaaaaaaggagaagaaaatataataaaaataatacatggatactttcttaaaatatcagacacttgagaatgttgagtaaaatataaaaggacttaatctggagatcattgccttagttataacatagaacctttctacttaggagaatttccctctctcctactccctatttgtaaaaattttcttttgtggcttcagtcaagtttcatacttttaaatgtttttgttaattttattctttgtgtttttttcctaaactgtatttttgttccattatgattttttcattggttagctgaggtataggaaagttgtcttttttattgtctgttaatcttataacccgtaactccagaactttcttactagcctctggtagttttttttagttgtttaagattttttaggaagaaaatcattggcaaatattgggagtgttgtctcttaaagtgtctttctgttatattttccttgtgctagtacattggcaaagacttacaggagagtgttaagagaatagtggaatacaggtcagcttcgcattttgttgacttgagcaaagaatcttctagtgtttcattattaaataagttttctgtaggcatctagtagattaagaaaactttcttatgatccaccacttcttaaaatgaatgtgtgtgttcaaactaaagagatatatgtatatagtagaaatatatgtgtatgcttgtgtgcatgtgtgtgtataaactttaaatcatcctctcaaaattcctgaagtaaaagtctattttgttgttttatgtggaattttattttatttaaatttttatatttatatattttatttaaaattttcatgaaatggccaagcagggtttaatataaaatggaaacagggtttatctcagaaatttggtggctaaattccttgtatcccgtcttatctagggatgttgtttgtttcaaggttctaccttgagaggagcctgtcattttcttttttgtgtgctgctttgcctagttgacatcttggctttatgtgctcctgttgaatgcattgggaaattttctttcttctttctatgtcctgaaatagcttatataagaggggaatttttgatatttgggggaaattgcatgggacttttttttttttttttttttttttagacagggcctcactctatcctcaaaactggaatggagtgcagtggtgtgatcatggctcactgcagtctctaccacctgagtagctgagactataggcacatgccaccaatcccactaatttttgtatttttttgtggaggcggagtttcgccatgttgctcatgctggtcttgaactcctggacttagccatctgcctgccttagcctcccaaactgctgggattacaaatgtgagccaccgcgcctggcaagactagtacttcagaactggattttttactaatttttccatttctgtttctttgtgtttcaattgtgatagtttttgttatcctagaaaacatccattttccagactttaaaatttgctacataaaattatacatactttctcttgttttaaaaaactccttatctatttagcaaatatattttgtaattatgttgatttctgttttctctcttcttgtttttccttacacttgccagaggtttgtgtgttttctttggttttttttttcaagtaccttcttttggtttcattgataatctacattttgttttatctaaatttagtaaattttaaattttattaattcatcatatttaaatatgttgcactttttctagctttttatattgtatgttttgttcatttaatttttatttttacatcttgcaatttaaggccattatttttcattggttacagctttggctgcatcccttagattttcttatatacagctatcactatcatttatttgtgtattgttttaaatgttattttgcattcttgtgtagttcaagagttacttaaaacactgttttcacagtcccactttaataaaatgtttttcatgttggcagtgctactgttttgtttttactatttaattttattgcattctgagtggggaaatggcatggatatttcctactttgggggtaatctagtaggatttttaaaaatgcttagttttttttaagcatttcatatgcatttgaaaataatgaatactatttccctattttattattattattattatttttgagatggagtctcactctgtcactcaggttggagtgtagtggcacgatctcagctcagtgcaacctccggctcccggtttcaagcaatcttcccacctcagcctcccaagtagctgggatcacaagcatgtgccaccaacctggctacattttgttttttttagtagagatggagtttcatcattttggccagcctggtcttgaattcctgacctcaactgatcttcccacctcagcctcccaaactgctgggattacaggcgtgagccactgcacccggcctattttccctattttaatatattaaaccttttattacttattgtccttctaattgatttaaatttctgagagatatttgttctagtcttctactttgattatggatttaccaaccgctcagggtatttatattttaaaaaatatatctcaaagctgtatcataaatgattagaagttcaggaatattttatatttttggtggactataggtttcatcagtatgaaatatccaacttttttctttttttacatttttgccttagattggctttcaatgtatagtaatgttctctacatgctttatttttgtagattttatattacatattttttatatatttttatttttcatagtctctgtgttttatttttgatggtttgttatacacagcatttagctttacatttttctagcctaatgtgacagccactgtaacttagttgaggaatataatatccaaataaacatagtttaattttctttttttccttggcttgatcacatttcctttgttttatattttttgctgcttaaaaaaaggtctttttttttctaatggtgcaggaattatacatcttatttcttgtgaaagttattcttgcctttctaactcacatatttcaaattatatatctctattaaagtctaaatctgtttggtgtctgtatctttcctaaaaaagatgacggagagtgttagcacatttttaattactgagtttctccctttgttcctcccctttacctctcatgttgaggttgatatgtttcctttttgacgttttaaattgcatcaacagtcacatagagtctactagcgtttccttgccccatcttgctaatttttgtggaccatgttgttctgggtttttttgggttgatttgtcattatacagttatatatccttatgtaatttttttcagaagtgtgggggtataaattttcagagtctttgcattttctaaattgcctgtagttagctcacctttttgaaggcaagtttggctacatataaaatttgagttttaaagtcttgtatcccctttttctgtcacatttttgttctggcttgccttgcagctctaaatgtagcaccccaattaatcacccgattattgcatcacactccactccagctccatgtatgtattgaccctgggattggagcatcctagatttagctgtttctttgcagtcttcttgattggctgctgctttttggcttgtgatttatttatttttcctctgtagagcaaatccatctacttttatctttaagaataattcaaaattgttattccaccgaagctactcttccttattttctggcactatttggcatgtatatctcttctaaattcacacacacacatacacacacacccagtatcatttatgacatatgaggttagaggaaaagtagaagcttatgtttaatctaccatcccaagccaacccctttatatggaactttacacattctaaatgctttcaaatacagtaccttataaggaaggagatgctattattctccttttataaattagaaaactgagaggttataagtcattttatttatttattctttcatttatttctccattaatccattggctaaatttgcatcatctgctatgtataagcagccctcagtgccagagacacaaaaccccagcttccaggacctcacagctgagagtggaagcaagtgggtaacaatagagacttgtgacaataatttcagcatagggtggatttcagttccatgcatgtttgagacacgtgctaggtgcagaggaacctggggagaggcgtctctatgtcagacttcccagtggaagtgttgaggagtgtttcccagcggaagtgttgtcattgattaaaatccatgctgtaaatgtaggcatgagttgactgctgtgctcttggtatctagtaaagttcctggtccctggttggcacttaaaaaaaaataagtgaatgaacaaacaaagcttccttggctctcaccgaagcactccttttgtactaacatatgtgatagtctccacaggcatgatttctttatttctccaagcatctctttgagtaggtacagtgaatgtctcctgtccacaaatgaaggggccaaggctgtggggagttaagtgtcttgtctaaggaggcttggatcccaggttcctctgactcccgacaggcaagactcctactggccctatggccccctcatccagattattttagcctcttttttcaaactctttcctgccctctgaacatgtttctaccaagaccaagtatcacaaactaatgaagaggtataactggctgcctcctggaggaggtattaagaagcatacagtggccaaagtggaggaggaataaaaatacctccagagacctcaataataccaaaatagctagtcacaccatatatgtctaagctttgatacagcctttctacatgacatgttcatttggaattatattagacattcaggtttgaatcagggcaggtcacttgaaatgtctcaattcaatgcaaaagttataagaaaaataacatttccccccacacaagtatatagcatagtataaaacattctcaaaaactttgtaaaggaaacacattttacagtttaactcatacctacttcacttccttctccctctcctgttctctgttcattatttccctacttactaactggctcttagttaatattttcgtggcctcacccccacacctttttagttggtctcttttttgtgcaaattgattttattcctatctaaggagatgctttcatcctttttttcatgctttgaggcctcattagatcactgcactctaattttgggggggagagttgtcatttgcactatatgtacagtctgagcatcctaaagttcttgttctgagaaaaacatcgccatggtgagcggcccattttgaattaggaggactggctaaggtgctcacttaagctctttgtagttttgttcagtcaattgagtgtttctatgttacatctatctgtctatatgtctgtctatctatctatctatctatctatctatctatctatctatctatcatctgtctatctatctacatacctacctacctacctatgtactgagcccaggctggagcagtggtgcaatcagagcttaccgtccccttgacctcccagactcaagtgatcctctcacctcagcctcctaagtagctgggaccacaggtgtgcaccaccatacctggctaattttttttctattttattttctgtagagactgagtcttgctgtgctgcttaggctgctttcaaactcctgggctcaagcgatcctcctgcctcagccccgcaaagtgccgggattacaggcatgagccattgcgcccggccttctctttttaacgtaatattgagattggggtcagactgtgctggttgtgggtaaagctattgcagccttccagctatgaaggcctgccctccacgatgggatggccaggctggtacctgagactagtgttggaggcagtggcagcttccctttgatctattgcagaatgcattttcaaacacacacacacacacacacacaaataaaactctgatgttcactttttaattgaaagctaaaaatgcccagctcctttctgcagattgacaagctgatatttcagcagtagctaaagaacccggtttagtaagctactgaattttgacgtttataaacatttaatgaatacatttttatttatgtcagcttaaaaaatacagctgctgatatctgcgccccccaacaactttttttgtcttaatgccaaaattagaatatttaaatattttaaaatttcctgatgagcacctgtgcaggtgtgagggcagcatgaattcacagggagagtgtatgaagttggttatcttgatgtgcttgtggggaatgtgtatttccttgcaaggactgtcatgtgctacctgatcctctttcatggacctcagccactttcgcctctaacttgaaaaggaaactggcattgtggcacaggggccaaagggacacatttgtagccttgtcctcaaatcaagtgggacttctggttctttctctgaccatctgcttgaccttcagtctggtgtctccaaggagtgtgtctctatggcagtttaaaaaattctgttacactgagaaagagacaaaatgtaaatcttaaaggaatcagtagatttttaaccccactgctggtgttgagaagacagtttgagtcttaatctctttccttaagtttcaaaacatgtaggatttatgttattgacatgtcaaactttttgtacttattcattagggaaggtttcaatacacacaaaaatagagtattataagatgcgctactatgtattcattatccagtttcaacagacgtcaccattttcccagtcttttgttatatagtatccccttcactttatgttcctgaaatattttaaggcaaagccttgacagcatattatttcacctataaatatttcagaagcatctctaacaaataagccccctcctttgttttacatagccatggtgccatatcacagctagcaagactattaggaattcttaatagcattaagaactgacgttcctcagttgtctcacaaatgcctttttacagctggcatgtttgaatcagaatccaaaccaggttcacacgttgcatttgattatcatgactttgaagtcttcttaaaatctacaacatggccagtctccctctttttaaatatttaaactgggtccattttcctgtagaaagcccacattatggatttggcttattgcttctttgtggtgtcatacaccatgttcatctgttctccatacttcctgtaagctgatacttgcatttagggcaagcttgtctaacccatggcccacaggacacatgcggcccaacacaaatttgaaaactttcttaaaacactgtgttttttgtttttttgttttttttaagaagaccaagtttgtttgcagtgtatgaatgtctaggtgaggctgggttaatggggagaatgagactaacataacatctataactctcatgactttttgttattgttgttgtttgttttgtttttggagacagagcctccctctgtcacccaggctggagtgcagtggcgcaatctcagctcactgcaacctccgcctcctgggttcaagtgattctcctgtctcagcctcccaagtagctgggattacaggcacgtgccaccatgctaatttttgtatttttagtagagtcggggtttctccatgttggccaggctggtctcgaattcctgacctcaggtgacccacccgccttggcctcccacagtgctgggattacaggcatgagccaccgcgcccggctgaaaacactatgaggttttttcatgggtaatcttggatatgttatttgcttcattcaagaagtagtatgtggccattcatttctcaagatgcttagattgttcagtgagttcatgtgctgcccaccagatctccctaatacagagttttacattgtctttcacctgtttgttttaggatctattgatgattatttcattggaggttgcaaaatagccataagtaaattggtttaatgaagcttcttctccctactaaatcttatctagagtttaactatctattaatcattcatttttgcacatttttacagcttttgtggggtattttacattctttcttctgtttgaatatagagggtgccttgcaaacttcactcatttcactagaagaggcaactgtttaaatcctactcttctaatatatttcctggttcatgttttcctgcacattcataaatgaggaggacgttgatttgtcagttatcttcagtgcttagaatagttgctgaaatgtgacaagaatgtttatggaagaaattaccttataggttgtacatgtcctctaaagacatcataggcactcctacattgcattggtgaaggggccaccaaacagcagaatcctgcaacttggttgaactatgaaaatgttcttgatacattataatttcctcaacccctttagccagtattggccattcaggcaaaggaatagaatttccaagacttgtactgtatgtttgcagaaggagggaggatggcagataggtttgtgtgtgttgggatggagaaagtatgcaaataagctaattaatatcaattgtttttatatctatattacacatacacacactcgcatacacataagcacacataattaatcacacccatgagcacatgtacacagctggtctacaccagattgccctgacaattttagagctgtgtgctgaaaaattttagaggaatttggctttgaatgtgcaacacgtattacagagcaaagatcaccttgggtcctaagggagatgactttcatctctaccatgtgagtaaaacctgggtgattgaaccataaattattttgggtatatagaactttcttcaaataacacttaaaattaaatgtccaggtaagtgattttcaaatcagaacaaccaaaattgttaatagttatgatcatgcttatatacgtatggaaatgtatatgtatatggaaatatggaaatttgtgtataagcatgctctgcagtaaatcaaaaaatgaccatggagcaaacatatgaaaatgctcaccagcaatgaaaaaaatgaccctatggcaaacaataaagtaaaatgctacactgtcttcctgtagaggacctactaggtttggacaaactggctgtgctcaaatacatgtgccaaaattgagcaggctgggtgcaaatattctaagggaattgaaagacactttttcgtgaaataggtttaggtgttgacattatctctaaaagtaattaaaagatgattgatgtagtaaattttcttttaagccatgcctttaagcacattgtaggaaaaggactgttaaacaccacattttcttatttagaacccttggggccataggtatttcacaatttaagaatcatttgcattttatgaagttaatatggtgtatataacatgtcctgtgtaactctccagtgaagtctgaaacagccgcaatgtatatatagattattatttctatagcaaaacatatgaatagatacacctagtaagacaaaaacaaaaattatagatacgtagatattctcacattagttcaggttttgtcacaaagtacagctttcaaaccttctggaatttttcaattgagggaaagattgtgaaccttcaaatgaacaaataaataaatatctaccttttctgaagaaaaacaaaagccaaataacaaataaatcaagaatcacttttcatggtttttaaacccctcaaataaatgtcttccttctttcagttcatagaagatttagaattataaaataaagaaggcctatccacatggtctatatatgtcttatatatctatatctatatctatatctatatctatatctataaacaattttagaattagctcgtcccacacaaaaatagtttttttgttgttgttgttttttgttttgctttttttgggatggagttttgctcttgttgtccaggctggagtgcaatggcactatctcagctcagtgcaacctctgccttccgagttcaagcgattctcctgcctcaccctcctcagtagctggaataacaggcgtgcatcattaatttttttatatttttagtagagatggggtttcactatgttggccaggctggtcttgaactcctgacctcaggtggtccactcaccttggcctcccaaagtgctgggatcataggcatgagccactgtgcccagccaaaactttagatttttatcctgtttgtgcctcaaagcctattcagttgaaaggctgatgggctcgctctgaggtccattgttggctgggggagagcattagggagctgacttttggcagatgaggaaaacagcatgatcactgcttttgccactctgctttgtggaattgacccactctgaagttgttctcactcgacagcaatgcaggcatttatccagtgcttctacaagaaataatttgggcaaaagcagtaaggaagtaagccttaacagaaaagtgggacccagcaataggagaatctacacatctgctaagcccagccatcatatatatatgtgtgtgtgtgtgtatatatatatatatatacacacacatatatatacacacacacacacacatatatatacacacacacacacacacatatatatatatatatatatatatatattttggagatggagtctcacactgttgcctaggctgaagtgcagtggcatgatctcggctcactgcaacctccacctcccgagttcaagcaattctcctccctcagcctcttgagtaggtggcactacaggtgcatgccaccacaccgttaattttttgtatttttagtagagacagagtttcaccgtattaggatggtctcgatctcctgaccttgtgatctgcctgcctcagttcccaaagtgctgggattagaggcatgagccaccatgcccagcccttatatatttttaatgtgcattagtaaattataaataatgacagtctccatgtggaaaatgaaaatcaacttagcttatacatttttaaaaatcagtcaagtggtcttgtctcatatacatagaccttgaaagatttgttttcagtacattctgtagaaggctcttgaatatctgatagactcccctggcagctttcacctggtgtgtgcatgcacagatataatcaccttagtctttatcctgcagtaaacaaagttcaagagagatttctgaaatgaagataatcttcattctgccttttgccgctacctaaagttcccttggaggactctgtgaagttactcaggttatattttttataacaaatataaaccacagaatttgccagaatgagaaatattctgatgaacatcatgatttgactgaggatggaggaattgtagggaatggttaaacttgaagatactttttagaaaaacaggtcatgtgctacagaagctacttttaaaaacatgctttttcattaaatgtaaatttaccacattattttatatatcttcattaatttaataaaactcctgctaggcttttgtaaattttcacagatataatgttaccataggcatctatgcacatgtatttttgtacacttgtccaatattatccatagagttaaaatttttaacttgaaacttctaagtcagaaggcatatgcttttaatattctgcagtacattttaacttgccttccagaaagtttataccagattacattcccattagctatatatgaaagtgaacttcctcactggcagttgaaaatttgtcttattttaatttgccagatagcttgtcatatatttattgccaaatttcaaattcattccttttataaaggaatggttcatgttcttccccagtctatttagttttattcttattacaatgtaagagcttttcatttattaggagtatcttctcattaaatatttgttaagaaagatttttgttcaactttgtatggtttggataatgttttcatttatttttatttatttatttatttatttagagacagagtgtcgctctgtttcccaggctggagtgcagtggcaagatcttggttcactgcaaacttcgcctcccaggttcaggcgattcttctgcctcagcctctctaatagctgggattacaggtgtgcactaccacgcctggttaatttttgtatttttagtagagacatggggtttcgccgtgttggccaggatggtcttcaactcctaacctcaaatgatccacctgcctcggcctcccaaagtgctgagattacaggcatgagctactacgcccagctgggtaatgttttgaaaaacgagtatgtagtctgggtcccaatatgttctaatttttctagctctaatgtcatagctaacaaaggccatctctacttaattgcttgtactttattctcaggcttttatgttttaacctttgcatttaaacatattttagtatgaagtgtgaagcaaaaacgtaaatttttccccttaaatgctaaacaaactttagttaccatttattgaataatttatcattttctcattgatttttttttcaatgacagcctcgccataaatctttctgtaatatttcctgatctggcagcagccgcacattgctttaatttactttgtttaaaatgtatatattctcaacttacatctttgtaaaaattttcttaactattatcatgcattaatattccagataagctttagaatttgtgtcttctctaccctatccatttttctctctttggaatttgtttgaatttgcattaaagtctcctttaattttgagtcatccaatcacatttatgcaaatactttcctgggaaatatttgtgtgaaaagattttcttttaaaaattgatatacaagattatttcggtcttttagaagtgtttatactgctgaatcctttcatgatttttgttaaactggcttgtgaactagttcagcaagtcagtgtcgtatgctgaatatctaaatatatttataatgagaaatataagaaaacataataagaatatttctgtcttacatccgtggagagaaaatagaatatttataaatgcaaatgctctacaattactctaaggaaacttaaagatcacagtcctattctaactctgtaaagttatttgcttgtttgttattttaacagcatctttctcataagcatttaaggctggttataatgttttgtgtgtgaatattgagtaaaccaaatgattggaggcccgttatttttacaaagattttatggaataagcaagttcggaatggatttcgaaaaagagacagtccctgtttcagtgtggaagggacattggagtccaaaggtcagggtcagatacatgttttcttctttttttttttccttccttccttccttccttccttccttccttccttccttctttccttccttccttccttccttccttccttccttccttccttccttccttccttcctcttttttttttgtttttgtttttggagacaaagtctcattctgttgcccaggctggagtgcagtggtgcgatcataactcaccgcagcctccaactcctgaactcttgggctcaagtgattctcccaccttggcctctgaaaatgctgggattacaggcatgagccattacacctggccattttcttttgactagagctgaagttctgaaactagcagtcattggagataagacaggagaagacagttgggaggctccaagcatgtgatttcaggaaaagcatgagttgattattgagaatttcagatgtgagatttccaggaacagtgtgagtccagaagatgtaagaaagatcagtggaattcacacagtttggttattcatgcatcttcgaatatttttcagataatctcgggtggatacttcagttatttctgcctcagcccaccttatttgtaaagcagtattagtagaatcccctccttgaggggttcttcatattaaataagttgcatagccaacagcctgaggcataccaaacactgtatagatatttgctgttatttgtatgattgctgccttttactgagtggcatcctgggctggtgcttgggactcaacagtgaggacattccctcccacatctgcctgtaatgccaaggccttgtgatagggagtggcctgaagcccggggtagaggagtggacctccccagcatagctggggaaggagtctcaaggagatgacatttgaccagtcctcatggttgtttgcaagtggcttctctgctgtggaatgggaagaaagggtcttccaggaagaggggttagcctttgtaaaagtgcagagaaacgtttgtatgagcaagagagtaattagggaaccgtgagcaattccatgtgactctgactataggtaggctgcagggaagggaagagacagatgaggactgtcttcctagtgcctagaacagtggctggcccatagtaggtattcggtgcatcttagtggagaaatgtgtgaaagaggaaagagagggctgggaggtagactactactagattggctatgggtggagctgggggctcagcattttcaagctctgaagtttggtctccttgaaggaacaggagcagctctggattttagaaggccaattctgtccacagtgcaccagtgttctaggtgaggttggatgatggggagagggaagtctgaagatagcatccataaatctcatgacatttctatcccagcagtgcaatcaaatgttgagaatatgtcctgtagctttcttttagaaaaggggttagcaggccaggtgtggtggctcaggcctgtaatcccagcactttgggaggccagcgcgggtggatcacgaggtcaagagattgaaatcatcatggccaacatggtgaaaccctatctcaactaaaaatacaaaaattagctgggcatggtggcatgcacctgtagcccagctactcgggaggctgaggcaggagagtcgcttgaacctgggagttggaggttgcagtgagccaagattgcgccactgcactccagcctggtggcagagtgagacttctctcaaaaaaaaaaaaaaaagggtggggggcgggcaaattatggcttaaggccaaatccaaccaacagcttctttttataaataaaattttactggaacactgtctgacctgtttatttacatattatgtatggttgatttagcgtaacaatggcagagttgggtgttttcaacagagaccacatggccagcaatgactaaaatattttctatctggtccttcaagaaaaatgtttggtgacctcagtgttagaagattgtttttaggtatttaatggtgccattctggaaaagttggcattgttggaagagttcaaattgatgcatgtgtagcctaagaaaaatggggccatatcacttcctatgaagaaacacaccaaaattttaattcaattcttaagttgttgtcttgattatctaagttctgtctctagtctcctatggctatttttgtggctttgaccctagctgacccagcctattgtcagtagttaagaaggtagattccaagtgctcaatgtcatgttaagacttccttgctacctactaagggaagtcatttttttagccagctgttttaagttctcctaacctatttcatatgctatgttcccacaataaccattcccttctcttgccatttctttgtcctctctcctgcaatgtttcttctactgaaagaatacggcactactgaatctgtttctcctgggcagggcttgcattatcccacctgttccaaattctttttagaaccgggccctttgggtgaatgatgaaccatttaatagccccatgtactatagaaatttaaccattttcaaccaaacctgtcatagataagaacaaaggtaagccatcatgtgtctagaaaaacatacaactgatttcctcacagacattacaagttcttactcttcaaatgtactttaaaggactgagagtgtaattaggaatcagcagaagttttgtggaaaagaggcattgagccttttgcatattaaggatcaaattttatgttttgtatgaagcattcatgaggtgatgttcttaaaaaccactccagaggcacaggaggaacgctgaggacaagactgaatatagagatggaggaattacgtgtctactgggtagagatggagaaggcatatttatactagggatggttgaaatcatgcaagcatcttccatagctaataaattattttatccagttggcctttactgagggcatactgtgtaccggggcccaccctgttggatgccaggaatacaaagatgatcagagttcactttctgcgcttgaggatcccacagattagaaaggaggaaaaagagttactttccatacaaggctataaatgttacaacagttgaatttttcagatgaagtggaaggaaacgtctagaaggaagaggactgaaatgaaagaagactgggggaaaagaaataataataaacaaaaagaaaaataatttgaaactttttagagaagatgattgaccccattgtggagatcaagattaaagatgaatggcaggcagctgtggagagcagaggtggagatattgggaggatcagactaaagaactgaaatttcagttgtccaagcgggcatgctgttctacagcctcacatgtcttgggcctattagaaatatatataatctatctatgcatgacttatataccatacatcacatcatttcttccaaacttacattataatataacacattctgtattagtatatagtaagattttaaaatgtacaacatatttaaatatactccttacaattaagcctcagtaagtgctaggaactttgctaagcactttgtattatctaactgaattcttaccatgggtaggcactcttatacaacatttcccaggcaaggagttttgcccaccaaggttagacagattgtccaggattatccagggggtaagtggcactcacaccagggcttgtctgaccctacttaattagatgggctcctatgaagtaaattttaggataagctcttgacttaaaaatgagccttctaatggttgtgggagagggagaaaaaacaagtttacagaagatagcgggtgagtgtggagcagagaactagcataggctttgaagtcaagcctaactgaattcccagcttggctccactgcttgccagccacatggcattggtcaggtcacataaccactctgaatgtccccatctgtacattggggtttgtagcatctgccttgttagcatgtaaaggatctgcacctgtgcctggcacttagcagacactgtgacttgtagctgctgctgctcctgctatacctaccgtccttgccactcttcttatattcacatccacccatcctcctcctcatactactattactacctatgctaatactatggtggttatgatgagcagcagtagtagttggaatgcctcaaagataagatttatgctaaaaaacagaagcacagtagttatttaagacctcgatttgatcaatagcattagttctgcatttacttcaatatttagtgagcatgtgccatggcaggtctctgcgccaggcactgtagaaagttaaaacatgaagaagtcatttcctcttttagctgccatatcctctagtttgacctttacgccatatactcttggtcagatattcaagaaagaatcttgggagggaaagagttagtgctcatcgagtgcagactggcttgaagctgtgcatagctttggaaggaatgtcaggacttaaataatttcaggatgagttgaagattacattgagcatttactacttctccagataatctcaatttccgcccatcatgtgatggaggtgtcaccttatttacaggttcagattgttagcgggacactttgttatagtgatatcttacagagttggccattaggctataattgagcctttatgtggggtgctgggtaggccacatgaccctggttcctgtttccagggaggccaacctacataaaaatggctgtcatatatcgttgctcagaggggcagatatttacaacaaccttgaaatggaacttccacccaatatgatgaagactgacttgtgacagtttgatatgcctttattttgctaaaatagcaacctggccaaatatatttttcagcacatttattatagctacttgtttatatttatagcaaaagtgttgctaattccctagtatgttaacaggtcatattcaaattgttctatttttactttggcacaaaattgctgaaggaaacatttttaaggcaagtagtgattatagcatatcaactcactacatagtgaattatatattaaatgaacttcctgaactgagaaggagcttaaactgacaaagaagatagttttcttaaattctgtattgtttacataagatttcttcaaatccattttttattataggttactgattgtctcaatgttttctttttgctaaatttctaccttcccgccaacaaatataatcccccttttaatatataatagatgacctgggattccagaatggattttcagaaaccatcaaaaaacctcctcgctttagtgtatacaataaataatatattcttttttaaaaatatgagagtcaaataggtatatgcgtaaacctggccaacccttgggcagttgtaatttccataccaaaatgcatgagtctttacttgactgttactctgttatacattaagtactagttaccatggcaacctttgcatcacattatgacatttaaatataaggtggtgtgtttccttataaggaaagacaatgtatttgaatttttgagtgtttggtgaaatacaatcactactaaaataaataattttgtttaaggcaattgatttctttgggaattacgtacatttccaaccaaacctatggagtgcattcatttatttttatttttttgtgatgtcatggagaagtaaaagattttttttaaaacaacgcttgataagtataacataataattcattaaatgcctataattaccctcgtaagtggcaaaacacaaaattgaaccatatttgaggttatttatcagtgaccaatactgtagcaagagttcgaatgtaacatcacaagatttatgaaattctatcgcatataacacatttcttatttttgtatatctagttggttaactgtaactagttttgatcttacctatagttgaattaacagtagcagtttgctcatgcgtgcaaaagcaaaattaaaggagccactgaactcatccttgtggcatttccaggaacatggccacttaaatttaattatgaagattgttgggcaatttctttattaaatatggaaaaaacctagtcatttcttgttgccagtgtagctctaggccataaggctatcatctttgttatgtagactcccatatataactcatttttaactttttatagtaacttttccaaattattatcacagcttgtactttttaatctgaaaatagagaatctaatgatcactcataacttttggtgcatcttttcaataataatcagtggattgtaatatgggactgttttgtgtgggacataagaaagaggtaagctctgtgctggaccctggctctgcggaacattttacatatgttgtttcatctattcctgataaccctatgatagagctcttattagtccctttttacacgggaagaaagtatggtttagagcagttgcataactcacccccaaatacattgtctgtatttctttgagctaaggttcaaccagattggtctgaccttaaagccctccctctttccttaatagatttgacttctacttctgacttgttacagacacaatgtgcatgatatgtttaatgtagaaataaaaaacactgacaaaaaacctttaaaaatgtttgctaaataataatttcagtaatttgtatttctctgcagcacagcagttttttaagtccctgatttgcaagatatcttggtctttgtaagttacccaagtcctcttttgttgaaaccaagcataggacagaaataaaaataaattataaaggtgtactcttggaccttcaggaatcaggaaagaagactgtccaaagactgaccttcaattttgagctttgaagttcaaaagtggacaggtggaaatactgtgttcttcattgccctttggtgcgagatatattctaggttgcagagtaagtgccaacagcagcaaaattatcgcccccctcctgctactgtagtaagtcagcaatggcccttctgtggtcagaatggcacattcagcagcaactattcgacagggatttacagaaacttccccatggctgttaggaatcttattcagcagtgtctttgaaaacccgattctgtgcagaattagctatgtagaaatgacctaggttgtgataaaaggtattttaaacaaatctaacttgtaatttcactcaatgtgtattttgcatttaatgccacaaagtctggtagatacctacacatatattttgcattcataagttttatagtggttcagaatttttttccatattaacattttaaaaaatcctggctttatagagtcagttcaccatacaaagccactatacatcacttaggtttgtgatgaaagaatggaattgcagctgtgtgagtactagaatacccaaacatgaattagactcacaagcatttggcaatagttcagaaaaagagcttaatctggtttcatctgagactgcttttctctgttctgcaacatccccccaagatgttgtgtctgataccggatcacaacgtaatgggagtgacgcagaatcgagaaagccctgagaaaccaggggcacatttgcttttctccagagattttctttctcctacttcttttttcccctcttccagtttccaactctgaaattcaaggtcattcacctattagatgcattaattataagccaaaaaagcagtattcatcgtactctgatctcagtcatatctataattaagtgtaaatataatcttcctttttagaaatgtaccacccacccattacatttaaagtgctgactgaaatgaaataatagttcagagcaagatgattttagtttaactagaaaaaagttgataatttaagcttcaagcagtgagttctatttttgattaccattcagttataaatctaatttgagatatatgctgcttttctgttactcaagtttaattcatggtttgctttcttggttgtataagcaaagttcagtggttgatcaaggctgttaagaagctcccctgaaaaggaatgggggcagggttgagaatgtgttcgaaagacattctgagacctatatctgatgtaaaacaaacaaatccgatgtaaaacaaacaacaaaattttaattgaaaaagacactcacagagtgctgtatttggggatttgaatggccaagttaggaatggccatttgcaggggaattggctgcagagggtgaaccccaaaacattccaacctggttgataaagtcagtgtgttttattctttggttacagtattttaggtcttttgggaaaaaaaattaggagcgagtaaggggaagggcttgtctcatcacactgtggacagttaagcaaaatgctaaactatgggtttaagatttacaggttagctctgccagatgccacatctgcctccagtgtttcctggcagattcgggcagcctactactgggacccagcataaccgcagaacatgagcttgcacaatgtgaaaaacctaaaaccattataatcctatttaaggccaggatgaatttgcccattttgaaagtagatgtagttttcaagcttaacttttattaagcagaaacttgtcttcagagctatatctatatatgcaggtaaattcataatataaacaaataccttatccattttgtgcaaaatttaatttactttaaatcaaacgccattcactttttaaaattcataaactcaggtttttcagccagtggaaaatttatctttctcattgctacagagagttaagtatctgacgtaaaggccagacaatagtaaatggtcattgttcgctttataagtatactctacaataagaacacatatatttttatcttcattttccctaaggaggtgtttagggcccccttaaatgtgaggaaatgtttatttttgttgctttagaagaatgattctattgtccaagtgagaaagaaataggaacaaacaggtctaaggagaaagaaacaggaatgtgctttgtgaaaaaaataaagattaacaggaaccactaaaggtttgtaagtgctatctggtcctagtgctatgttactgcacatagtccttgcgcctgcatatgtaagagttggatgcgtgatttattatgactggcccatgaaattattttcttttaagttaacaacaataaggtcaaccacagcctgtagctgttttgtagttattttatatttttcacagctctattgtgaatgctgctaaaagacagtatagcaagtgtgtgtttttaggttgaccccttgaatgcatttaatttcttgagagtgaaaacctttgccaccaggaccaagaggaattaaccaatggttaaactcatttaaaaacacaagcaagcatttcaacatatttgcttagccgttttctgaatatttaatatacttctagagaaagaaaaatgaagaaataggggtgatttgtgtctagaatacaaagttattttcaaactcctctttccaatgaaatgaagactcattcgtagatttaccaaactgtaaggaggttgtgatttcaaatcattcacagctttattgatggaaatttcaaagaaaacttggacacagacttcactgtaactttctttgttaataagaaatgcgaagagtgaaatttaggttgagattcaaaaacttttgaatgccactcctaaatgataaattatttgttactagatttctgatttatgcaaaactttattataataagccttatgttttagtttgtcattgtgtagtgttttaatatgtctcataagttcaaaagaggcaatagttgagcatgcagatgtcagatttttatctgataaatctggttttatcaggtatttatgtggtaaacattaagatactagcaatgagtttattactcaaaatgtgctttcaatctgaaatctcatccttgaagttgtattttgaagtaatgtttattacatatctcttgaaaaagtcttaaactggaatcagtaaaggcgagcttgtcagtagctgattagtcctttatatatgactcatccaacactcagaaaaaccccttggaatagagaggttctctttatgatatttagctatatggcggtggaaaggggaggtttgaatttttgattttccagcttatgggtcatatttgaccaactgctttcactagaagacatgccactttgttgagctatttaggaatcaaaaagactgtcttaatttaaaacaaggaccctttgttttagttggtgactgccttgtgaaatttttcagttctcagcgggttaaccagggaacaggggcagagtcataattggcctatttagagtattttgcatgtgaatagtgtgttagtgaagcatccctaagtctgttgtgagtgacatggtgattagaatttagattagggaaaacacattctgtactttatcaaggacagtaattagttcagtcagtaaaagttgattacaagtaacgataaagttagatttttagtacttaattttaaaatttctttattaaatagtaaatttgttcttaatataaatggtactatctactcttgttttattgcatatcagaataattaaaagaacaatgtgttcaatgcagagtataatcaagcgatttatatattatgggtaagtttctatgtagtttttagaaaatgtaatattatataatctttctgatgtcatcatttttagaagtttaataattgtcacactgtgataggttattgtggaagttttctagtgttcaggtaaatgtttaatctgtgggatgtgtcttagcttccgatagacctcaagagggcattctgaagtcctttgtggctgttagcttggaatatctgctatttctgtaattttgagagttagtgtgaggatttgaatttcctcttggttcagttggcattttctcttctgtgggtgctatgtcagttcgtggagaatcatgatatgcggtacagagaggcagggttctcagtcgagttcataggctacacttacccccagtgtatgcagccaggggaagttgtgtgcgttcacaaaatgaggttcttcttgttaaggaaggggatgaatagttcccagatatgagcctcagtctagagaaaggaaacattagtcttatataaatgccatttgttttgtgaaatgaaaacgtgagtcatcttaaaagacttaaaaaaatattgtttaaagggaatcatctactttcctcctaaaagtaaagaattaaaaattcacaaactttgtgatagcttcttagactgcctttcttttgggtttttgttttgttttaattgtctcagcttagcagatgctgtttgctttattgcattggtttaagtactaacaatcagttgggaggtggtgaaagtaaaaaattaaccttatatgtttgttttccctttttaaccttttagcagagtctccttggaggtgacatggatatgggcaacccaggaaccctttcgcccaccaaacctggttcccagtactatcagtattctagcaataatccccgaaggaggcctcttcacagtagtgccatgggtaaggtattcctttgtttgaatgcctgagggatgattatgcctttttctttttttctttctttctttaaaatatcgcccccccatcctacctcccaccccaagaaaaccataaaatttggctcagttgtcagcctggagacttcccccctagtacactgagtaggtacgttaacagcttatggtagcagaacttttttggtgtctgcttatgtctagttttctcttagctgcacccataaggaagctattaaaagatcaaagtagcaaaaagttaaatatcttcatttttatgaacaaagcagaatttgatttctgctagaatcgaatgtgatcgtggtaactacagtttgctaaggtaatgatttaaggaaatgtggtatcatctagaagtctttgtggtttaacctatcttagttaggaaaatgggcatttgggagctgaaagcatcttcattttctttcagaggtacagacaaagaaagttcgaaaagttcctccaggtttgccatcttcagtaagtactgcttgtttctgctttgtatattgcttattttgttctgttttgtattgatgggaaggagatagaagtaaatgagtttccatgcgcccagagcagcacgtttatctagaaggtggatgaggtagaaatgacctgcacatccagccacctgacccacattggagtgattaattgcacatcctggaagactgggtggttatgttgatattcagcaggttaagctctaaagagagccttgaaaaggtgcctgaagtttgaggagttttacctgtacagggcttgcaagagaatgagtattagtttcatgtgttggttaaattctttgtcagtattatgatgatttatggatttgcatgcgaaaggagatttgtggagaggatttaggaaaaatttacatgggtttcagcccagagtgcaggaagaatgtctctattttctggagaggttgctgaataaaggctgcaaaggtagctgcatcagtagccatttgtgtctttactaccaggtgacaactagaagtagtcagctgtaaccaagagcattctgggtctttttaacagctggagctctatgcagaagttgctgatatcccccacccacccccaggtccctagtacagcaaaagttggttgtgatcacaactcaatacatgatatcatattttgaattcttacgttcctagataattgtatttaattttatttaggactagtccatttctagtaattttctcctcatataaaatgaaaacatagtttcctctcttctttctttgtttctttatccttcctcctttttttcattcttccttgctgtgatataaagttttgatttaattctgtagagtactagtattctttgaaaagaatgctgagacttattgtttttatactttaatataaaatcatatttagatttcttaaagtatattaccaatcaatgcttgcatattagtttcatttcatttttaatgtattagaagaataataggtcttgcaaatgtgctaagattagattaacccaaacacctgtgtatttgacttgatttcagttcagctcatccaaacaattattaaatgaatatatcagaataagtcttatcaggaaaaagagtaaattttgtatgctgattatcatagagttggtgatgttgaagaagcatcacaaaattattcataaatatagaaaaatattgtgtaaataagattgccaatggtgtatagtcactttcaactagcaataagtcacttaaaattgtactcagttgtttattgtttgaatttctgtgttgtattgaaattgactaatatgcccaaaggattttataagcatattttaagcttgaagttaggggtggatttaatgttgatgaaactttagcttttaataggttttatgacaacttcaaatgatacagtcctaacagctgtttacattttaaacatgcctgaacttaatatggacaatattaaatgcatttggtggacctttgaatgttctgaaacaatggaataactgtcctataaaagccataaaaaacttaaagctatcataccctccttatgcttcatattcaaattaacttgttttatccaatgctaagattaggcagaaatctagacaatttctaaggagtgcattggtgtggcattggatggtatgtatctgcttaatcactgtcaacaacaattttcataattcgttgtaaatgtttaagtatttccctatagctaactggcccctttagaaaattttactggtacagtgttttctttgctgttaagacaatttaggtgttgctgctatgtcgtgatacattcagaaatataaaaataattttcctttctttcccaataaacaaaacttgggaattaggaatttagttttattctatttaattttctgtttttagtggtcagtttaggatttactcttcttagaagatttatcttgactaaatgttttcatggtccttatgaaacattttgatgaatagccttttttctgaaatataaggaggaagaaaatacaattcaaaatgaaatttttattgcaattttttgagcaagaagaacaagtttaggtaattttataatttaatcatccatttactcattacctaaaaaaatcccagctctattttcatagcaatttaacttagtttatgtaagctttgttgtaaatatcaattgcttattacttacaacaagatccacatggcttaccaccacacaaaatatttattttaacttgattccaaaaaaggtctgcagtagacatggtcacacttttctagtagcagatctgtatttctatatttttagacctctgccatgctttttttaaagctcaaataaaattatgactatttgataagagatacttcttaaattgtttcagtatgtatgagtatttgtataacagatactaaaagattggagataataaaaggtttcctttggagtgattatgactacataagacacttatatgttttctttgatacatatttaccatgacaaatagtaataaatctgtcacaatctgttgtggcaactcactttaccccccattttgaagtgggccctctctttcccttataataaaaggaagaaaacttaaacggtgacactgcatcatcaggtattatttgtgacacgcctgtggtacagagactggacttctgccgccattaggctgggtcttcctcccaggcaatcaggagagagaggggattgcctagccctgttttgaaaacactgcagcatctgtgggagagagaaaacgtaggcctggccagacatcatgccatggatctggcaggatccacgaatgtgtgtttgtactgtgtgctgcacctagagacctcacgtcactgtggaagtatgacacgatggtgggataacagaagacccaccaggcagggtctacaggacaagcacagcgtgtcggggggaagcctgtccctctagtgcacatagaccagtacttgctaaggtgattttttttttaaaggaaagcctgtgtgaaagacagctatctaattgcccacgagagctctgcttattactgcagtacatttttatcttctcggttcgtattttagtatgttgctctttttagtcacgtcccaatttctcgtagccctcgttttttgcgaagaccttagtaataaagtgttgtcttttgttgatgtcagaatttattttgcatgtctaagctcttgaatctacatgagaacatcttgttttgctagatttctacattttggttttccatttcaaaccatatttcatcttaaactcaatattttgcaactttactgctcatttcaacaaatttgttttatataacctaataatcatacacattgaatcatgaattcatacacagaaaaatgtactatagtaaattaaagttggaaaaaaatgatttatgattcttaacagaaattaacatgaaagtactaaaatctagaaagtagcaaaaaattttatattgtgctgttttaagatactttcatcaaacacagaaacaaagcaaaggcattatcttttggaaactttattctgcccatcaacatgtaaacatgtaaaacttttatcttagaatttgaaatatttcaaaattatatacgttttatcagaaactgttaacaactacaaactttctacttcagactttggtggaatttgtctccacttgtaatccgatttgcatctttaatgatggtctcaccatgaccccagttggaatctcttgaacatcagatttttctggaaataggatattttatccttagaaatagtttatgacctctcatctccagtgatctttcctaaagctgtacttctcagtaaagtcttttttctacgttaaagtacagaggggttttgtgtgtctgttttgttttaaaactcaggaggacctggcaaactttaagtggtcagagataatttgggacacatggatcccaagataaacaatttctactactataaagattctaaaataaggtttggacgcttcaagaatatttgtgacattagttaatcagtaggtaggtttgaaaaataaaaacaatgtgtattagatattaggttcaccaattttcataaggaaagaattcttaaataaaatgaaatatttaagtatggattagagtttcctttacagaagcaattattaggggtatcaagaaaaatgagtaatgctaatggccttaaatgtcctatgtattttgtgttatataaaaactttcctatttgaagatttcaaacatgatgttgaatccatatcttgagctatttagggaaaaccccttttatcccaggtgcttgaagaaatcacaaacaatttaaaagagatattggtaaactgttttttccttattagtgggctggaaattatgtatgatttaaaaaatcagtactgaactcagaaatatataatttcctacatcacttttgaaattgatcatagggaaatcagaacgatgctttttcatgtcaacaaattttaacaagtaataatacaattttctttaagatgaaagttttattgaaatatgatatcgatcacaagtgaacgaaatatcagccatctgggctctatcctttttaggaaagtctggaagtagccgattgtgtggtaagacgtaaaaggaggaaactcttcaaggttcatccctgcagggatagatactttgtgaagaagtataattgttaagtgtttaaaatattaagatagctctcagtattcacttttaaacttagtgtgcccattttctaattaaagatattggaatatgaggtttggatattaaaattgtgcttattaatgtttaggcaagaaggaggttaagagtggcacaattaagtcatctcaaataggacaaaactattcacacaatttacacggcatatataacatgacaatggggaacagtgaaagctgagaaaatattcatgacagagaaagtatttttgtgtgtgtgcagttaatgctgaatttgctaaaccagacttctagttcagcatgtgcgtttttttttttttgtgaaaaccaatcttatcttctctattacacattgagactatagagtttatgatttttatgaattgctgatatatgaaaaaatataggagaatctttatatttgttttgattggaggcttttgttccattaaaaatttttcagaaagcacacaagaggcttgcacatactcaacatacatactattaggcattctaatatcccagaagtttgctcaaggatttctgaatttttgtttggaattttggaataatgagctccttcatccactatcctcctcttctctgccttgaagcccaatcctgcaccctttaagaaagaaggcttctggtgtgcatattttagatagaaagagagaagaaatataaaggaaaagacaagcatgaaggttaactgtggatgaaaggtttgtgtatttttgagctattcctgctttatctttacaaacaaaaaggttgtatgccccaaacactcaaacaaaacaccaccagttcattccttcccccagaaagaagccttcctggccagcagcaccccatttttctactcagtgatctcttctaaggagtggtgcctgatgtatcttcctactctccaatgtgtttttatttttaatcaagtattcaaaatagtattttgcatgctaagatttatcaggactttcgttaagatgttagcagctgctaacataaacaataatagcatttagtgtaaaactggacttgttgagaaaagagaaatacatttctgggaactgctattttgaactttatcattttcactgaagagtatattttggtgtgaagttttggactcgagagtggtttaaattactgagaagtgtaggaaaccactgcagggctgctttacccagagagaattataacagggcttgcatgtattttgaaaataaaacctttttctatggcatccagcttaactgtgaatttatatttacgaaataatgtagataaatgccttgataatttgattgaataccattttttaacttttaaaatttaattgattgaaatagttttatttgctaacatagcaaaatgttctccttttttccagatcactgacaatttctgcattttctatgttttcttggttttgaataattctaaaggttttcattgaaagtaatgaatcaggaattggagggctaaataagattctcttagaagatgtggcagtaatcctaaaagaataaggagtctcttcaagaattgtcaaagttgtattttcttaaggcagaatccatacttgtcaggctgttgacagacacttgctttgtcttggcttttgtttgattttttacataactgcactggattattaaactgaacataaaattgcacctcaaagcaatagcacaggattttcagccttgatcaatttctactatcctcggatgtgtgtgtgcacgcgtgtgtgtgtgcacccatgtgtatgagtgtgcttcttttaaaggaataggagcttttatacaatgtggtgcaaaacttatagttttaaatacttaattattttatctggaaacagcagcatgtgagtgattcttttttaagttgcagctgctgcataggtgtagagctatttgaggagtttgatgctttacttgagcatatactccctcttcagagaagttaaggtagtgcagaagtttctgcattttgtaaaatttcagggttgaaaataaagatgctttatgatttggtgagatggatagatttcacttctgaaagaatgtgcaagttgtattttgaaaggaacattttaagaattctacttaagtggtttagtgacacccactcttgtctcttgtctgactttgtcatctgaggaattaatcataaataagccactagggatgaaacttgatatataagtgcttacttccagagtaataagaagaggaactgtgtgtgtgttaaatttcactaaatttattttgattattccgtagagcaggaaataggaacatttcgtagtgaagctctcttcatagcaaactgtaaagaaaatttctcagtgtgttgccatatgttggcagtgattaaagggcatttcctttgtgaaacatggagccatattagaaagacttatattttctcataaaaatgacctttgcaagtacatttaatcatgaaaactggtgtcattcgtcacatacacatacaaaaagtgtcactgttaccattagggattttaggaaaatgctactttggaacaattattttgatggcatctgagaaagaatacctaagtgtctacaggagcctcctccctccatggcccatatcattctaaatatgcctcctgaattacgcttataataatattgtaatgtctttcattctaccgattggcacagtatatcattatatcattagctgctatgagaaagcagtttcaagtaggtggcagattcttagcattaatgttttcaagtaaccctgtttggagaattgggttgtttcacaggtgctcaggtacattaacacagtacaataatattttctggcttgctttttatgaaacgaacttgaagtacaaaataatttaataacaagtggagtataaaaactggagctctagcttaagaaagtttaataactcaagacgttaaaggataagaaaaaaattgtctaaggaggcagcagtgtttagctcattttgcgttactactaaagctgaaatttattaggagaatgtttatggcctgattatttagacttgttgagttagtttaaattttttaaacgatttggtcaagtagaaaagcacagttctgtatctattgtactatttgaaagtattgttacataaaataaattcgaaattctgccatttaatactcaggcatatgattcaggagtgaaattgcattgccagaaccttggggtccctcatgtatcttaatatgaattttatttttagaggtgtataagacattggcacatataatctgtggcttaattgataacagcaaagaaaatggaattaaaaatatttattattaacagatacagttgggattacaaaattcaaactgcagtcagtaattattttacaaataaatgctatttcattttccctttagtaaatatatcagtaacttcacccaatattgatgtaagtgaaacccgacagtaacaagctgggagtgcccaggtagaaggggaaaaaagcatgttcatttattcattcattcctttctccgtttatacttattcaaagagtatttttcattgcagctaaaaactagacacaccatgtaacatggaacatgtctttttcttctatgtattcttatttaaatcgtggagcttttcaactgagattcttcacgtttaatgaaatttgcagtcttgtgtcacttgcgtcacaatttgtaggaataaccttagcattttaaagagtataccgtgtagccttttgagaaagtcatgcatttgaaaaataaaataacccacaaagtgtaacacatggacttttgtcccttaagctgattgcccttactcacttgtcaccacctttacgagagtgagggatatgttttagatacatttttttttgtcctatagaaaccagactcactgctttacttatgcgtattactctgaaatatatttccagtgaatgaatatagtagtaaaagtggtgtagcaaggtagaaaaaacactgcactagacataaaaagacctttcaagtataacgtctgacagcctctacttacacacccagtggccttggttaggtcacaaacctgcttctctgtctacaaagcaggtataaaatagtgcctgcataataaggtggtgtcaatatactgataacaaacctttatcaaagtacttattccatgccagagtacttattccatgttctaagtggtacactattacatcatttgcatctattgaatcatttattcctataaaaatcctgtgagatgggtactactgtttattcaagagacttaaaaatgagacacagagaggtgaagaaacatgtctgcggtcacacatagtaagtggcagagctgggagtgagacctgggcagcctgtctctaaagtttctgtgttcttaaccatagtgctgtctatgctgcctagcgtttcagacactctgtagaccaaaaagctctctacagcaaggttgtcattaagttagcaagtatttgactatctacaataaattaatattcagaaatttcatttcactgtagagtgatcatcagtatctctgtatagtcatgtcctataacttttgcccaagcaaatcagtatgccaggcagtccaggggagcatctgtgtaaacaaagacagtataatatagtggttagagtatgaaatctgatcaactgggtttttagggggctatgtcacttcctagctacacagttatttgtaaaataagtactcattggggtttgaatgcatttatgtaatatccttgaatgttacatactattgttacacataataaaaagcactgtcatgctattatcagtaacaaggtaactacctttcatttggcatttgagaaacaaatctaacatggcagcctacttaggagtagttagcagtagaatagaaactaagaccagggtctcagctatgttcaaaagaattttacctaacagaggtcacttgctttttctgaaattatgtaatattgcttttttttttttttttttttgagatggggtcttgctctgtcacctaggttggagtacagtggtgcaatcatagttcactgcagtctcaaactcccaggctcaagcggtcctcccacctcaggctcctgagtagctgggtacacaggttcacaaccaccacacctggctaatttttttctttttttttggtagagacagggtctccctgtgtttcccaggctctgcaaacccatctctatcaaaccaagacacgtagtcagcccttttaatcattagacctagtggtctgcaaagtttgtgttggaaatactttatcttctctcttttgaactggtacatcggctgtgatgcccggagctgcttatactgtggttcccttggccaataatttgtttatgcctaaatcagccttgcctctaagtgataaggagatacgtgctttttcttttgttttgtgtcagtggtattctctaataggccgggaacgggtctgcccaagtgatgcacagccccttggtggggctggctatagatccccccgcaaaactgaaggttaggcctaagatattagctttgcctggcaagatgaagatgtgtggactaggtagacctgtgtggcagtctgtttcttttataaagtaaacagagttcagtttgtttaggactgcttaggtagatttcttacactgagcaggaatatttgtacagatgttttaaggtaaagtcaaagaatggctagattgtagcctttgacgcattataatgtatcttttctcagtgcccctgttgaattcacaaaagaaaaggtatttttgatcatcggctatgagaaacttaaaacacttttttttatatataaaggctgatttagttaactcttcttgcatttaaagaaaaaaacatctgctgaaagtagggaggggggaggtgtgagcggaagcgtggtctccacattccacaatgaatgtcttttcccagccaattttaatttgcagaaaaaccaggcactgagttagattcctcgggaaaagtccctgttggctgatgagccctgaacttcttccgtgtacaccctgaacagggactgatgcttcagttcacagagataatttttctctggaaagccgatagatccgatttagccacccctcatttgtagtcattgccaccttgtggattacaaaggatattggttttcatcaaacttccatttcgatttggctttttatggcaagtacacgttggcagtggattgccgtgttcctcaccaaaaggatcctggtttgttcagcaacacctcacttctccactcacagttcatttatgattctgatgagagtgttttttcaggaaacacacatttcactttttgacctaggagcatctgttagaatttttttttaatactactttggcattctgaaagtgttaatgtctttcatatctgtttaatgctatttagggatatttatgatcacctcttggttactcagggtaaagtgtgtcgcaattttttttaaacagacaggaaagcattcacatgaggaaacagattgctttaaacatgtgcttcctgtgacagtaaaaagaacaaattagatttaacactgtgtaatgaatgcataaatgtgtacatttaagcttttaaaagctttatgttcagttctggtcacaacaaaaattgagtcacctgtaaaaattaaagatgcccagggtactctcagacttttgaaatgcccagcaattgcagtcctcacctgacgatgcctcgttggaattataaaaagcatgatctattagtgctggagagaactagaacattacaaggcacattcagaggttaaaccaggttacagtcagattccgtacatttagcaaataaatcagaatttgttgtgggggggagaatacttcactctcatcttcctccctaagaatcaatgaaaaaatcaattttcgggaaccccatatattcctctgtctttcatgaaagaaaaagaaggaaacctgatgtttacttactagcatttactacaatttaattatataagaaaatgactctttttcttatgtaattcagtttgtgttttgtatgctggcagggagtgaatagaatctgagttaatatttccagttagactagagtgtggaattggagggcctgaatcctctccccggaagaagaggcactcatggccatttctgtctgagcctgcggatagtgcctctccgtcccctgtgctttcaaagctaaggatttgtggcacgcttgccatctctctggccaaggagggccaggagagagtccctcgggggagggcacatagtttgaggacatctgactctcttctatcacatactgaggtactaatatcaaaacagactgcttgtcgtcgcacggtggggcagtgctttttttggctgccgtggtcgaaatgaaatgggcaagctgtagtccgcttggcatcagaatgggctaagggaagcagggaaatcagagtcagactgtgaatgcaagtcacagccaatggttaacttcctttttgtgtgtcacttggcagcagcgagactgatggtgatttttttttttaacatgggtgagagttcagtgccctaggaagagccgtagatgctgttattgtgcttcctcatacagttgacttgtgttgatttcttgaggccagtacagctgttccaagagccagctccaggagctttgtgtgtatgtacatggccatcggacgtcggatgaaaaaggtaaacagatgagaggtgatccatacaaaatctcactgctgatcactaggcagtcttaggggaatcaggttctggcataaggcaataataccaaagaataatatatagtgcacttgaagggatactcccttgtatacagacacccaaagatatttttaaattatcaccactccgcacccctcatctcacatacaggattcaaatcaattttggactgtctggaaaatgtaggactaaaatagccagattgaattcagataaaattaccttctgcttttttgggaggttgttgctttttggttagccacattattttctttgaagattcatttggaagagagtttggtagaatttctagcctctctcaagattttcctcccatttctctgtttgcaaagagctgttccccaaaggcaaaaagagcgagttgccatcttgagcgaattgtatgtttagtgaacaccaaatggtctcagagttaccctaaattttcattatatctggttgctttcaaatactatttattcccctcaaaactcctaaccatttatataagatatcagtaagatgaccaacttctgacaacccaaaagcagggaaggaagcttagaaatagaataccatttgtctggtaattagagtgtatctcttaagagttcgagagaattctgattaacctttctgttcccacattctcacgtaaaattagcacaccttttaaattattatctagtatttaaacacatatttttgagtcttcttaatgcaacaggttctggggacactaaaagtgtgttatagttttctaaaaaacttcatttttcttacattttaaatgttctgtttgtgcaaaatttcgagaatcaccataagggcttctttgcatttttaatttagtaactaacatatgaataaatttgcatattaattagttgcagattaaatcatgcatacataattgcctccttactgtgtttaatgtttgtcaaaatctccagcctggtttgatggatgtcgtatgaaagattacaatttgatgtacccttggaagtatttacaccaataatgcaagattcttaatagcagaattttctagttatatacagttactaataaacatgtaagataggtacatgtccctttgactaaaatttttttctttgcaccaaatcatttactattcataatcattaatgcatctcctaattatacagcatatgtctgttaaccctttcattgctggccttcaaatggtagcttctttctttttcttgccccctaaagaaagcaaaattgtttgataatactctgaaattactcgattgccttttatttatttctctcctagtatatggacaaacctcatttgccatttattttaacatacaatagataattatatgatcattttgtattttctagttaaagatcataaaatgacccacgtgcacatggttagtagctgatgggcttttgcctttcttttaccaatgctgaaaaaaattgaaatatttcagatacttcatatagtagtaaaaaaaaatgtatacacagacatactctctatttaggagggtaattgtagaataagtaaaagtattaaaattatatttaaattcattttgaatattgaaatgcatttaatgtatcatgatcaaacataggatggaaatgtgattttttttattagaattgagatctctgaagtagaaactgacaagagaatagatgctcttgatttgacataattttaaaatgccaataaatgttttctcaaatttcttcaggtatttaattttttaagttttatcttactcatataaaaagtagaccaactggcttttttttttcctttttactattttgatgtctaagctgcttatcacactgtattaccctgcattaatgagtattcctactgtgcaaaattctatcaaaaatgatggtgtgaatgtcatttttaattggaagtttatacagtcaaatttatagtacacaacaaaaaatatgtatgtagttctgctccaagcctttttttaggcttttgatctttttagtttaagtatacatttttattaatctaagtgtcatttgaaaatctacacaaatatgactacattttttattaataccattgtattatggaagagagggaaactaaggcatagagtaattataatgtctgtaaactgtaagaagaacaaatacaagaatgaccaagaatagattttcaggggtcttttttagacatgaaaacttgctgaccggttctgtatgtttcacataagtcagactgtatgatttctgtcttctttatttttgaatgcctgcatttatatgcctagtaaaaaggcaaaggttaaaatgagttgaaagcataaacagctgatttcccttctttgattctttcataggagaaataatgtctcctggtcacctacctcaggagcatttatttgcttatcacaggacacaatgaactatttattgatttaacacaacattcttttacaacacgcaatattacattaaattatttagcaatgtgaaaaatgaaatgaaagctgcaaaacttataaaaggaagcaaacagtcagacctgaaacatatttatccacagccattgtgcctaggtaattcagggcatatggtatgtaaatgatatttggagatccttgccaaatctacacacgacgggataaattaaggacaggtttccctgggtgtgagtcccatgattgtggccggcacacttcctgcttgaatgtgtgtgttctgttcttgtctttcagcaagagcgtcacagagcattcagtggccaaatctggtcctcagctgacttctaagacattatttgcaattcccaagaattgattttatgattaaatttaaaacatagtaccaatttgccaaactttccctttgctctcacatttgaaaagtaagatctgaataatttgtcaggatatgtttagatattaagccatttaaatgggtatctttgacattagaaattgagtgcctctgagcttcttagtcactgaagaaaggtgttcctgagcagtgacttttctctaagctaggattaagatgtttcctagaacagactatgaattattttgaacgattgataattttggttccaggttggcccagtaataatttattaattcaacttgacaacccaaattactggtatcacttattttatttttgaattattattttgaagcatatactctcatttctagaaaggtgaaggcactgactcctatttagaataaattttaagtaggtaagaggttatgctgttttctttttttttgaaaggaatgtcttttctaagctgggggtcttagctcagagtttttaatgctttaaattaaggttcatttttatcttggaattatgcaattggagattttgattagaaactatggcagaattttttctcctataatttattggactatacctaaagagtgcatttactgtgcacacttaattataaatacaagacttatatgttatttataaaagttatttcggggtattttaagacatgtagagtatggcttaggatgttttattgtttttactattaagaataatgcttttactaaataaaactgtgtttcttttataaaagataatgctcttaatattatggttttatttgaattagcagtttagtctgtgtccccacattccatttcatttatggaatgcaaataacactagttactgcatagaaaatgaaattaggctgagtccttgttcattgctgtgtaaattgggtaaaaatcagagaaaaaaaaatacccttgagatcaatgtaaatcaatactacttgagacagatccagctaaaaattcatgaaaggggtcacagttctggaggagtttatataattatcatgtagcctatagtttgtgaactcagggcaaagttctgagctggttgttctgggaccattccttggttcattgaaactactttgcacagctgtgcttcaaactcaacaacagagagcaaaaacaatattcactataaaataaacctcgtcctgcctttcaacttcactgtgaacttgcagtcttgaaaacaacaaaagggataatcgcaattgagattacagaatccagattagatgtaatacacagtagggtggtatggcccaattttacttacatggggcaagtggaagtgctgtgaatgccaacatgttaagcatcatagccacttattaagatgttagctttaaatgtcagtctttggaccccatttgaaatgaagcacctgcattttattcaaagaaattaagatatattggggaatgcggaggtgagttgagggttttttttgtttgtttttctgttttgttttgttttttttttctggtgggagaaagtgccatagacaatagagataaaatatctcaagtattaaaagtctatttttatacactgtatgattcaaaatgactgagcagttttgaaattttgtagaaagaaaggaatataaggagaataagaaatgatatttgcatctttacagacaactctgtatagcacatttaagattctggcaatttccttacaagtatctgaaaattaggaattatgaaggaaacccagacagatacttaactatagcattgctaccaggtgtctctttgatatcaatgagttaggaaaccttaagaaaaaaaggttaaaacatccagaatgataacttattttagaatatgctttcagacaaaatatttctttgttaagaatgttgaaaggttttatttaattgttcacatatatttagtaaattttttggtagacttgaccgattaggcttgtttcataaaagatgtgggcttctgtgtatttagatcttaagtttatttcaaattggcctttataaaactttagtgcctttctcttagaattctagtcaacaaaattatattcatcaagtgtatacatcacagaagtaactggtgatacagagtataattcctaccatattgtcaaatggagtctatatctcctcaaagggaaagaaacactgacgtgagtcagaagttttcactcacttggcactgaatcagcttaaagttcgaggttgaaaaattcacaaatatttatagcacacctactaagtgccacgcctcctggaaggtggacagcaatggccaatgtttctgccattggaaagatttgcaccgaagtgtgtatggccacatgtagttgtacaaatcagagttcattttgtaatgctttataagggtctggtaccactgattctccttgcagactaataaacacagagcttatatgactcttaaaaatacagtgatagcaagtgcatcctaaattatgtaatcatgtggtccatgataacagtgtaatatatgatatacagatggaatcagccacctggcttactgtaattgttgttgaggtcctttgttatgaacatatatttctgttaacaatgcaacaaaataattttttaagctgtttttttttttctgtactgcctcaaatctagataaacggaatgtgttggaaaggacaacaaataagaagttaaatatgtggaaatgacatggaaagcacctgtttcttccctttgttttcttctacgtcatcaggaaataatatttaaccatagaatatggtgtccctctaagaaaatgtttataattgaatgttcaaagtagaatatagattaaataagtaaagatgacttgccaaaaaaaattaaagaacatttgaaacaaacagaagtctgcatcacacataataagtggcataacagtatcacctctcaaaagtgacaatagatgtgtccatctttatgcctttagcatgttgttggcattattagttattgtattgagagagtagccacgctatacaagagaaaggaaggtaaattagatccctcacgcccccttcttctgtgaattgtatatgtttttgaatacactctctgccaggacagcaaataaaatttggttcatccctgatcctcagcagattataatctaggtaaaggacagaccaggttcatgaaatcaaaaataataattagaacatttggaaactaggggaacaggtcctcatattgtgtgcatgttttatcagtctaaagtagatatagctctattgaaaattgttggctagtaatatgctcattttcccatttcatgaagacttattctcaaatggaagttacagctggctatcgtgtttttccgacaaactctcttctctgtggacatgatgatttctgttgttgtggaaaggaaggaaataaatctctttttgttcctcattcactcaatgagcaaagtgtgattgagctcctattgtgtgcagattatattgttggagcacaggacaaagaaagctaaattatcatctttgtttagaaatttaagatatttgggagcagcaaggtagatgcctatgcctagtttatttaacaaggcactgaactttgctggagaatcctatattctagaatatagtccttatctggaagtgactacagaacctgattctggatcacagagagctgcagatctggtgtgattaagacagtggccacagatactccactgagcttctgtcttgcagcttctgtctgtctcttccctgaaaatcacagggaccacagatactccactgagcttctgtctagcagcttctgtctgtctcttccctgaaaatctcagggaccgtgtggagttttgcttggtcaactggagaaacaacttttgattgtttttatgtttttcagagatttatttgccagagatattacattataataaaaacataaacacagaagttagggattggaacaaaggttatatggtcacaatttaactcatagttatttgaaaattattggtttataaggaaacagatttagacaaagctagaacttatgcaggtaagttacaaagctagaacttactcaggcagttgctcacgtctgtaattctagcactttgggaggccggggcgggcggatcacgaggtcaggagttcaagaccatcctggccaacatggtgaaaccctgtctctactaaaaatacaaaaattagccaggcgtggtagtggtgcatgctggtaatcccagccactcaggaggctgaggcaagagaattgcttgaacctgggaggcagaggtggcagtgagccaagatcacaccactgcactccagcctggtgacagagcgagactccgtctcaaaaaaaaagaaaatgtagtggacacaatacatttagatttttaataaagtagacatatgtttattgcagaacatatgagcagttgattagttaaagatatccaacatgccaggcgtggtggctaacacttgtaatcccagcactttgggaggccgaggcaggcggatcacgaggtcaagagatcgagaccatcctggccaacgtagcgaaaccccatctctactaaaaatacaaaaactatctgggcatggtggcacacacctgtactcctagctactcaggagctgaggcaggataattgcttgaacccgggaggtagaggttgcagtgagccgagatcgtgccactgcactccagcctggcaacagagtgagactacatctcaaaaaaaaaaaaaaaaaaaaaaatccaacattgctggcaagtttgaaggtcacagcccatgtacaaaattggtatatcttgaggaactcttgtctttatcatatgttctgtaccatttccttgcacacaacacagttactatatgatggtactaagtagatacaggtccagaccccataaagaatgtggcattcagttcttgaacagatgttagagaacacaacccactcggcagtaagggatatcttcaactagagggaagggtgagagttgacctgtttgtccttttgactcatatttagaaatgctaaagttgttttatgttcaaaatgcatttgataatcatgcctgaagaggtcaaagtgctgacattgttgaaaacaaatacccctgtcaaacaaatagagacaattttcatgtctttggttggtaagcaccataatttggcctttggcattgctgtcagtaaagctagttgatgacttttacatcaatttttggcccaaccataaatgaaggaaataagaccaatactgccacagtactttttctcactcatcacccatacctgattcagctgggttaatgttaaaagccaaaatttatcaatatcaatttttttcccaaatcattcttattttagtactgtttatgctcaataaaagtttatgaatttctttcactgttatttaatgaaaacccagaattttttaaaattgcacattatctctttaaaaaaagtcttttagattactcgtgggatttactctaagttgttgtcttttaatagaagatgatgcaaaacttgtctcacctgttccttcctggtcgtgtctgtgtttatgtgtggggtgggtatataagtgcttttgattaacagaatgaagagagtgcttattttgaaaactcagtcgttaaaattcaagtttattttgagttaaagaacaccatatttagattaggaatggaccaatgacctgcttaagctttaggctatcgattggccttgagggaacttagatctgctaaacacgaacttgaaaaggcacttcagtgatggatgtacgttggatgctctcactgtatggtcattcacttgcattttaaaatttatgttttgtttttcctttatacctactcttttcattccgtttgtcagaggtggccatttaaagtatttgacaattgtttgttctctgcctagcaagttgtcctattgctccatgatgtgaaagaacaaaggtaatcaacagttagaaacctcaggaaattgctagaatcttcacccccaaagagggttaataaaccctagataattagttcatttagaatgaaaaccattttcattgtaataatcacatttcccctctgattatcgagcaatgcattgggaagcctgatatttattcacaaattttttaaaattgagaacatcctgtgctgagattccagtcagcttcatccatccattttttgttaaaagtttctcaactatcatccttcatccagacaaataaacataaccaggatttcccctctaactttttgggaattcatttacacgtgtaccattttgagggaaaaaaacaattgtcctcgaatttcatttgactcaggtgattgtggtaagctcgctaaccagcttcatctaggaagtgcagcaatctgagtcaacttcctccatctctgtttttacattgtccagtgtgatgcttcctcattgtaccaaaatagaaatggtttgtttttgtatcaaacttggagactggctatggattacactgggttaggataagggtttgttatttttttttttttaagaacattccacttatcccaagggaaaaagattgacggcctggggaaaaataagaggcataatgaagtcttttctccttaaataaaaatcacatctagtcttcagatgtgtcaattgcactatgtttgcctaatttcatttaatatttgagagatttagtagtaaatttatgacttttgcagttactttgcaaaaaattgaggaaggaagaagtgaatttcactttgagtcaaatgtgtaggttccagtgtaattaaacctaaaaatctatatattctggtcttgctacttggtattacactttgccatatcacataatgctattagctacattttaccttgtttgcagggtgatgccattttgtatctctggtttgttgaatttcctagaagatgttatgttcatgtagataatggcatactcattgaattctttacctcagacatgaaaatatgtggaaaagtggggaaatgaatctgatcagatttcactgtatactgaaatttgagaatctggtttttgcatctattttgcatgctgctgtctctccaaaccatatatgtctgtgtgagtttttataatgccacataaagcaaaatgagaagtctcttctttcttctaaagggaaatagtgccacagaaaggtagaagtcaaatatttacttatggatcaaaaatctagttaaaaaacaacccattgcttaccttagtaatcaatgtgaattactttataatcaatatgaatacaagctatctgaccagtcactcagaaaataaatatttgatcatgtgataaaccatttgaatgtctacatatgaacccaggccatataaaaataaccaattcaagataacataggaagtcactaaaaaagacacaaataaaattagatttcacagtttacgctgatattttgatacttttctgtgataaaagcatcttccaaactaaatgtgtccatatttgaaccatgtaaatagttaaaagtattttacctgagaatatctaaatgatgccaagaaaataagttcatgccactaaaaagattgagatgatttgtgctttatctgacttcttggtgtaatatggatttacttcagataagtatattttctacttatccgataagtgtgtttatctgagataaatattttctccagatacgtgtgtatattgaaaaaaaatttaaaataattaggatcccaattgaaaaagtaaaaatcttaattgcttaataagaaaacagttatttcatagtcttaagatttcaatacaaagaaatatgggaatatacacgtaagaggtttgttggtgttcattattaaattgcaaggctgtctcaagttattgtcatcagaataaattctgtgtgtgtgtgtctgtctgtctgcgtcctcctgttagtaattagatcttttatgaagttgtactcatacctattagggatttttgtcattgcagttttaagttgaatatgacacatggatcctttgttgggtctaagctatcaccatttattacaattttttataacattccatatatatgcatctactaactaaacatcagccttaatttagcttatgaattaaattttttgttaggagtgactcctgctggagagcaaaaaataccaattagtttagcttctaaataaactatactccttttttcaatggacaagggtaacctcctattccttggcttggcaacatttactattcctctaagtttaaagatgagaacatagatttgagtactaacacatcagcagaaattatatttttaagtacatacataattctcaggccagtcgtgtttggtgctccaaaaagatttgtgattgaatatctttgctccattgggaagagtttagcatggtgctgtatttttataattcttttttccattttagcagacttcacctaagtctattttaggtggagatttttttttttttttttttttttttttttgctgctgctctttaaggcactcttgcatagaggaaacagcagaggagacacaaggaaatgcactctcctttataacatgctgctgattctctgaactaggtgtcctctcatttaagcctcaaaagaagctgtgtattaactagatgaaggaactaacactcaaacctgtgatacagcttggccagagtcacactgctggggagcagcaaggttactcatcaagatgtgtctgaccctcaagtttaagtgctctgatttaataactttgctcacaccctgattccagtgtcttagtagcttttgatctataaaatgtcatctaaggatctttgagccttaattctttgtctttaaagtgggaatgataatacctgccacagagtactagttatggagattaaataagtgaaggcaattattatatgttctttaaattgtgtgtcactgtactgtgcatgtattaagtgtcgttttattagcaaatatctttttgatgggtagatgtttacctgaggtggttatttaatttataggctggcttgttcacactatgttatgtaatcattgtatattaatgaatatcactattttccttaggatatgatgtttagctaattcagccatgctaggcaaaagaggtcagcattgtagaaataagcaatgtcttatactgaaaaaaagaaagacaacaacaacaaaacaacaacaacaaaaaacaactttccgtgttcagtgacttaaacagaaacatggagttgttcaaattctaccaagttatattcgggaggagaaaaatgggaattccttccatatgaccattcttcattcattcatttattcagcttctatttgttgagttgcctgccttacactgcaatatgcagggcagtttgtgtgtgtgtagatgttcattaggtttatttgcactttgcagtaaccatgtaatattatcattattcagaaataaaggtagaatctactctaatgagctctgtggtcgagtggatagttcagctctttaccctgtaatagtttgttatctaattgtttaatgtatgtgcgattgccttcacaattaaagcattattctttagtcatattttctctcttttctcaattttctcaggaagaaaattgacatgtctgtgaaccctgtgcatgtccccaaatggagcttaacccaaagttgggaatcactaaataattgttcatgaaatggttgaatatagctcttcattcaagtgatgtagattctgaatatttacttattctttaatgcagttattcattcattcggcaagtttttattgaacatctaccttgtaggtaatactatgccaatgcattgggggttttaggtcaaatatttcccagtttcttataacaaatgtatgtgtgtgttgtcagttctgcttcacctcaaatatatctgtcaaagactttttggaaaattacaaaagaactgtaaactttagattctagaagaaaataagaatcgtgtgggtttcatttaagtggtcaacacttctagacagtttgctggtaagaatttttttccccaaaagtggcagaaaaagacaactgggttcattgcctacccccagtgtcctcaatagtgctttgtctaagcaccagagagggatggtggctttctgtatagtgtggctaaccatcattccccatcatttcagcgataacaaggctgggcatggggggtgggggtggtaccaagtaggtaaccaagttacctactgctggcaaggtaacttgtccagttatacactactgtgaaaactgtgtctgtgaaacaagcagtagactagttcagggtcctgtaaaaattggctgcttaagattaagacttctttaaaattattctgaaacacatggatttatgcatatagcttcagttgttcttatacttctgttctaactccccacgcatcacactaaaaatttatcatggatgatatttctgtcacaaagaaaacttcaaaggctgagatcgcagaaatgtctcagttgacaagccactgacttgagttctgtgattgaaatgtactccaaggtcagcaaaccaaaaccaaacatcactggatgataatacgttcagtgtctcactggctataattcgtagatcacctttcaaagcattatatctttattaatcattgtaaatttgtgcttttgaaatcttagactcgtttccattaggcaatgaagcccagaagcttaatgttctagtctcattttaattttttcagtcttatgtgctgaattgtcagggtttaaaaatcgatttcacctcatcagattaaaaatatttatttatgcacatgttaacaatatattaaaagaaatgagagcttcaattttaaaaataggaattgtagctcattaagccatgacaatttggtttatatttacataattaataggaaggcatttatatgtttgcaaaataggtaagaaaaggtatttaacgtagatgaagcagaatgattgtttatcaaaagagtttagagatctttctagcagtctacccatggaaagttaggatctagaaaagccttctcaataagggaagaaacaacaaagaaacaacaaccaggaaactccccaacttatctctttaaattccagcctcttttctaagtggtggtttttacatactgtcctctggtaggtgggtaccctggccttgtgtattaagcagtgagggtggtttaaaggttacaaatgtgatcctgtcagattgacaactaactgttctaatgaggaaaaaatcctcaaagcatgaaatttgaatgaaatgtgtgattataattcaagtactgtttacacaaacctctggggaccttccgaataaatgcagagcaagtgagttagacaaacctctgggccttcgatacgtgtgtgtggatgtgcggtgtgtgtgtgtttattttagagagtggggaaactttccaccattagcccgggctttgctcctcggaaccaacaccactattcctccttgtttattaatactgtatgtgttttgttagcatattgagttgtaaggaaataggtgctttgaattattaaagttgattcttgagaatagatgtatgctcgggtggcatttgcttcggcatatgcaaatgatttagtttcatttgggatcaattcccagaggccctcctttcctgtgatgctctgaatttggcaagctcaagtcagcccatctcctctccccacatccctccctttctttctttcctttttttgtacctccccccgcctttttgttgattggtataatatttttaaaagacaataaataaatatatcaacttgcttgtgagaaaccttgccatctataaggattctattgttcagttgtgatcaataaaggtgaacaaaggttttcacgttcttaaagtttagcaaaatcgaagtttagtaaaaatgtgcatgagatgtttgctaaaatatttatacagatactgggctgcggggatgctgcaaaactctgaaaatgtggtctcaggggtgcctttggggaaactgacagctgtaagatattcgtcggttcgaaggtaccaataaacttgctttagagcccagcaaatagcgtgaagttgcagtagattgtctaaagctacagtgaaagcacccaactccagagtggagaacgtgcgcccttggggcgcccagcgccagcgaggggagcagcgccccagcccctccgtaggctctgggcccatgcggctgtctgcggcggggcgaggtgaagttcatgggcggccgcgcttcccaccagctccggggaggccggggcccgcggagcccggggcgggccgcactgctactctgtttcattccgcaaccccgttttgtaggttgttgaccaagcagtcagaaaacactgccccctctctccttttgagcgaggtcagagacgtgggggttttttttttttttttttttttttcttccctcccctttccctcccctttctccgagtcgagttctcaggcagctgcgtacaatgctgggagctagccagcagcagagacagatggcagagttattagatgtgcatcatacgattcccttcctgccactcgctttttaatcaaattaaaacaaaaaagaaagagagggagagagagagagggggagtcaattaactgcatttgtattctgctcaataatggaccctgttccacttttaccctaaggcagttgagtggaaattttagagaagaaaagggtgcctagaacaaaacaaaacaaaaaaaaaaaaaaaaaggaaaaaaaaaagaaaagaaaaagaaaaaagtgaagactgcagaaatttgtaagaatcggcattattcgaggaactaataaaaacccctcggaaaagttgaatcgatctcgcgtatgcattaggatttcgagctccatcagggccgggctgccttccagctccgctgcgcaaagttgagcgtctgacagcagcgccgcggcctcccccgcccgccaggaatggtctcttcctgctttgcatattcaccacgcttggcccggccatatgggaaaatgcaactgaaggaattgttgtgaaaaaagggacagcgagtttgaaataaaagttgttagagtggtactgaggagaaaaaagaatccgagaccatgtactgcgcatacacaatcccgggcatgggcggcaactctttgatgtactactataatgggaaagcggtaagcgaatgcgggctgcgagggggatttttgacaagttttattgtcgcagggatgagcatcctaggtggtgatcattgtttgcaaagttgtgcaggactgccgcaccttcctgggtgccatgaaatatttatcatttgccaatcctaagatcttcttcttgcctacttcttctccttcgtctttttttccccccactcctcccccagagtagaaaaatagatgctttcagagctttagagagtggatcctagagcgaaagtttgcagtcaggtaaagttgagaggtggtatgattttttttttttaaagagttttggaaaattcttattccttccaaatgactgttagaaaggaaaagcagatatgagaagcagaattgagaaagcccaagttaggctgagaggaaatttggggtaagtttctccctggattgaggttttgtgatatctaaagtcttactaagttggaagcttgagtgcagtggatagagtggagagaacctgaaaggttaaaatagagcaaacacataaaactgagagatcaaattaaggagtagattatataagcttagatatatatttaaagccaaaatggggaaggaaaaacaaacgggttcattcatgcatataacagtattgtcataagttatttgtgctgtgtggcttcttccctcaatttcccccccttccaacagaaacgctttatttaagaaaaaaatgtgtctggtattttgtgcataaccccagcagaaggtttatacttgccatctggaggtttattttttttttccttcgtctgggcccactgaaggaaaaggatttcaatattttcaaatcggtatgtggggctctcgggaagagttgttgggtgatagaggagcaaaaatttattgttttaaaatagaaaagaagaatgagagaaaagtgaaaagcagccatttataaactgttctctttgtgtactttgaacttccatttggattgatcttaatcagggatagttgggccaaaggggacagatcagagctttcaggaaggcccagttcagctgtagcaattggcgcaaacgaattaaacatgtgtatgtgctgctatatgcctgtgagtgtatatacatacagatgcatgcataacggttatttctagatgagcatattctgtaatacatacatatacacaactgtttgaaggtgcagtttcagaagattaataatttcatttaagaagccagttttatgaatgggcaacttgaaataatatcgtttacttttattttgaaaagtacgagtaaatcatcaaaagttcatagcgctatcctatttttatcttttttaaaaaagagcacggtgtaattaaaatagttaagtgtggtaagggaaatataattttaaaacaaatggttttcgttgtgatttgatcaaagtgtttaaatctgtaaacataaatattgggattatgtaacatctttttttttttttaacaagtacatgatttgcaattggtagttactcatatatagataagacttttgcctattatcttttagatgttctcatacataacttattcagcacctttcattttaaagcacttttaatgaaaattttgtgaatgatgccatcgtagtcagtaagcaaaagtgtctctgaagcagattcagggattagatagcccttatccgtaatgaaagacttacattataaaagaatataagtttccatggtttttatctttcaggattaccaatgatgtgacttttacatgttaattgttaattttgcatcttaaatatctgaactgacaaaattttaatttaagttttgtaccttttaactcccttttggccaaaaggaattttcaaaaatatgtattccattcccacagcttgccagttgcctccaccgtaagaaaatgctgaatatgacatcatatcactaatatgccctctcagttgccaaatattttggttgttagattttttttttttttgagaggatggtactcataaaatcaagatcgctctgtcacaggaaatgtatttataggaactgttttaaggcgtttattaaaaacaaatctggtgatgtgtatctctattgattcaaacactagaaagaggcaaattgtacacacattatagttagaaaaaaaatagccatttggaacaccagcagaaagcttttgaaactgcggatggctaccagttgtccatcttagctttatgaaacagacagcaaagtccagttgtgtgtgtcccaaggaaggggccaattctataccattttttaaaatgccctcatgcatacactgaggaagcagatttttgtttattctacagtgtgtattctgctggctctaattctgcattgagtggcttttgatttggtgccagacatgttgtggagattgtatataccatgcgttaattgttcaaaatgcctatcgaagagactttacatttcttgagttttacttatcgtttggaggttgaatatctatgcttttttgtgtgtatgtgcatgtctaaccaatgtgtgtttgaacctgaattgttgaagttaagtgtggtcagctatttgttgcacaagttttcctctgaagagaacacagcactgaattccttcttttttcccagtgacaagtcaattacttgtttaaattcagtttgaactccctgaactgagagaggccagaggaagcaggttttccctgtgaataaacaaaagaagaaaaatggaaaatcattccaaaacacagtgattttagcttgtgggaagaatataattaagcattacaagaattatggtttcttcttttatgaactggcaactatagggtttgtaaaatcagttgtcctctaactttctagcagaaatataatcaatgatattttaggacaaacgaaaaaaacgtgaatttttttactaccttaagttatgaagtgtttccatgtccatatcccacaaaaaaatttttccttgtttctgtgaacaactgtacctgtccagaagtgtggactctgaaaaaaatacttaacaaaaaatcgtaacacaagagctatcaaagaataaattttggatataaaccagaatgtatttttaaaaatcagtttctcctcaggtgagagtttcatgaacttgataaaataatttttgtgatttttttttcctctatgcattagaggtttaaatactaacggatccaaatctaagcttaaaaaaaattaaagcaccacttctgaactacgaaacagatttttttttgcagagaaaatcagtagcttattttgtgttggaaatacaagcttgtatcaaagtgtgccaatgtgtctgtccttattaaggctataagaagtattaggcattacctgctctccaataagtgtagttctagctctaaattttgatctttatggcttcttgcatgttcattgaagaagaattttaataagtgattatttggtcaaatttcacatatctaatattatagcatatccacgaagataaaattatggcaaataaaactgaaaacaaaagtggcgaaatgtcctcgtaatggtaattgaagatcacatcatcagctctcgccagcatgtgcatgtgttaaaccgtagagagaaacctgtaattattgtaattgctctttttgctttatactaacaagcttcaaaccatgtttcaaagtagttgttttgaaatagttatttgtcaaatcatcaaatctcggaaagtaaatggtaatgagctttttatgtttatattctgactgttggtcatattatgcagcttttcaagtccataaagttcagagatgaaactggatgttaattatttctgatatcaaggccaaagaataaaataatgttacgagtcctgcttaaggtgaaaaattaggaatatttgaatatcagaatctctcaattgggaaactctctattcttagaagaaagttttcctgtaaataagtgacaatatcagtcagcaacctaaattttttaaagctgaaaattggggtatgaagagtgtagctttttctcatttatcacaggaagtgctaagataaaaagatcaatatttaaatgacgccactaataacatttttcagtacattttacatatggctcttttttttccccccaaacctcacagttggttggaacagccacacataggacataggtagccactgggttttaaagtttccagtagagtgtcaactatgcaaattacatttggcattttaaaaatatatttcttatacttactattttcagaaccatgattataaatgaaagcagccagtataaatgcttttattttttttaattgctgtttacttgctattacacagcaaaaatttgcttaggccacaaagtaatcaaatttttaaattccccactggttcaataaaataaaacatatcaaagagaaagcatgtaggaaaaactgcttttttgtgagcttattttttaaatatagttggcactttaatttacccatttaaaaataacaatgaaatttttttttatgcttcattactttaaaacaaaattatgttgattttgttctttatgtttaagctgataaaaattcaccagacacttaatcttgacattgtggctacatcttgccttcctgcctctgattaaattttcaaaatccctgcatgagattcacagataccagtttgaacgtttctgtgaggctaatttctcagggaaaaaatatggatcagttacatctttggttaattttatctagttcctaatttctgctaggtctaagcattttaaatatagtgttggtaaagcatccttctgtcgctgggtgatggcattattgcaggcagaattaggagaaaggacattggcataggagaaagagggttggggagaaaagtggtcaggaaaaaagatctaatagttgatgcagtcttttaaatacctttccaactgatctacaggaaattgtgctgaagaatcatttgtttcctgttccactataaatgtggtttgcattacatcccctgttcggctttttttgttgttgttttgtttctactaaattgtagtaccacgatggaggcttgagaataagtgatgtcttcctttataacttatcttttaatggcttgatcatagttggattttagacactgtcatatttcattatatgaattttgtatgtgtgtgtttccaagcctacttgaaacttctattactgctctgccactaagaaaaacaatgctgcagtctaagttctttagaatcactattgtaggtcaaatacatggtctacatgctgccatcagggatctattaaatgaatctcttgtttactcattcagaaaatttagagattttagatgtggttctggcaattgtaaaagttgttagaattcagatttacttttgccttaagaagaaaatacagtggagacatatatttgctctgcacagctgacctaaatgcatgccttgtacctgtgagaatttcagtatgcggacacataaaagattactgggccttttttccccctccaatattatcagagttacaaaataaataatctttcacagtcaacatagtttaaaagtaattttagttttaagctttttcaagtttttatatgtttaattgcactttattagcccttaatacttcaaacataactctaagatgacacaggctaaagttgtatatgataaacattattgattacttaaaaaaaagggatatctgtatattcataaaacatttataatctatttaggaaatcatcatagtcctaaaaaaaaagcagttgtttgtataccaggaaaaagagatcagtagtgacaaaagtggaaaagatacttgtataaaattgtctcctttagtgtgaagtgatctactgaaagttatacttggaattttcagaaaatgtccatagttgtaggctttataacatttcaaattctgtaataaactatttggcacattatcatatcattttaggtatatagataccatggcattttattaagcaaaacaatttttttcttctgaagaatacttaaggtgaaatttactggttttgagcttgaaagtggtttgagaattatacatgaactccacttaaactttggagactttcctttttgcagtgctaaagatccatgacttggttccaaactacaaccttttatttgcagatgtatttatggcacagtaccacattctgattagaatttaagagttcacatttctgatatttctgtctctaaatgctgtgttgcttctgtttacctagttttcttcctattcttcctaatttcttaaagaaatctgcacatattcattgaggtatttaatccaaaaagatttaaaagagacactacgcctctaacattctgtttaggagagtatactactttaaactccgttctccccacctaaaaaaagggggctaaagagtgggtttgaacacctgagaagtcagaggtgggaacagtgtagatgatggtctaatttcaggctcaaccaaaaaaaatgcaggctttggctggcatcctccagggacctagctctgtgctttcctagagaccaaattacactcatcttgagagagggcatgttgaggtaattggtgggagagagtggggagagttgaattccagctgcttccattgtagctgtcctgaaaatgaataggggatgttaacaatggaggctaacatttgacttggctttttcacctccacaaacctaagggtgagaattatagagtactgaatgactgcaccaataatgatcctgtttaagtgggaattgctatgttgggaaaaactcacaccattttaaaaatagttgatgcatttaccaaccacagtcctattactgtagcccaataaagtttatccacagtatggaaacactccttttttttattgtcagccatctagtgtgtgtattggatcttcacctctttggttaccattttaaaatgctcctactgaaagacatttggaaggcaccagaatcccatctccaagaagggaagcaagatacaagtgccctgtactccctttctcctagaatgtgtggtctttttttttttttaaggagaataaatactgtatgactcaatagcttttctaacgaataaaacaaattaaattgatgttacatgcgtatttaaaccctatccagttaagtactgatgtgattaaaataatcaaatgtattacttaaaaaattaaaaaggataaattctgcaccccattattttattgacttttaaatataaattgcagaaatgtttacattcctaatggcattattaagctaaactgacaaatcagaggaaaaagttgattggccagcacattattatttctgcacctgttattacagaagtggaggctcagcattaaaggagctggatggatgctgttttcttaggcttcctttgtgtgatgtgggggttgggataaatgtgtaacaagtgtagtttcactttgtagtgcctttttgtgtgttgatgtgattaaaagactacagtgtttttcatgtcgctttgaaattaatatgcaaataatatgggatattagggcttccctctacctgctgcactaagcttccctaagccaaatggggtggggattggtgtcaacttttttcatacaagttgtttagttgcaaatatcgccaacgttttatctctactctgtgaatttgtaagggggggagggaaatgtcaaactcattgaagtaggattgaagatctgggatgaaaatactttaaatttttattttctacttatatatcagccaggatgttaggagaccttgaaaacattttgaaaaagttgtgtaacattaccaaggctttggtataagattatacttttcttctggttgagttcttccttgtattaatcatgcaatatcatttctcagacacttgagcccggctctcccctggagcataggtggcaataattgtttgttattataattctagaatttcttgggtgttcattgtccgtaattcatttcacacagagaaatctaaactttcttcagccagtagaataaataatgccttccctgtcctttccttttcttttttaaattttgagttctttaggaatgtcattatagtctttgaaacgtaatgacattaaatttggattgaaggggaagggagaggaacttttatttcatgccatccagtggctagtttgagtttgcaaagaaatagatacaatgccattattttctgcaagatactagttaacactattctcatatcagtttagactttgtcctgtgtaataatttaaattcctagattttaataacacttaatatgtagcatggatcccacttaatctccccccggcttcacaacaaaatgtttacataaatgaactctcaattttgatatcaactatttaactcactctttcctgagttaatacttccataattaaacatgttccacagttgccataggagtgtatcttaaaaatgatgttcttctctgttcttttgagccatctgtttgctaggtcagtaaagaaatgggagcctgattttattttaaagccaataagttattactctactattgtattagacattcagcttcagagggagtaaaagataaaattccatcacatttccactttcttacatttgcagcagaaacttgtatgctcaaattggttattttcaactcatgacagctgtgatatttaaaatgatcacagctgttgtgacttaaaattgatttttctattaacacctgagaaaaagacctgtgccgtattaaaaacttaaataaggtaactgtaaaattagatgtgttgatgtgaatctggtaatcctacttcccagaggttgcaaagtgcagcacacctcttgcatgcttccagggaatgagctaaaactgctagaaatagatgcatgattgttaaaagcgtttacattttaaaggattcctgtaatagcagatcctcttggcccaactttacagtgtcacttttgctgataaaatcatttaggattcagtttccttaattaaccccaagaaagatgacttacatgaatcattatgatatcctaacctctagactagagaagctgctttacctttcagatatgacattgaaaaatgcaaaaccatacggaattgtttcttatgaaggaagttttggttttatggtgcttttcctccattatctttagatgacgaaaaaggaaaaacagatgagaaaggacaaatagatcatggctaagtagctttaggctagcacttgtttttggaatctttaatacatttttaatcttcatgttgaagatccatttaacctgttttaaagttagatggtgattcctgggttcagttggtctgtttaaatgtttaccttttcaggataatccgtattagaatcttgcatctctcaatagattacctatttaacaaagtaaccaatttaagaaaacctaaacacatttatacattaagatattttcctgtttcgagttagatgatgtagtatataaaatatatggctggcctgatgtggaattatgtatagacaacagtgtcttcacagatgcattgccaatagggagctatgtagattaaactctttggccagtcctaggctttttacctgtgtaactcaatcagaattgaaagcatgacaggttttatgatgatgaatgtatggctggattggagaaagtatggttgggtgggtagatagatggatagatttcataactagacagtaatagataatgccaattatttattactcaaacttgtttattcatcagaaatttttctgcagagtattattttgattattgcatgtagttcagaacatttagttgaaaatgataaaatatttgctgtcacataatcaagactgctatagagttggttctaaaagttccagagtgaacatacattacctgtgtcaaagttagaggctaagactatggagggccataagatcacaaagtcagactatcacatactaagtgatcatgggtgtcaatggctatttccttgtttagttgaaagaagatactcctcgagatggacattgtttatatgaagatttaagaaaatcaaagtggatatttgttgctgacagactaagattacaaacatatatctttagaacagggtgttccccaggggacatacggcaatatctggaaacgcttttgattgtcacaactgtgggggtcaggcaggagcttgctactggcatctagggctggaggccagggatgctactaaacatcttaacagcgtgcaagacagaccctcagaagtgctgaggttgggaagtcctgcttgcaaagtgatatatctggaccttaagaattaaataatgtcataataagttccataattaaatcttggcattgtgaggcatttatagaggataacatttttttgttttttttctttccctttctatttcccttttccttttcttttctttccttttttcttttgtttccaaaacattgttttttgtttgtttgttttggcatagcacactatagcattgcccaggtatttctacgttttaccatgaaaacgtgagattttatagtgtattaaatattgtacattatttgtgaaccaactggaatggcttcaaagcagctgttagaatatgttgagtcagtaacacaacatgtctgcataccctaaacatatatttgtcttaccttttaaaatgtttagaaccctctatcagtgtaactattggtttgtcttgaatcatcctaaatgaggaagtgtattaccattttttccctacaggacataaagtggaaagaagaaattagcataaagaaactaattaataattatgttttaagttttttggcattacggacattgtttacatcatcattaacatcataacatcatatcgtctgttatcaagaaaagattaaaatttaaagccaacattgaagatgttctttccagctttcccaataatgcaactcctttacctcctcacaactggggacctctctccctgccactgctgcgcttctcctcaatgtggataattcttggccatgatacggaagtgattttgaaacctcagttgccttctgtagcaccctgtggaggaaggtggcaggatctggtggctgagtcttacatctgccaacttctagacctcactccttaggtgccacattttggagctagttgccaagcctcacagtaacttgagccactcttcaatttcctccccatgatatacaaagttctccaaggtttaatgagagtagatatggaggctgggcacgggaatggcagctctgatttgcagtatatctttggtgtacagatatgctttcatttattgcttagcccattagctaatggaatttcaattccttcccacaggcattctcagaccctgcacttcactcttcctgtttccctgtccagcttggtacaacacattctagtaaaatcacactgatgtgtttaggtttactttgtacatcacatctgtaaccatctataagtttgccctaaactggcatttattttgaactgtcttccaccttttattgtacagcgttgtctgtactcaaagtgagcaactgaaaagaaaattttaacattctttttgtgtgccagacaagtaataaagattactatttttatggtaatttttttatttgaatatttctgtttctggaagatggtaatttttttaaatcatgaatttcctgtaagtgaaactatttgagggagtattgacctttttttgatcaatcattgattatctgtgttgcactctcagtatttctcttatagtccatatgtccctctgaataattgtagaacaataacttgcttacacagtgtttttagaatatgcttcaggaagcttgcctgtgtggtatttaactcagacatttatggagtataaaaccaatcttactgtgacttttaattattaggaaagtggcttacagttaaaataaagcttacagaaaatattgtagcaataattaatatccagtaaaatacagttgtaagcttcggttctttcagacattttctcaacccagttctaatttgatcgttactgcacctcagtaagataggtgatgcaggagtcatcatcccatttcacaggcaaagcctggcctgttcagtgaggtagccactggccccatgtggctattaacattcaaatgaaggccaggcacagtggcttatgcctgtaatcccagcactttgggaagctgaagcgggaggattgcctaagcccaggagttcaagatcaacatgatcaacattgggacaccctgtctctagaaaaagttaaaaaaaaaaaaaaaattagccaggcatggtagcgctcatctatagtcccagctacttaggagattgaggcaggaggatcattgagcccaggaagctgaggctgcagcaagctgtgatcatgccactgtgctccagcctgggcagcagagcaagaccctgtctctaaaattaaaaataatgataataataataataataaataaatgatgtcagtcaatgagaattaaataaaactttaaaaagatcacttccttggttgcactagccaagtttcaattactgagttttcatatatgatcagtggctactgtattagcacagatacagaatatttgtatcattgtagaaagttccatggggaggtgctggcctgggaaatggaagcattgagggattaaaacttgctgaagatcatgtgggtcatgacagaatagagtcattgctgctatatattccaataggatatttttacatttttcttagctttattgtcaaatatctgatgtaagaattgacattttaatgctaccttgtagcactttactgaatgcttatctcaactgaatttaaatttagagcttgagttacacaaacttttcaaaggatacagccctttgcctgtctgcacacaatggggaccttgaatttccagccagtgataccctccagaagggaccatgtcttaatgcatctttgtagaccttttggcatattgtagacaaccaagaaatgtttatgcagcctaatgaatgtgtcacatccaccatacgggcatatgtccatacatacagttagacaagacctttgggtagaatgctcccgagagagctggtgtctgccaaattttacagagctcatgcctctgctcttgctgttttagtaaaaagtagtattttatcaaaagttaaattgggttcaatattcaccatttgggtaatgggtacattagaagcccagtccccagcagcatgcaatattccatgtaacaacaagcacgtataccccttggatctaaaattttttaaaaatatgtatttactcacataatccaaatatttttcatagtaaatgaaaacgtctgtccatcttgtccttagcagtcatttagtccctaacctgactttgtgttgttataaagttgtgtcacttaagtagtacttaagtaagtacatacctacatccatactatctttccatttcctgcatcactgagttggacaaatgtgcccagttagcgttggtagtgctgaagaccatgttcattcatacatgcactcaaaatcatattaattacttttcagtgataaccataggtggcaacagatgaatgggctagccctaggctattattaagcactgggaatgagattgttggtgccttgtacctgtgctactttaacaggtgagacaattccagagctttccccatcatcctctcgttgctacagtctagacattgggagcactggaagcctatggtgacacagactggcagatgccttgggcttctaatggtgtatatgtaagccatcattttgtttgtaataattatggtgttgagaagcatttgtgtgctgtgcactctttcagcttgtgccacgtttagttcctgttatgcaaataccactttaaacttagaaattccaatttgcattaatattttggtttcatagagctaactattgcatttcacaaacaagtgcattttaatgagtaccggcagaatgatttaaaaatgttatttattaaatactattgtagaaaatgcagtctttggttgccagaaactattaagacgaaatataatgtgtgttgaggccacagagtacacctcttcaagagtatttgacccttatggctttcagtgatacaacagccaatgctcttcatgcaggcttggagggcagaggtaattaatataaaatagaagccagcgtaccattgacgtttgggtttacttttaaaatgtaaacatatttttactatttgacatttgtcataagaccataggtcatttacctctgagttaaggtgaaggactttaccagtcataaacacccaagttttaaagcagtgttttcttatatcttacatcttgatgttaaatcctgaaatggagtttgttgctgctttataatttttttccctcttcctaaaagcctttttttaaatcagaattgtggataaaaaaattttgatgtacaatgtgtgggaaaataaaaattttgcaactggattttcagaaatgaactattttaacacatggactttgaatgctgctgtcatggttgtcatagcttgtggttcctaattataatgagcttttttggtggtgttattgcagttgttttattccccctgcccccacccagtcttcaactcacttttcccagaaggagagttccaagcctttgaaaattctcatgattttgcaaatccactctatttttgtctagaatacaggaaagttaaaactgtggctggtatgatgccatgttttgaatccaattttaaagcaaccctttgcaacccagggagtaaagctgacatctttgtatctgtaatgaagataattatacctgcaaggtgacatcactagcaaagtaacaaatacccttgaaaacggagttcctggtcttctctgaattctgtagaccacatttggcatttaacaccagacacctctttcatgcctgtcgtttgagaagttgctttcagatgaatttactaaagctgactgacacagggttaaattaattcttttctttattactcaaagtgatacagacctttcttggactaatgtagcttaattagtggtcaattaaaactgaacattgctgaattgaagttctttgatcaaactccctggcatgggcttgctttctttaactagccaccatcttgaattcatttggaatcagtagtataaacaagttaaaaactggttcttttataagaaagtcagcaggcttgtatagctgtggtttctttttttacttctgtaggcggcaattcaaaggcatgctaaatgaaaacagtactacaccctgaaaaaattacatttttaaaagtaacactaagcagtcagaaaacagtcaacacccttacctgtttattctagatacatttatcttctatgtagaacaaataattaataattcacttcccaatttcagtggttgattttgttgttacatggaaggtgaaaactccccaccctcccttgcaaagtctatagttataacaaaaagtgaagcaaacaaaatccaacctggttgttgggagtagagtcggaaggggcacggtaaatgaaggtgtgcccagttgctcctaaattcattctttgtcactcttgggaaaatagttcacctctgtatctttggagtgggagtgacacactacttcatttacttattgatttcatcatttattttgaagggcattatcctatcagtatggaaactgataatagcatatatttcatatgaatcacttgattaaaaatacacattgcttttgttagaatttgggtgaagttacaaaaaaagagaattaggggagctgaaaactggggcagaggaaatcgtaagcattggtaataagatcacccacctccatttatccagttacatgtcttaatatttaaagtgtatataccattcttgtctaaacataaattgataccattccgtaatcctagtttttgaaagcttaacaaccaaaaacatacatcctagctggcattcagttagtgctgtgcattctggagtattaattgaaactggtacttttgtactggaaataaaagtaatagattaggtttaaatagataatttgcttagttcatagtgatttcttctggtttttggaaattttcacagagaaagagttaaaggaaatttggaagtgaccatgtacagtgttccccctgtaagtgacagaatttttgtggttttcattacttagatcgaaaaattgtagttataatcaataattaaaattaaaaattttaccagttgacagaaagagaaattgtttatagtcaatgtgcctttcagccttctctcttgccttctccctaaaaggctgattaggatgtaataattggggatgatagcgggaggaagacgacaattccatttaattaaagataatttattttacttcaaattggtgatgtcccacatgaataagagtagctttagcagatagatttattaatgggtactgacatctcagttgacagaaaaagcaaacattttctttcctcattgtttttattgtgtcccgtcacctgaaactgctgtcaccatgcttcctttgctgcttgacagagctgtagacttttccaccaaatatgcaattattggtttatcattgaaacaaagttgatcctcttctgagttaaaaactaggccaggagcttgaaaggcggttcaggctttcagagctaatgctacaaatgctctcttcttaaatcacattttctcaactgatccttcccatatctagttcatgagtagattgaaccttttgaataaggaccaaagatttcctttggtcttgggtgaggtgcttgcatgaatattcctttaataccttgaatgtcttggataatgaaatgtgccccaaaaaactaccatttgcattacttaggttcattcctgacaaggaattctgccctcgtgtgatatgttcgttgttgtctcatgcaatcgtaaatggatcttggaagttgggacagttttttttaattaggaagtagattcaagaaatgcatgatattgtttttcatataatctcctcagtctatagtggttgtaaaggtgtgctgtttagcatacctttagcaaaactgtatttataattctatgtatcttaaggcactttttaaatgcttctgacaaactgcattctgtttttccaatgtctatttgatctctgttacattaggcttatttgtcttactctcacatcgaattcctatatttttgtttatgttttctggtgttcagtcatttctgtatgcttgcctagtatgtttctttcataccgtcttcttcactgaatgaaatgcagaccaccttggccacttccttccttctgggcttcttttcctattcacaacttccgccattcacactgaccctctagctttacttatatctattgctcctgctgctttgttgctctaattttcatatatatttcctttatgctaatatcctttccttaactctttggatttcactggtttgtctttccagctttatttagaaaattaggccatataactaatgtttacaccgtagaaaggaaaatgagattctttctttcttttttggaagtgaagaggtgagaaggttgtggtagaggttttcttttattttaaaccagatggatttattttgtcctgctttgctatttcactatttcaaattgattttaaatcagtgatggtgttttcaaggattaatttttattaaatcttgattttcatgtcgtgttaaccttttccttcccctcagccaaagggtcttcttccttttttctgtccatttcacttgtttgttttaataacctgatctctccagccattattttatcctcaaatcctgccacttttatccatctttttttattgcactgttgtccttacttcaccttatatcttttcttcttctgtaattattacagaatccatgataccttctccaaaattctaacaaagaattctggaaaaggagaaattgggaaagagaaaaattgcaagtaatgttctttgctgagccctaggaagtctgcttggatttttatattcgactgatattcctccctagagttgcagtcatgattctatgtagtagggacacgaaggcaaaagtttaaatagactaacactgacccttaattggaggtgataatcctacatataaactttcaggagggaaagcgatcctgcattttacatcaggtaaactcagttgcacccattgccagtagctgggtcaggtgtgtaggggtgtgtgtgtgtgtgtgtgtgtgtgtgtgtgtgtgtgtgtgtacgtactgggagccaggttggaagtaggaagagaaggaggttcttctttcctctcccacttgcaagctattttctttcttttctgtctgttttcattatttctatggcaagtttacttgccacgtcttaaacaccttcaacctttttgtctcttcctttacttttttgctttactgctatcaaagagttaaggaagtccattaaattggaggccattcctcaccataagagaaatctggatgggatgcttttgacaactgggctctctttagtagcttctctctacttgggaaaatgtcagatattttgagaaataaatgcattgccccaaactgaaaacaccacttttattctgtaaaagaggcattcagggaaggagacctcctctattcccaggaggtcacaggaactgggagtggcaagaaggaagctgctaaacgggctccagatgcagctttatccaggggacgcctcatgcctggtcatttgggtggctgggcttgtcccacctccccttcttcatgccctcctcccggtctcatcctaggccctcccacccctaggccagccacaggcctcacagcggacatctgcgggtctgagtttcatatatccagcatgaagttccctctctccctcccattatgaattctgggctgtggtcctgcttgctccttgtgtgtcagattgaagttctgatgctgtcagccatgtctgaccaatcagcaaacaacaccacaggatgaaatttaaacaatgcagatgctcagatacagggctatgttgcctggaccacgaagggaaagcagaggtaaggtcagagtctccccaaagtggtctatcctgagcctgcctgacttgacacctcttgggctgcactgtgctgctttgacttgtatgttacccatttgctttgcactacttctgtcttccctggcattcaccagaactttcattttaattcgctctgcccgggttactttaccaccttcatctgctcacgtccttttcttttggattggtgctgactgtcattacgaatgttcctggattgcctcgtggccgagggtccttggcaagtgccaccttgttcaggtcttttgtggccagacttttaggaatagaggactgctgaggatcagggcaaacggacggagttaataggccttattaattttccctctgcaggacagtggaatttatcattcggttacaaccacggttttgtttcttaccattgtgatgtattgaattgtaaattgagcttaaatcatctttttttctcagaaacggtttacttagaaaagatataaatagatacaacctaaacgaggatgaatcagctcatcttccaagagttttggagggggagaaagggaattgataactctcccccacccgaatccccccccactttttttttttttttttttttttttacagtttttggtgttagctcactagattactgtttgcaaaagaagaatctcatcatcatcctcttctgttttaagtgtttacttggcccttttataatttaaagtgtttacacggttctgtgctccctaggcccatctggaaaatatttaaacttcataagatctataagactagaatatcacatataatgggatagggggaaggaagaaaaattagagccgttgcgtgtgtttagaataagttagttgtttgttcagaagcggctgctggaggaattggaacaaatagctgtgtgcggtgaacgattgggtccagagctgtacatttcaccacagaatgagccttggtttgtgaaactgacattctgttgtgacttctaaatccaaacaaatctctgcaaatttctgcccgatcgagttaataagaaaatatatacatgcagaggcgagagccgtatgctacttgtacttctgtcagtgttggtggaaataagagacggattttacctactgtattacattcaaccagcaattggcagaacccccagctcagcgggttttcttgacttttttttctgctgtgagaacaatgggatgcaaaagggcttcagaaaaggagagcagcagatacgggattggggtcacttttcttctaattgccttgtaattggggagtggtttccactttcccactatctcactggtgggaggggaggaagacagatgtggcttagcggtaacgagctttctccaggccggatgtgctgagggaccaggggggtcattccctgctctgggcctgtgatctgcttcacacctgtgctcattttcccccatgatcgatgaccttgtattaacccagagtgaccttttgccttcgcctgttctctgggacgagctcttggctagtggaccctcctttctctctgatttacaggtggttactggagccacatacacttgtttttcatggtgcactgtgcacttagcagcccggcaagacctgcaatttcatccctctcaaggggccaagcaggggattggaaggtgggagggaggagggtgccgcgagagtggttgctgtttgcatgtgcttttctattttgtggctcatatggtatcaattaccatttgatggcaacgccaggcctgaggcccttcgcatgtttgtcctgtgagaaagatctggaagaaccgacatatggttttgattgcagcaattgcaggttgatagaatgaacgcaggggtgaggtgggtgggttttccttccggccctttccactctgggttgctaatgtgcttcgcttgtggaactggtcttttcatcatccagcccctccccacttacccctcccccacccccaactccctgccactttgcattccctgcccctgccttccaaatgaccgccaggaacatgtggcccacattaaggaccttcaattaaaacaaacaaaaaattgtccactcttctgttcagtcccagagcaggtcagtccatcaagatggttggaagtgtaccacagttaagaaacaaatggttggcatagggggcagattccctccagaagcttgggacatgttttaaaatggctgttagttcagattgttaaacatcgaaatgatgctgaaaaatagcagcaatagagattaatgtggggtgtgtgtgtgtgtgtgtgtgtgtgtatatctgtatgtgtgtgtatttcatttaagacacctcttggaatctgtgcatctgctgcatagggacaggaagatgatgataatggataggagttctttggggttccatctttctgtacatcccaggccataagatgatggaaaagcaagtgaggcatgtgtgtctctatgagcatttcccttcagaaggaagatgttggagactcatctcccatgcacagtgacttctctcttactaaatttgtgatggtagggggtactcctcattactgtggctcagcagggattgcatctgtgaatatgccaagggagggtctactattggggaatggtgagaggcaaagaggagaaaagaacattataggcactttgaatgttacccagcaacattttttttgttgtttcaaagtaacatctttctataatgctttcaaatttacctgtctggtaatctgttctaagatgggcagcccatgaggttttgacttttttcactttggctattgcatttcaaaatattactcacaattaggaatttataccatttgaaacaataatgtggtatctcatgagtaaatgctgccattaacatcttccttcttttaaactgaaaacaagcaaaccagaaccaaaaaaaaaaaaaaaaaagcagaaacatgctcccccaagaaagcttgtttttttctttgagatggagtctcgctctgttgcccaggttggagtgcaatggtgcgatctcgactcactgcaacctccacctcccaggttcaagcgattctcctgtctcagcctcccaagtagctaggattacaggtgtccaccaccacacctggctaattttttgtatttttagtagagatgaggtttcaccatgttggccaggctggtttcaaactcctgacctcaagtgatccgcccacctcggcctcccaaagtgctgggattataggcgtgagccaccacacctggccaagaaagttttttaaatgtgagatgaatttttagttttgaaggccagctattgaaacctaatcacactgcttgacatacttcttcatatttatctttatattagagctgatctttatcaaaaggtagtagaaactaaaaaacttaagttattgacctaaattgtagggaaatgtctgtctgatcgactctagagagaaaattggccgtatctttataatggttactgaatgtatatcttcatgaggctacagtttttttttctttgctccaactttctccttatgatgtagagattggtgtattaaataatcactttttcaacagtcttgatgacaattttattttgctatttcataatcttcatacaatgggataagtgttttcagagatacgtttgaattcagagcaactggcaattaagtgatttgctctagtcacatgttttagtagtagctatttggttatttgcctgatatttaatgcacacatatgtacccttaaatcatcattcagtgtgatagcttaagacaacatttctgtttgctgctcatgccactattagctacgtttgaagagtgatatactgagaagtttaatttgctggggtttttttctaaaaacattgctttcctgaaatatatagtattgggggctcatagcaaaaaaaccgtagtatatgggttgtgagcctgtcttcgaacatggtgggtcacttaacagcagctgtgctggagagatatttgatttgagaagactgttttgaatcttctcagccctaacaccattctggttttgaaatgggaaaatggaaaagagttttagggaatagagatatctcagccttgaaaggaagcataggtagaaatctttcagttctcactcagatgaaccagcattcctaatctggctaccctcacagaggacaaagagtctgctgggaaatgtgggtttatatttgtagagacacacttcagaggcatgagatagtgttagataccgactggatgcttcgtgcccaacatcaatttggtttgcagattgaaatttaggaaagcttgcagaggagccaatcttttttatatacagcacctttaaaaaaaagactgtccactactattaaaatctgattcagtcttctaaaatattactacattcaagacaacttttaaaatgatcaaatttagatagacatcaatgatgttaaaagataaaagccctcctacatgtaatatatagtgtcttaaaccttattttttaaaaaagggataccacttttgccaaaagtttcaatgtagggatactcaaactgtccttggaagtcctaaaaattgctagttttttttttgtttgcttctttttttgttgtttttgttttttgtttgtagttattcacaaatggagaaatatttataaaattatattataatttgtaatgcacgcaaacaaccatcagaccacacttgaatcagagagttacagttataaattgaggaaagaggatgccagcacaatgcctaatggagtgaaaaattgtgcttattttcacaggactctcttggagaggagctaactactttcctctctcttaatacccagaccctctccctcagccctgacagcacgttacagaatgcattcacttagtgtgtgaagagctagctcaccacctccctttaagatctattcttgttattcatacattgcaaatttgtacttttgtatccacaaggaagacattactaacttcaagaaaggcagtgtcaatgaggagcaggaaaatacagtatgatacaagcctgccaatgaaagaattatactcagactctatgcgctctgttaaacaaaatttgaacctttgaggaaaaaatattggggattctgatgagtgtttttactctttctttcctttttttttttttttctatttggaaatcatggcttcctgatcctaagggataaaaaaaaaaaaaaaaaaaaaaacctcaaagaaaagactcaacaggctttctggacatcaaatagttcctacaaaacaacattctgatgacttgcatgtaaagaaatcagaaacatatgaattaagcttctctcgaaatacatatgggttgaaaaatagagagaagtgctgagaaaatgtgttttgggttttgctgagcccatgacgtttgaaaaatagtatgagacattgaacaaacacaaagcatggcttggctcacccattcctaatattagccttctagttcaacggcaaatcagtttaccatgtgcctaaatgtgagccaccttggtgcactcccccacacttaattatatgcagtttaaattttttcaattaggagctcaaaaataacattgcatttcaaggaaatgcaaatcttagcattttcttacctggtttgttcacctcagaccattttagaaaacaccacagattatttcaccttaggagcagtcacactgatgtggccctctttgatgtggctggcatataacagaagaaacgtatcatttttaagaaactggctccaaagacaatattgctattaaattgaagccaaaaaccactgcaggtaaaacatgatgaagatgaaggacgccctctcttagccatatagtagaagcccgatcatagactctcacccttacaccatgacttgagttcctgctcatttttatccctgagctctgcagacttctaagcagtggaagttttcattctctttcccacattgcactcaagagagctaacatgagagattctaaatcctgggattcctctgcatctggctttaagtacaggagcagaacacagggaatttaaggaacaaaaatagccagagcttcaggcttcttccactgatggtaagtcattgacatgcacttggatgaaatcctgtatctgttctttggactagcactatcgcctgagattatcagtttcagagagttacagagaggcagtagatttcatctttcctatttcaggaggagttattttggttgtttaaaaaaaaaaaaaacactttaatgtacttttcctaactccttcactcagatggtggcaagaagtttgacagaataaagtaattcagctaatatttatcaaatgcctactatgagtgagctgttagaatataaccctgaacaagacaagcatgagataggcaaacagactattaaaacctagactgataatgcattgattggggtgtacaggctccttaaggtagatatacaaaggacaactagtccacatttggccttagaggaagtgaagtgcaaggatgaatgggaattaagctggcaaaatgcaagggttataactggaagcaggggtgagcatggcatatccggtgacccagaagtagttcagaatgccagaagcttatggtacaaaaggataacataaaagatgagactgaaaaggtaaacagtggcctgatcaaaaagcgacttgtgagccctattaaggagttgagattttatcatgaatgtgacgaggagcctttcaaatgggtatgcctgagaagtaattgaatttaaaagtcaagacggataggaggacctggaaaacttagagtcagagaagccaagggaggcagatctgaccagaaggaggaaattgtcaacagtgtcagatgttgctgaaagatagaagtgacatttggctgcagcatccaggaggtcttgagcagtttcattgaagtagtgagtgtggaaggaaggtaaagaagtggagaacaggcattgcaagataattttccatcatcgtcatcatcatcgtcctcatcaccggaaaatgagcatcaattatcttatctaccagacatagagagtgaccaggtaaggaatgacacacctgcagcctgggagatttcagaaaacagatcataaatataaaacagaagacagcaacacatggtacaacacatgcaaagggcaaaatgagcagtgtaggccaacgggatgaagaacagaaagaattagggggcaggtgaaatgggagagtttttcaagcagtcagtgcgcttgaggtttgcattctggattgtgcctccttataagtcagtccaacctgtttttgattctccatccagtggaaataggaaacaccatcaaagatgatgcatagtcttaacttgcctgtgacttctgattatgtttccgaattttgggaggaagattaaagtcataaactgactcttggtttgttataatttcttgcaactgttattttaaaaatccggacacaggccaaggcaggaggattctctgaggccaggagtttgagaccagcctgggcaacatagtgagaccctgtccctacaataataaaagtaaaataaaaagaaaatctggatgcagaaactgaggtgtagataaatatagcaagtcagagatattcgtaaattctacatcgatgagtttcttgagaaattctgcacacccagtgctggacaactgtggaattgcagcgtgatacctttcacatctgggtcatctccatatgatatcttcttcctggtacaaggccagaagttcaccccacgcacaacacctatggaagccacttacgattcaaaggacagtttttctgaaaaagggtgcatgatgtatacttcccttcaacactaaaattctgctgcttaaactttgtaagtgaaggaaaggactggttctcttctactttggctgtcttccttgtttcctatttattgggtgcttgctttgggcaacccattgtattggatgtgctctaaaccacaatctttgctcctaaggagtccgtagtatttatcgggggatacgacctggataattcatataagatatgaatttctttctttttcttttttttctttttttttgagacagattctcactctgtcgcccaggctggagtgcagtggcgcgatcacggctcactgcaacctccgtctcctgggttcaagcaattctcatgcctcagccccccaagtagctgggattacaggcacccaccaccatactcagctaatttttgtatttttagtagagatggagtttcaccgtgttggccaggctggtcttgaattcctgacctcaagtgatccgcccacctcggcctcccaaagtcctgggattacaggcgtgaaccacaatgcctggccaagatatgaattctaaaaaaaaaaaaaaaaaaaaaaaaaaaaaaaaagtccttggaaagtttagaagatgaaatacatttaatgaaaattgagctcattcttccccaatatttgttccatattcctctccatattatactattagtacacaatcctgtttggacttactggaaaaaagagctgaatagcttatccacatgtcaagaaactttctgtttaagaacactgaggttcatcaacatcaaaaaatattttcagcatcattcaggcactggacatgctctacaaattaaataccttagggcccctactatttcagtgttttctcagtgtcttgttgcagtggcaaatgctatgaactacatttttcaaatgaatattgaagattgagaaagaggttaagaacctctatctattaacgatagaaccaaatctagaaagatgtctcctgctctgtagagcacattagggatcattatttatagccatttggctctcttaagacattttggcaatgagggaaaaatcataggttgattttcttggtggaatgaagaacattgagtttgctaacaaagagagcatgagtgactttggtaagagagcagtttttatttcagtggaaaggcagcctcctctcctaataatagctacattatttacctaaatgttccatgtagcaactgataacaaggcttactgcttaagaaatttggccatcatcttgtcctctctactagaattccatctgcctacagatgggcccttgctaatattttttttctgaaggacaacatgtaacttaagggcccactactgtgtgttattttgtttttttaattgaggtgaaagtcacataatgtaaaattaaccattttgaagtaaaccattcagtaatatttagtacattcacaatgttgagcagtcaccacatctgtctagttctaaaacattttccccagcccagaaggaaactctgtatccattaagcagttccttcctatccccctacttctaggctttataaacctttaattttaatgttatatacacacacaggcatacacatacatatatgctatacacacatatgtatgtatatatgtataatgtgtgtaaataatgtgtaaatatagacgtataaagatgtataatgtgggtaaataaatggatgtgtgtatgtgtatatacatatatgtacatgtatacatatatacgtatatatgtatacatatatgtatctacgcacatgtatatacgtgtatacacacacacacacacattcatgtctatttatagattaggaagttccaaacagaggacctaatatttcctaattatgtaaacaaagaactatctactttaatgaatgtttctccaccaggaaaaagaaaaataggaaacattccttgcttcttttaacctgtctgtatatttctcttaaattctcactagatgctaatttatcaaggaagacaaaaaagacagaaataatcctgagccttttgttgtgtaaaactgctgctcttcttgtaaagacattttctcattaatttcatcaacactgagaattttaaactgcttctcaattttaagcaattgtatgggttttacatttctatttttgaaaatccaaaattattgaacaaagtaatttagttagcaaagtttacatttcttggaaagaaatatgaaagggtcattcttactataatttttattgttaaagaaattgctgttgttcacatgtatttatgccctcctcattccggaagaatatttgaggtagccagtagcacatttttttgaattaagaaaaaattagatcaaatgaaaaaatacctaaaatttaaatatttagagaaagccaactcaattatattttaaatatgcctgaagtcgtgaactaactaatgttgatcatttagtcttctggtcctatctcaggaatattattgcccttcttaattcatctttcacctcctttaagaagtatttctgaataaccctataggataacttcctttacatttctttagctcatatggtttatacaaaaggctactcactttatcacattttctagttgcttattgtacttcataaatctcccaactagttcctagtgaaaattctgcccttctaattttttgtatgtaatttaccaaagcacctagctttgtgctagctaaaagctctgctctgagttaaattagtgaaatattgctggttgatttcacctaaaagtttgccccgggcaggagggaagagggtgggcatttgaatgggtaacagacagagaagcagctgattggacatagatgttgacaacttgcatacttatttttttcatttcaatctgtgccacagagtcatacatttggtaattatttcatgcttttgttttcagttgaaagtagttagggccatatgttttgacagaaaaaagataattcgtactttttttcagctttatgaaagggaagatggggtaacaattttacagtgtaccatggcagtgattcctgttcaaaactttaccagattggaaactcactgttcataacaattctcttggtaagcagaagatgaaggcatctgtttaaagcacccagagttaagtttgatgcttcaaagcacagcagagttcatttataactctacttagcactattagatatctttaacaaatatgaaaagttgtccaccagattccttagactgtaggtgatttggaaggatattctggtcaagtgctaacttctgactgaggatttcaaatgaaaagacctaggttataaccccattcctgcccttactctgtcttgtgactcatggaaaaggaaggcacttaacccgctccaagcttatgttcctgaatgtataagatgggtagcatggttgaccacttagacagataatccatctcaaaatgatgattaaagaagataatggatgagaaaagtccttttgatttaaaatactatgaagatgtgaacttttaataatgactaatgatagaattttgtcaaatttgctttacgtaattaagttcaagatcaaagaatatatctagagaagtacctatgtattttgtgaaatgtttctttgagtattattattatcattttatgtctgttagaatcttggcctcactgtcttttcattcttgcttgaatgtcgactcttcaaagtgtgactttctgcttgtgtctgatgcaactttcttcctgatcgctcttgcttcctgagaaggaataggtacttaggaatgatggctttttggctgtctgtgcttattaggtacaaacacagcactaaagacatttgggactggagaaataagaagagcgcctttagggttgtatgcaaaaggtcaaactataatgtagttagcatttttctttgtactgctttcccttcttgtaacaacctctcaataccctcataccttctctgctttccagaaatgctttctaaaaattgattattgggaaaagatctgagacctcattgccctgaagtgtaattactgctgacaaactgtgacagcatttcccaaagacagggagtgattggagatgtgatgaaaagtgggtttgtgactgtggaaactctttcagggatgtaggcttttacccctcttggtaatgtaccttgacaaaagtctgcagcaatgaaattaacttgttcactccaatcgcatctaaagttatttgagcttaagtcctttcttaaggatgtcagctttaggcttcaggcatcaacctgtggactagaattcaaagggaaaagggtagggaatggtgctcttaaaatctttaggaccattataggtaattccatatcctaaagaaagctcagccctaaacacattagagaagtggaatgcactaaaatatattttggcagaaccaatgaatgtttatctttctctgtgttatgatgttattcttagtttgacgtgtatcccatgtgtggtgtgtttattcattcatgcatgcatgcacttagtaaagttttgagcctattctgtgcccggcattacatgcacacacacatatgtccaagcacacctgcacatttttttttttttggtaatgccttttttaccttattgtttctgcaactggctatccttagcaggccttcttaatgtacaatagggtatagaagaaataacaatcaacattggagtaaacctaaaattaatttctgtctttattgtagagtcatagaatttgttttcctctggaagatgtgctgccctcatttaattgataaaacagtgctttcagaggtcacaaagctattttttggcagatataaccaaacctattttgatgttccagcacctcctaatgaagcagtagtcgtcatctaaaacaaaaagcagtcggttgctaaaggaggagaaagtgttgagatgtgagatgatctgttagacataattgacaatcatgaatttgatatgataggtgtaaacagagatagaaataatttagttacatctgtttaagatttaagataaccagaagcaataatgtttaattgaaataatatatcaggttctccttaacattaccttgaatttcttcacatgcacatcaatgcatttggtaaataaaagtttggaaacaacttagttaagtgtttagaacatattagagttgtgatgtgcttagcatccgcagtcttttatctgtgccaaccctgagcctggtaatgaagccaactcccacatgaataagtaacataaggagtgtaaccaggaagaagtcagggtttcacctggaccaaattttaggcaattaagtgtttcaagagatctttagccaggtgtaacttaatcagtttaaggcactctcagctagggccaaggtactcataatgttggcagtgggcattcgtctgatacaccacgttgaaagtaataggaaacatagagtgtctgctcagttattgccaagagcaagagaaatgcaggtgtaaaaatataaagaagtatttggagccagaggctagtacacatagacaagactgtatttacacttggctttaatagttcagataataacatggtggtttttaatcagtttagtgtgctgatatttagtcgtgggtctggtttcaccactaaaccctagtgtaactctcagccggttacttagcctctctctgtctctagtaatattaaacaagtgtattaatacctgctgcatcttagctcaacttcatgtctggaagacagatgaatggtcctgcttcttgcagtaacacacaagaacctcctttgtgctgccctgactgagatgatcttgtgttcttctctacgggcaaaacagccctaggctgctaaatggccaggcagtataggggacttaggactctacaaagctgggttttggtaggagtccatgagcaccgcggagagaattcttagttatcaggagatacggttgtagtacttaaaaactcaaactccaaaacaagactacgtggttttgaatctcagttttgccagtttattagctgtgtgactttaagcaagttgcttaacctctctgtgcctcagatcccttagccataaaattgggatgatcatgcaacaataggattagtatgtaagcaaaatgagtatatgtacagtttggctgcaatagagctgataggtgtaaacagatataaataatgacttcttttctgaaaatgacttcttttctgtttttctcgttggtgatccctgcttatgtcactgggatggctgcgggaattcagtaggataatattggaaaatagcttaaatctcaaatgttctatagctatgataacatcactatgacgtcatagcagagtgagtccactcacatctctcctggcagttttgctgcctcagagttggaataataactcactgaaaatacttccaaaatagtgagccactctgcagatttaatttgtaatattattctttctaattattagtggctctgtcttaagttcctttgttttaattgaagcagggttttttttcccccttgtaaatttctatacatgtcaaaggctaccaactcatttttatttagagtttgaaatttgatttgaaaaatatactgcagccagctatatgaaaaacataagaggatattgttgacttttgatgaagggaagaaagaacaaggtagagctgcctagccatgaagaacgccagggtttttgtaacccctggtgtgctttgcacgcagaaggcacacacttaaattggcatggctcactttttttactgtgcctttgctgagcttgctgcaggctgagtgcactggtagaggagtgcagggctgtgttctggccatccctgcctgctcaggcctctcctgctcctttgtggatcgcccaggtctctgctgcttcctggtgccgtctcctggatcctcttgacatttttccgttctgtaatttgattgacagttacagacaaggaaggggactgaaattcttaccgttttgtgacttcctaaaacgggaaaggaaatttggtgaatgagaaggggaaaacgcctcttggctgaaattatttacaggatttagccccaggtttaatgtactcatgaatgaataatgactcagctgatatttagaagccgggaaaattatgcgatttttgtgatggggtgtatagatatggatgtatacttgaagtggtttgtgttctaaatatattaacatgctcagggaatttctttttggggaaatacatatattctttttcatagatttttgtggtgcattctggtagacggaagatgggtcattgctcagttagtaaaaatgaaatatgaatatcatacacataagtggtacattttacactttttgatagttgtgaaatactctttttttttcagactaccaataaagagaatttgaggagtaaaactcttcttaccatgaattgttttggggcacttagaactatttagttaattcttttaaatactccaactgatttagatagaataaaagtgtcacaattttaacagcttacaccagtgaaatgtttccacttataagaaataccctcttatttgtcagcatactgaagacatatatgtgttatttctaagcacatttcctatttatgtgataatggagatcgccctttaaccatcacttggacgtgaaggaggattcttcttcctccattagtaaatattccttgacttgataatactgaaaatatgtgaggtgaatgagctttaatcctgtggtttggtttggtttttggttgtttgcagtcttggactgttcacctgcactgtcttgtgcctttgagtatgattaactgccttgacgccttacagtgcattacacaactctacttcttccatttcttgactaatctctcatgctgtttgactgcccattggaatctttaagttagctacttaggaaagactttaggaaggagaatgctaagagaactggcagagaagtcaggagcctgggctctgtccaggccctggcgtaagtcctttcacctcttcctttgactcctttacaaaatgaagttgaactcattcgagctttaaaaagatgacgccaagaggcaagacagagggcagtagatgtgaaagtaacatgaaagagaaaggaacatctgaaaaaaaaaaaaaggtagaaaaagattttgacaaatagtactaaaaacaaagaatatagaatagagagacccaattatactgataattacaattatcagtattgtaaaaactacagcaaaaaagctaaaaacatattcagcttttattgtccataaaaagtgatcacaccatgtctaactgtaattcgtttgtcaaaaacactagaggccaaggactaaattgcggattaagagtttcttccttttatttcctgcatatccagaaacctggggtcatagatactcttccatggtgtgttgtttggcacaacttgcaagtattttggcagatggttagaaaaaaagactttaagaaatatgcaatagtactcaggactctaaatataataaataaagctaagataccagtatcctgccattcattacaatcaacatttattgaacagcagttatatgccaggtagcagggatacctagaacttgcccctcccactagcactccagaagagttcctgctttcccagcctaaagcaacagcaagtcttacatgagctaggcttactgtgatagctgtcctgacggcgagtggcaaacatggcccagtgccttcctcatggatgaacatgactctacactgggactccccggtagacctttttgtgatgatgagaaagtcctgtgttggtgatgttcagtatggtaactagtgactgtatgtgctgttgagaacttgaaatatggctactgtgactgagggacagaacatttaattttatttaactttggttgagtttaattcaaataactacatattactaatggctactgattggacagcagctttctagacccattgttaaaaataattataagcaatgagtacctcttatgagatagaattaataatcccatttattgagggcccatgacagattaagaattatgtttgacatatattatccctaatcctcacaagaatggttcatttgacaaataagataactgaagttctgagagataaattgctttgttatgtcctcgcaaggaattgtgagagctggaatttgaacctaattggtcagactccagagctgggtgatttctagtaatctgccaaatctgtgtatgtactgtccggatgctgtgtcttctgagtacatcttctccttgctttatggattagttagcaatgtctttatcttggtcacataggacagttacagggtccatcttatctcttctgaatatggacgtatcactgcactggaaccattcatttttcttactgaggcctatgtccttcaaaaaatattaagagttgagggtccaacccagcttcttgagtagtaagctaatcacctacaagtatatttccccagtagatgctgagagaagcatcaaagtacatgggtagttctgtggacatcagtggcactcagtaaactcttggcatttgagtgtttaactgtcacagttgaggatatctgtgaactctcccaaggcctgagtcactgaatgagcccagccagtacttgggcgtctgtggctccattctgctttgctgttttctgctttccatggaacatacagtaactctcttgaagggtctgaaagcctcaattacaacgtttcagtgattctgaactgatttttctttggaaagtatatatgcagatggtacttgcagaatcaccagggggtagtaacgtggaggagtggtaaaggtctactggacaatcaggtggctaccacccaaccacacatggtgatgtgatatgaagccacttttctttattccttcagatttaaggtttccccttcaggaagcaggttacttaacaagtacttgatttcaccataacatgcattatgacattatctttttttcttttttcttttttttttttgagacggaatcttgccctgtcgcccaggctggagtgcaatggcacgatctcggctcactgcaacctccttctcccaggttcaagcaattctcctgcctcagcctcctgagtagctgggattacaggtgcatgccgccacacctggctaattttttgtatctttggtggagatggggtttcaccatgttggccaggctggtctcgaactcctgacttcgttatccacccacctcaacctcccaaagtgctgggattacacgcatgagccaccgttcctggccgatattttattttcttaaaaggtcattatcagatgccacaagagtatttctataaactatgacccaagtatagcctaatgttaatagcttaaaataggttttatttaccttttttgccctttaaaagcaaggaattattttttaatggaaagaacatagactttgatgatcagttcacatccttgctttaccccttgaaaaatgtgcaacctggaaagacagcttaacattcctgagtcacatttgtccaaataatacaaacaatggcaacaagacttcagcactaatgtctgatgttttttgtatgattaatctgtgccaggttccattctagtttctttacacacattataccatctaattctcacaacaactttgcatagcaggcattgtcatttccactttacaagcaggaatctgaggaccagagttaaaagtaactggtccaagattgcctagttaataaatggtggaatttgcagtcagacccaagctggtttgggccaatacacttgaccttcttatgatacgtcagccttgtgaaatagggcagatactattaataatatccaccttgtgtgatcattatgaaggttagatataatgtatgtggaactcttgccaccaaagtggttccacaagaggccctaaacaaatgagtaatcattattattttaaaatgtccgtaagtgaaaccgatatgccaagaccagtaaaaatgagagcttcttaaggaaaagagtaggaggcatacctttgtttcattttgtttgttggtttctgtgcttgctttttgttcttttctgttaggcacaggttttatttagaataaattaaatttttttttctttgatgagtgcagaaataatagttggaaacattgaatggaacagctaatgtaccatagtaatacttcttggattaccaaaaaaaaaaaaaattaaatctgtaaaatgaaaacatttttgtttactttggtcagttcaaggttcagtgttatctagagatttttgttaaactcaggatttctatatgtatgattgtctgctaaattcagaattagaagagaagagataatggcgctaactttgcatgttaaatatactgtgttactagttttccatgaagtttttactcaacaaataggttactaaaagagctgtgacctatgagtttcaccaagtctttccatttccaattcggcaacaaaagtttcacacttctcaattactcttgtgggaggaatcagaatgccaacagtcaccttgatctaagcgtattattggagaaaaattcaaggatagatatttgtttctcattagattttcctcatattttatcattggggtcactctagtacatggtactagaatttgggatttttatttcattttagattggactgattttctggtgttagtcattaaaaataattccaactctttgaagagatctgggatgtttgttattattctattgattaaataaagctattttatttaacaattgtgttgttaaactttctatatacttagaataataatactaaaaactgaatgggtatgagcttttcttattgaatttaatgtcagtattaaataccttattgaaacccatactttgaaagcttgattgagaaattggcaaaagagttgactgaagtaaaagtaatgaagcagttcactggtcatccaggttatgaaaaattaaaccattagagataaactgaactgtgaaaattatgatcatggtgttttcataaataccatctatgtctccgccaccattctaaaaaaaagtaccctatcaaatggtgaaaaataagagtgatgtttctgtgaccatttcattattcagttttcttatatttgaaatgtgggaggttgaactaaaatttgttggttcccttctttaaaaaagtatagttatatgtgatatttatttatttatataaacaaaaatatagagatcttaccttgaaaataacttttgaggtaagaatgataaagtatctaaatggaagatgaataacattgtatctgatttgtaaattatgatataaagaaaatgtataaaatatgtagaaattgtctgtataaaaaactataaacagtggtccgttgcctattaacaaagagtttcatgttatctaaaaagtcttcaattggctaaaacagcagaaaaatagaaattacatactataatatatcctaaaaacatttcaattccatagatactcttctccatgcagccaatatttatgaatttggagtaagtgacctactcttagatatttgagcttgattataattcatagtcaaagtagcctccttgtaaataaccaaaattaaccaaagatttttccttatcttccaaaagcaatgccaagtaattctatccaaattggaaaaaaaaaaagaaaaaggataaaccttattaggtgtcatcaaatggtgttgacataatgatatatatgtttaaggataatgtaatagaatatgtaattaaaattaaagtatatatgaaaagaattgattttaattgttttaaaacataagatgatttaataatatgggtcggagattctttttagttttataataaatatattgatttctgaaatttgggtatattccatagtacacttagcttatgttaatactgaggccagattgctgtcaggctaatagcgtgtagatatattatagtcacactacaatcattccgtcagttttcagtttccctttttcctgtgatgtttctttcatcttgttagattattctcaagaccttctctaaataccttcagtagtaattcacaaactctttgttagttaatagttctcaagaaaattctgagatgtggttgacagaacttagatcattggtttgtttttggattcctagccaaagttttattctttgtttcttaaaaatactcaaaaaagttttttttccttattgtaagccctctggaaatagaagcaaatcactgtttatacatttaaaatgtgatgaaaattacaaaataaagtccagtgaaatatagggcttgtatccattagtgccttaagaaaaatccctgttttctgaagtgcgagtgggcttttctggtttgtttttgttttgttaaagctccaggacctcccaattttcaagggcactttggggcatgtgtagcatttatttgatgtatggatgtagatgcatattttcccacatctgtctctgtggacctatcctttgtgaaatcctaaaccttgtattaatgcttagtttatgattcatggtgttctgagagcaattatataatttttctggggtgtttattcgatgtgcactgtaaaaaaaaatgagagttattttttggtaaccctgcacttgcctttttattggtgaatttcttttccttttactgtgacctgtgaatatcactgtaggctcactgccaattttgtgagccgctgcctgcttcaaaatggaggcaggaaggtatccattttcatcaagaggatgacagtgtttcagtctttctgaccatctggagagaggaactttgagagcaaaagaaaatggggattaaaaaaaattatatttagcagaaaaggcaagggggaaaaccaattaaagttaaactataccttatgaatttgtgcttttctactatgctgtcctgtttaaaaaaaacataaacaagaaaatacacaggctatttgtataaagaattggtttcccaagtctcatgagtattagtaaatgaatgtaagtaaattaggtttttggcacactttttaagtttattgtacacacaaatataataagcatgaaaaaggagggctccctcctcccgcttcctatgcacacactgattgttggtggtcttatgtagatccaggcttttaatggcctttttcatgcatctctgcaaaaagctgacactatgggaatttaatattctaagatatatttatcactttctgtggtttggatagttcatttgtgttctctctgtctcccccctccctacctcctctctgtaaaagtgaaaattttaattgaaaggtagagtttttactctaccatttgaaagaggtttgatgcatgtctttctgtttttaccattttcacatgcttatgggccatctgtgtttagaagaaaaagaaagaagtgcttagactcacaggattaccctatgggcattatacagtgtatttacaactagacatggtttacatcaactggaatataacacacctggttattttctgttcgcacaaatacaccgagcttttgtttcgttttgttgtgtttgttttagtgtgttcggaaagggcactgtttctagggtttgttcagatttaaactggaaagggtagaaatgtagcactttctgcctacttcttatataagaatggagcttgggctgctgtggtcaatgcaaaaagcaaaactcagttggttctttctcctcaggtctatgctccatcagcaagcactgccgactacaatagggactcgccaggctatccttcctccaaaccagcaaccagcactttccctagctccttcttcatgcaaggtaagatgctgctgcttctgagggaaaggccactggatagcattttcctgggtcacttaatgtcacagatggggcagaagaaatggaatagtaggcaagtgtagaatttttgaagtcatgctcttcttaggaattgaattccttaaaaattgatgtattaattaaaactgtactaagtctttctttacaattaaacccctttaagcagtaatgggttaagattagattgatctgcttcacttagagccgatgcttatgatggtcttccactcatgaccaaccatttcagcatcttcaccatccccaagacgatgtagctgtttgtttagaagtggttcagctccatgtatgttttgaacatcctggatttagccaactgggaacaagttggcctaatgtataaccttatgtaaaattttcacccacttactaatttgtaggtaagaacaagggtccaagatgaagtaacctaccacagactggaatattacatggtgaaagctctgtcccaacatagtaactggtttaggataaaaggcccaacttttgggggagaagacaaatataggaaattatggaattgtccagtatgtttaaatacatggatgtgtgcccccaccctgagcttgtagtcttgctactgatagcgtatacctttctgctgctcaaaaaagaccaagatgtggccgagtgcggtggctcacgcctgtaatcccaacacttgggaggccaaggcaggcaaatcacaaggtcaggatatcaagaccatcctggccaatatggtgaaaccctgtctgtactaaaaatacaaaaaattagccaggcgtggtggtgggcacctgtagtcccagctactcgggaggctgaggcagaagaatggcatgaacctgggaggcagagcttacagtgagctgagattgcaccactgcactccagcctgggcaacagagcgagactccatctcaaaataaataaataaataaataaacaaacaaataaataaatgaattttttaaaaagaccaagatgtttgaaatgatagcagctacttcaagaatgaaccacttggaggatgcccctaagggctccatcctgatatgtgtgtggcacttattttctaatgtaattatcttgttaccaagttaatgccctgaatttagatgtggaatttaccaagaacccctgtgtgcaaaatgttaactctttttgcccaggtgtgaaaaccttatttgtataagccttgtctacgggccatggggtttccttctttatgcatctctaggaagggccatgtcacaggaaggggagcacatttggggcaaagagtaccagggaagcagcctgatatagtggacacactcaaaatcattctcattaaaagatactaatcttccttcccttcagtgtgttagctcttttagtttgttagttcacgtgtgaaattccatggaaatctataaaattggatggaatggctctgttaggaatagagagaatttgttccacgcataatagagcccgtgtgtcagaagtcctttaactttgtgacccgtcctaggtgtaactcaaagggacacagcaggctatgtcacctgggtgcgttttgtgccgtgacaaaaagctaatcaccttcagttataaacagtagctacctcagcatcagtcccctgttttgtgagcagtgggagatattgtcctacaggagcttacagagattggcaactcaaggatccatcactcaaaacagatttcgattgaaaacattgacggaaggatatattttttctatctgcccaggaaagtggctttctggaagggtgcacattgcaggagaggccaggtagattatatcagtaggctcctttccctagcagaccacacaaaatatggggaacaaatttgtttatctgcatatgcatacccgaaaagcaaaaaaaaaaaaaaaaaattgagttgacatttttgatgagcacaattaatttgcacacatctaattctattctttctttcaaaagaacattatgccaagatcatgggatgtgataaatattaatttactgtgaaaagcataatttatgtaaaatatgtatttttataagtctgcatcaagcagagtactctgtgttaacagtcctaaacgcattgccacccagggtatcacattgtcaggagactcttgtttagtgatatatgttttcaatttatttgtcatatgtgccatctatttaaaatgttagtgatcttgaacttcatatttgaatttaaggtgacatttaaacctctgtaatctaaggactaaagctcaagtacatgaatgataactttaaaaaaaatcatgtgttttcacatgatggccacagaaacagttgcatcatggtcctgtcccacatcagcttcctttcagtagaggggtacttggtgccctgagaattcaagacttgaaggaatatgcaattaaggtgaaagatgttcagaaactgtctggggcatattgtaaactcactactgtggcctcttatttgtaacttcaatttccatcttctagttaaaactctgaagttgtcaaaatcacagacatgattttgcttgcatggttcttaaagagaggaatctgcaaactattcctcccaatatgaaatgagtccagttacaaaattctaacttccggatttaagaactcaatgaaaaagagcttcacgaaatacagtgtcagatttaacttttctattgcctaactttttaataggcctttactatataaaatgttatggtgaaaataatcttattttcaaggaagcaatatctgctatacatttaacagccagctgatggcctagtgtatacctagtactcaatactttttgttaaactattgaaacaaagaaaaaatgaatgaatttagcagtaatgtagatcatcttttcccttaggcttgggaaaccaaacctaaacattagcaatcattaataataacctgtaggccaataggcccagagaatgaaaaaatccgtagggatgtttttaataagaatgttaacaaaaggttaaccttatgttgaaagatactttatataattttaaacctctataattcataaatcgttttataaaatccagagactctcaaaaatatctgtaatataatagctacctagggcatgtttgtaccctttggattgctactgaaggtttaagatagctatatacctatacaccaaaaaataaaaataaaatatcctaagaactatatatttgagattcatcttctctgcatgccgtaatataattataattccaactttaattctatttattgtatatgttaaaaatgaaattaaacattttcaatctgagattttttaaaattaatacttctttacatgcttttaaaacttgtcaactttgtaatttctcaagtacttttcaccccaaagtttaggaacaatttaactttttagttggttttcatagaaaaaacagttagaagacttctaagaaatgtttcctttagcagtaattaccttgcgacttgacataattcatggtagaaatatactctgttgttcttttacagttcaatttttaccaagaacactttaacttttttaagtgtttatatttgtttgacaatatagagccacttgggaagaaatgatgactgtcttctgatgtaatcagctaaccaacacaaagatgaataacacaacaggcagtcattttcaagtatatgaaaaaaccctattctataaggcaaggctgaatgcctcagaaagtcatggttgtctttgtcctttacagatggccatcacagcagtgacccttggagctcctccagtgggatgaatcagcctggctatgcaggaatgttgggcaactcttctcatattccacagtccagcagctactgtagcctgcatccacatgaacgtttggtaaggcagacatacacggtaacgggaatgtcacagctagttgattaaacctcgtcctctgtctttccatgcatatacacaaggactctgcaaataagtgcaaaaatggcacacacccattattcttaagttgtattgtttctgtgatcaaagacataacaggttcaaatcacctttgtaaattcttccagattctctctggcattgttcttttgtttattgtgttttgctctgtgccttctttatcacaatgtcagcttccttgggtacataaatagatacctatttaagttgtagaatcttaacatggtggttcctggtttttttttttttttttttttttctatctgtagtttcaaaagatgtactgcagagggcagagtgacagtcggtagattatatgcatcacccaggagcatttcatttcccattgactggcctatgtcagctttggcctgttgtgatgtatccaaaagaaggagtttgtattttctgtagacttccatcagtaagagaaaccatgaggtttctacatagatcagattcccatttttcagtattttaactttaattcccatcccagcctgccactcatactgtgttttgcgtcactccaggtgaaaactggtgggctctagaatgttaggtctttcattactaaacatttccactctgtccatcacctacattcatctatcatagtatgtctctttatcctggaggaaacaactcagctgactttcttctagccttaaatatcaccacagcccagaatccactgttgaacttaagtctgtcattaaagagaggaaagagcctagatcttgagtgagatttgggatgcagataagatgaaacttgaatcccttgtgcaagaacatagcttaaacaatatgtggacctcacatcctacaaatgcgaaagcatatgggaaatccagtgatcccaggtgatacttacatcactactattcatcttgcatttgcccctttttcttcttctcatatctacacttaggtttctttctctgttctgataaaggaaatcattctggattcatgtggtctttgctctcttttgctcaaccagtacagataagaaacaggatctgatctcctactccaataatcaaaaaaattccagaagttaagatttctgatatccttgaaaatccgtatttagttggtcctagtggtagagatgctaagtagtcaattagcctatacattcctgagaggcagacagtggaaatggtattggcctttttgtatcacctcccaagattgaatgtgtaaatcacaaactatctcacatttcagcacatttccagtaaatagcagatgacttattttcaaattttctcttttcccacctcctatttggagatattagagtgaaagcttagagaaatatcaactatatcaactattattatgctagaatccgttttggctaaaattttcatttctgcaccatcattttccacttctgtgggaactcatggtcaaaactgtatgtgtcctatgagcaaggaaagttttgattacaaataaaagttttaggcactataccgcatgttggaatttcagttcttttaagagttgcccatttgacattaatttttcttcccttctgtgtttctttctttcttctcctatcatgctcaagagttttgagttaggcgatttgattttatcctagtccagttcactgcatgggaagtagctttaaaatgtgcttccatgcacaaaaagtataatttcaaaatggaaaccaactatattccttttagaaaaaattttacagaaccaaaacaatattatgaactagagagaaaatatcattttgaagtagtaacccagtaggctatatcagaagccatatttgcaatgccatttacctatcacgaaacacaggattttcatttttcatctgaacagttaacagatttcagagagtagagtttttgttttaaaggagacatgaataagctatcttgcaatgtatactaatgaattttcccactgttagtgaaactattgaattattatatctagttgtcattgtactttcagtatttaaccatgtgaaaatcttttactgaagtgacttagaagaatctgacactgacaatactttgaatatatagtagcagttggtgtcctttcagttgaaaataatggtagttccttataattttattcttagcatctggctagccccatactgaacaaagggatagtttaagaaaaagctaagcgctgttcctggattatttggggtataatttggccaagttgatattatctgtaaagataaaatattttaaaaacatcattgccttcatcactttatgccatgttataacagaatgtgtaattataaagcttaagatccacatatttcagtagcgactgtcaagttactgatgtttagtctttaaatcccctttacagttttagcctgtccaacagaatcccacagctaatcattactgtgttacacatacccacacaaaatcactcagatgaatggagtttgcggttaaagtttggaatgggttgttgtagatgattttatgtttggaatgacttggcagagttctttttaagaacaggatagagtcctcactgtctggcatgatttaggcatggtctttgcactacagggcgaaacagtcctaggagtctggaattttcctttaaaggaagttctgttttcttttatttttttgtaacataaacccttacttcagtaattctcaactgatggcagtttttcccttcagggaacgtttggtgatgtctggggacattttcattgttacaactaggggctagatgctactggaatccagtgcgtagaggctaggggtgctggtaaacatgacgtcatgtatgggagagcctccacagcaaagaattgtctggcacaaaagatcagtagtgctaaggttgtgaaatcctgcccaaacccaaagcatgattttattcttatttatgtgcaccagttattatatttttctaatgtttgaattatcaaccagtatatcagtaatggaaacatttccaacaattactctgttaatagacacgaaatacaggactcttgggcatcataagttaaaatgaacgaatagtgggcatgtaaagcctcgcactttgtcacactcctcatgtcctttgtagcaagcaggaaagacagtaatagctggagtaagagactaagaggacctcttatagtttatccctaaatcctctaaaagagacattattctctgtggtgtatttattacatctctgaatgacagtagttttcaagatagtttttaatgtaaaataatctagttataaatctcgttagtttatttcaacaactaattttctatgagtctctaaaaataactgatttacatggattccattggttcactcctttataatctatggggattaatttttctttttattctgtgaactcagcgttaaccctttgtcaaatcccaaattactgcccattttacataaagttaaaagggcccaaagattctcaccgatgtgattatctgttttgtttcatcttctgattattatagttagttaaatatttataattcttctcctctttttttgatttttgcacatttcaggcagatttgtagttcgtctgttcttcagaaattccacatggaataggactgtgtagaagtgaggttaaagttagtcatctctttttttgttcttttttccacattctgtttcttttcctccattttgttatagtgcttacctctatagcagaaatacctctatccctgctaagctttcagaatagctgtactatggaatgggcccactatatttttcattggagaaaattccatggactaccttgggtgttcattaggtggcaagtagaaatgagtttaacaggtggcctaaggaattttggggtcaaggaaagaaagaggtccatggaatttaaaaatttgaaaggcattctcaggaacttggaaagatttaaaggcatcatctcaacttttttacggaagtcttttaagttgggctattttggtcatacagaggtaatattttcaaaaacattcatgcgtctttgaaaatcctacctctaatacgtagattcatttccttagactagttggctctcaaataagttatacttcaatccactgtttattaaattctgactgataaccaattgttcattgagcgtatagtataattatgtgttcagtagttagccacaagttgtgggatgcagaactataagctctattcctttaaagagtttacaatacaggtgaaaatacattagaaaaagcaagaaatgaaaggccaaatataattaagtgttaaagacaatagtgcagaatgtaagtgcattagggacctagagagaagagatggtggaagagttggaggtagtcagggactcttcaagaaagaggtagaattcaagacggatctcacagagtaaacagggcaacactcaagagactatggtttcattcctcgtgagcaaatgcttgggttttaaatacccgtgactatcagcatcatattcaatctcttattttgaaataaacaatttttaacagcatttccaataatgatataataaagactcataatccattaatatattgcatatgaagaaaaagtgtattttagctttaatatattgcctttacataacacattcagatgcctatgagaataacttttgaagctgctttttatcttgaaaatagctcagcacttttttgtaaattactatgtccattttagtgagctgttcattcccaagcagatgggtggattgcaactaatttgccaccttacaggcactgtggcatacccaagaaacacagcttatttggaaaactaatataataattaaactcaaagcagagtcttaaaccaagtgattctgtaaagatgttgttctttcattgccagctatgtgaggattgcttgtaggtggggcatggaaagaaagtactcaaaccaaaataagtcatgtggtcctaatttaattcagtatagtcaatagttacatattgatgagtaagagagatatttaaccattagtgctttttaaattttttatttactaaattttattgttgctggggttcaaaaaaatttaatttgggaggaagaagatttgagactggttagtctttgccatttagtttcaagaagatcaggatgaaatgtaatataagccctgtggatcataatgttgttttattcattatatagtggaatctttttcacttgatcaataggccacacaaaaaaattaatagtagagtggtcttttatgttgccgaaaccctggagatgattttaagcagtaatctgtagatttcgagattgtgatcatttctcaatgtccctcattgccattatatccctccacagttgatgcaaacccaagctatgtttctgtataacttattatttgaaaaatgaaagctgtcagatctaaacaagatatattcttggctattttgaaattctaaaagctgtctccattgtaaaatagagagttgtgagaaaagtatttgaaaataactcactaaataccttatgattaaatatggccacctttttctgcttcttgctatagagctatccatcacactcctcagcagacatcaattccagtcttcctccgatgtccactttccatcgtagtggtacaaaccattacagcacctcttcctgtacgcctcctgccaacgggacagacagtataatgggtgagtcacagaaatgccaattctgataccaacaattggtgtcagagtttaatcatcaaggacctctttttccctttcataactgaatagcaattaggcactaaatattagtcacatgacagaatgaacacacaaatgtaccaaacagaagtaaaatcactggcttgagcataaccatatttttcgtcacaagacactgaaatttagctacgttctacgttgcaagtcattagattgaacaagggttcaaacagaccaaaactatcttgttcctcacattcaaaaagagtgaacaaagtcataagatgagccatcagtgactagtgagctacaaagcagaatagctcttaatggtagttattgaccacttcccaaaattccagtcattgtgctaggctcttatccatgatgtgccactgtcttccgaggactggttaatgtgaaattctcaggtgactgctaataactacatgaggttaatctcctggagaatgtgacactgtggagtccctcagaggggaagaagtatttgttcacttatgagagaggagatgcgtgggcatcagttggccagaaattatttgctgcttttttaaattaattaattaattaatttttaccaaggacatttactaatgagttaaggtccaagaagaatgctgttcccatgaactgagccatcatcctctcatttcttgtgatgttcactgtagtcttttccataggtggttccccagtcagtattcccactttgaggaatgaactgggctggatgtccagctgcccctggagggaagaggtggagttggtggggagatagctacctgcttctgaaccagctttgacaccttgttgttcagatgagcagcacagcttagtgccccagggtcttattaaaacctcagacttctcaggtagtcactttctgcggttatagctcaaactaactccttgcttggcctgaatgtcactgtcagagcgtcggtggggagaatactcagtgtatgtctttgagagaagatggcgcaacagaataatgctgctgttgagtcctcttagctctttgcacttgttttctttagagagtgtgtagaatttggggaagtggcgtgaatcacttatgtaggaaagtttttgatgttggaggagagatgtgttttgaaatgttggaaatataatttctgcctcaataatgccctccctgcgtattcaataatatatctcacacttgagatgagctatctcgcagcctctccactccgctatcctgtctaagaagcaaattgaggagagagtttccattttttttaacttttcctaaccaagcttctacaaatatgttgcatcagtttgaccttggagagctacagacagaggtcacatggggaagtttgttagctatcaatgcagttttggcagatttgaaaaacaagaagaaagaaagcagtgcagaactgaaagagtgagaaaagcatatttcacttcagtgtggtttgacaaatggaaagcccctttctgcagtcatgaggtctggttataaagaaggatgaccggtcattcatccttttacaagacagatttcctgtctacttgtggtttgagtaattttcttttttaggaaggtatgaaggtggagcagaaccttgagttgaggaaaacatacttaggctctgtttgaaaaaaaactttttctgattgatttgcaaaacagtcctcttgagagagaggcactatgacttggaagggacatatcaggaaatagggtggttatctccatgagctgtagacagcttagccacagctctcagtgggaatgagttttgcttggttttagctggtcatcttcattagtttgtggatgaacaggagaatctacttgttggtctagccagagtggagcaataggtgacttctatatgctgagaatagacttaacttgttaaaaaccatagggccttatttaagggtcttgacaataataaaggagctataatttaaaaacaaaagtatgagatttttagaacccagaaaagggctttttagaaatttatttcatacattattttacaataatggatgcacttgtcaaaatccactagcggaatgagaaaaagatgcataatctttaaggaaataggtagacatggtaattcagcattttggaggagcaaacctttattattatgcatagatacagatattactttaaggttactttaagggagaacattctagaatgtttttctttaaaataatatgttcaccaattgcgtacgtgaaaatgcagaggaaaatttaagcataataagccttagtattgcgtgatgtctgagtggcccatgttttttcacacttaagttctcttaggctttggtttgattttttgagtgtggtagaagtcagtgatggcagcgtgtctgtataacaagaagagaagctttctcttctgatgttagtgatactaccctaacaaacagtatggattaataggatacatctgcagacttttgaaaatatttggcatatactcactcattctgaaacgcaggaagtaaagaaatattacgttgcctgtatctcaaagaacaaacagagctaattaaataattggcaaatagggaacacatagcctgacacatgtttgagattacacacgattctgtagaaaatgactgtaagcaatactaatgccttaagaatggggttcgagcactaacacatggacatcacatttttcacgttttcctggtaaaaagttgcaagacagtgcagtcttttcatacatggtgttgatgtcttaggaagctgctttttcagttcagaagagggctgctgcccttcgtctcagtgtcatgttataatatgtctttctggtggtcagcagttgtcctgaactgacactagaacaacgcagtgcatgtggggtgagatacaagctctagaactctcggaagggaacctctctgtaaccacattccctttcttcttctgttctctgcatctcaaaggtggaagatgcccactgaggtttgctgtttgtttggcttgggggagtgaccaggtgtttcttgttttgttttcttttgccctataatacccaatatcattttttgagaaatccataagaaggataaagcttacttggattacattaatgagagattttttttttttcatgacacattcatccatggattttcaagagaattgtagaacaaggtattttactcattgcatacagtccactacttttctcaagccttgctggcaaactctggagatcatattagacctttctgaattgaaaaggtcatctaattagccctccaattagaggaatataatgtatgggacacagcatggattcacagtagttcagctggtggcgcacccagttaaggaaagaagctgtcaggggtctttgggagttaccagcatcagcaccttctactcagttcttcaaactttttcaatgttatgccactgggtattctcagaagcagtgcagttcagtgcctctgcatctgagcatacatacggaggaggaagtgtagtaagttattagataccagctatagagaataggaatgtctgcaggatattaaccatacacatttggttagccacatacttccttcctatttgcaataatatccagtagcccttcctgatggaaagaagtaagaggacctcctaccatagcacagaccactgagactgctcaagggtgagaatgcgtcgtctccccattgggacataccatctgtatacattcacagggtgtgaccctttgtggtttgaggctacacacactcccttgccctcagagagaactggtcatataactaacataatggttataataactattattgttttattagtctttaactggcctgcattctaatacgtggtcttttccacgtttttaaacctcaaaccaaacagggttgaaggaacagactaccaagattgatttaatacaccatatgctaaagattaccctggaatatctatctggttcatgaattaatctggcttagaactttaacttcgaatgacatgttagtatgtggcttgtctagtagaaacattatgtccttttctctttgaggacttggtttcacagtaattttattattagagtagtcacataatgttcactttatattttacaagaatattgagccttgaagtagtcaggcgatgaacaagcacagagcataagagtaataagaattgtatccagcaatgtgaaggcatcttagttaccaagaccaccagcagagaacaataaactagtttgatttaaatctcctccatttcctgtgcacgatcaggaagcccaacttccccctgaattcctaggaatccctcctgttaaaaaatagtgcattgtagtctatatacttgcgtttgtattttaaaatggttgtagtaggagtgctggaaatgttccttctttttgtcatctttatagataagcacatggcattgttatgctgtttctaatggtttaataacacgagggtcactcggacacagtttagaaaaacctactttgaaagcagtcatcttctctcaggcaaacacagtgtgaattgtgctgcttattcttttgatgccttcatgatgttcccagccttagatgatgggtgtgcattaaaggggcaacacattttccaaattctgatttttagtagttgatcccaaggcaccactcatcccagtgttttgttgagggtgtgttctaatgggaatgaacatttccccaaagctgaggctgagacagagggtggtctagcatgtaacccaagatacaaaacctttctttctgcttcatcttctagccagcaacaccacctgtgttcaagccatctgaacaatacttgggtggcaggcagtgtcgaagcctcctacaaaaattacagttcctcttaataactgctcatcttccattcatatttgtatgttacagctctacttagggactgattatatttctcttgggcaagataaattgattagagccaaaattagaaatcgataaagtctttaccaagcaaatgcattagttttcatctttctgttacatggacattttgatcatctctaatatgaattgacaaaaatcttgggcctcaaagagtaatcaagtcctgttacatcaaacccacattttcagctttaatgtatcttgctaaacatggcccacttctcaatgcaaaaaaaaaaaaaaaattctgccacttgagaattaaaatatatttcttttccagttataccctttgttatatctgtcacacaaataaaaagagaaatctgtaagagaaagactcatgtagcttaacatgttcaggcaatctagaaaatgtagcttctccagtgtttcctggaccagaacaaaaggcattccaagtgaaagggcaaactggccccagtaaactgctttgaaatttaagcccttgggtttggcactccagctgttgcaaggtaaaatcgcttcatgttaaaaaatagtctgttcttatcagtggtttccatgggtagcctttgtagttttctgaaatattttcatgacgcgatgaggtaagaagttgattctatttttaattctatttcctgagtcataatatctccctgcataaaacaggcactgatagaatgtttagttagaaaggtgtagttctaaagaaatcagattggtcataatatcttgcctcttctaacgtgtgatttttggggcgtatatatttagtttttaaatgctcctaaaatatttgtattggttttcaatactttgtttagtttcataaaaatatatatattatttgtaatcttcattttaaagttgtttaaaggaagaattaatcttttgaaagccactactgtagcagatattatctgtagtgaagcaatatcttgttcttttttggcttaggttctttgttagataatgtgatttttccaatgtagctctgaactttttgtgaaaatctatattcaaatcaagcagatatcacagattattttgactgatagatctaatttttaggtatataataatgaaaagaaatatcgcttctaggaaaaaaaaaaagataagtacccccaaataccatggtaatacatactgaaaaaaggttagtatcatctatatttcacatcattattattttctctttagaatggtttttaggtttgtttgttgttcttgttgtttgaggcagagttttgatcctgttgcccaggctagagtgcaatggcgcaatctcaatctcggctcactgcaacctccgcctcccaggttcaagcgattctcctgccttagccaggcatagtggtgcatgcctgcaatccatgtttttagtttttaaaggactccttaatgcagaaattcttctcattttcacactagatataatttgttgtattttatcttatattaaatatttttaatactcttgatatctgagctgctcccagtggtccaattgtatgatgtcagaccctcatttcaaagaacttgcttatacaatacctatcatgagtactaatgactcatgtattttaatatcataactttgtgatatggaagtttattttgtcacgagataattgtgttcttcttatcatgtgccagatttctttcagtattttagcaattaacaaataaatatgggtgtgggttttgtaaaccaaataaagtatatatcaaaacattatcggctgggcaccgtgactcagtcctgtaatcccagcactttgggaggccaaggtgggtggttcatgaagtcaggagttcgagaccagcctgaccaacatggtgaaaccctgtctctactaaaaatacgaaaattacttggcgtggtggcgtgtgcctgtaatcctagctactcaggaggctgaggcaggagaattgcttgaacccggaaggcagaggttgcagtgagccgagattgtgccactgcactccagcctgggcaacagaacaagactccatctcaaaacaaaaaagaaaactcatctgacaaactcaacatataaatatatgaaaataacaagcataaattagctatgctaagcagaggtcaggagaattaaattatgacctggaaaagccatagaattggaccactgaagatccgaccccactactgcattttacaagtgtggaaggtgatgacaacacatttgtaagaaagaaggctctcttagttcaagaatggggctggaaagtctttgaaattatatacctgtttaatgaagttttgcttggattcattgggtgatttaacctttccttttcttatttcacaaaatagtgaaaaacaatcttccctcagaactttaataggttttatttagatactatgtctatttgctaatgttgaggctttagtaaatacaacataccccaagtgctaggcattctgttaatactgaagaccacaagaatcctggaaatcccattttatcacttagttctaaaggcaagataccttccaatgatacatgttaaagaaagctggctttgaattgtatactgtaatatatgtcttttattattcacaatactctttgttcttctcttttgtagataaaaataccagtgtttaaggcagtagagataagcttcatgaatatgtagacttactttatctctggaattcgaggccatattgacttttagtagcataccagttcactttttttagtgtgaacacagacttttaaatatgtggagaatatatgttatttaaaacattaaaaatattttctctccttgttagccagacctgttgtggaaatttttgtttgtttgtttggtgtactgtaggactgtgagacgaataccccgttttgctatgtatcaaatttctatttatttgaaaacagatggaagttatttgtgaagataattccatttactataaaataatataaagaaaagccagactctgaggactccagagacctgaaagtagtctatacttgtcagcaatgaccgtcacatagcttgctacattcaccagctcatcaacagcaaggggaaagtcatagcaaggaaaccactttatctttaaaccaaggtgtcaggtttatattttatctgtaaaaaagtaacatgaatatatttgacatctacctcagcaaacaaattaatgctaattaaagattaatgtgttgtaattagcattaaaaatgcaattaaattgtgagtaaatggaccaggaatagaaaattgttagacgtctcactgcctggttttcatattctgccttttgtttttgcagcaaatagaggaagcggggcagccggcagctcccagactggagatgctctggggaaagcacttgcttcggtgaggaaatattgactttggactccatatgtaccattgtaaagggtgaactttaatcagaagtggacatttggaattttagaaaatgaatggcaaatagctttgatttttggaaaatgctagctttcttgcataacagtcactggaaaatttgagaaggctctgaagcttccagtatatagtctctttctctcatcctcaaaatggtactaagctgcactcaattatggatgtgggaatattctcctggtctttgggtttataggttttttatactgatgtcttatttttctctaaagtaatatgggtgcacattgaccagctaagactgtcttagcaaggaatagttctaaaacactttgaaagaggcatttgaaaaaaaaaaaaaaaaaaaaagacaataactgaggtccatgaagaactgtcacataattggcacctgggggactcagcttctctgctttgcccacctactgccagaaagctaaaattgaacatttcttgcatgttccctgatgacaaaatggcataccttcattgtctcagagagtatatctggtattttagtcaaaagctaaacatggtcatttagaaatgtaagtggagggccaggtagtgtggctcacactggtaatctcagcactttgggaggccgaggtgggaggatcacttgaggtcaggagttcaagactagcctggccaacacggtgaagccctgtcactactaaaaacatgaaaattaactaggcatgggtggcacatgcctgtaatcccagctactccggagactgaggcaggagaatcgcttgaacctgggaggtagaggttgcagtgagctgagatcatgccactgcactccaacttgggtgacagagcaagactccatcaaataaataaataaatgtaagtggagatttctttctctaagattttgtctcttcagttggcttttaccattgagagcattaaaaaagttcacactgtattagcattgtgccctaagtaaaagtttttgtttcatctgggccttctgatgctatgcaatcaaacgcctagatctggcaaaagagtggcaaaatatcttaggaatgatcctgttcaacctctcattgtgtagatgaggaaaggaaagttcaaagtatctgcttggcttgcccatagccacacagccagtaggaacgaagagttggtttgaagtctgctgaccccagcctggctcttttcccaccatcccataccacatcagtaattcttgttttgaaaaattaaaataattgttaagttcttcatttgacaattttggtactgtagttgattattacatgtatgctgtaacttgtaagttctaaatgaattgcgttgacaacttcgtagtttagaaaagtgtgaattattttaatgaatgagggtgttttttttttctccttattgttttaagatctattctccagatcacactaacaacagcttttcatcaaacccttcaactcctgttggctctcctccatctctctcaggtagtgtatttcaaatcccatttcatcatataacagtttataagaatgattccccccttgtacttcctgattttgtaggtggaaactcacttccccccaaatcccaaagctttaacattcctataacagacaaatacaaagggtgggagagacaaattaccagataacagtatagtcgtttacatccaaaccttttcttaaaaattagattatctttttaaaatatacaggcatatggaaaatgtatttcttacacttttcttagctctgcagaagacacccaacggcagaataatgtattccaataaaacgtctcagatgaaaaaaactcagttaatatagtcatgaatatgaatatagactagatagtcatcaaatatagactatttaaatggatcatttcctgcaggaatttcaggctttccaaattccctctttaaagtacatgccattgggatgtttagagaaaactataattttgtaaataaattgtgaaataattgtgtggggtagaagggatgtttgacttcaaagtataatacattcgtatgacctgtggcttcaaattgaataactataatttgtagaattatgtcagtaaataatttcacttttcaggggtccgtttaagagactcattgtctttccaatataaatgcttccagaaagccttccttggttcatgtctctgctctttggtaaggagacaggtggcttattaaaaaaacaaaacaacagcaacaaaacctaaatcacatctgtacctgatggaaaccttaccttactgtaatttatagtggagttacttgcgtttgttatttcctgcatgcagctctcatggcccagtgtaaactcagctccttggtcgaggacaggaggtttcacattgccacaaaactttcagaaatgatggccatggcttagctgggatttaatgtcaacctcttccaagcctccgtggtatgagaagatcacagaatagagagggcagtgggattctgaagtctctatgtccagagagaccgcgttgaaactgggaagcgattgaggtgattttaagaggataatcaaacgttccccctggtggaaatagaaactagagttcagtattgttgtactcctcgggttctgtaccagattcttacactctgaaaaatgatttcaattgtcagtaaccccctttcgagacaacaagagatacaacaagggatagaggaatctgagcaggtggaactccagtttccacatttcaaacaaagtagctttcattttattcattttctaatttagaaaaagaaatgttctatggtatcataatgtttgagaacgactaatgtagtctgataccctgattttacagatgagaatactgagtcccaaaaagggagttgagttgttgagtttattaccagtggtaatagcagagcttggacaaaaatctggtgctcacagttctgccatccatttctagattaatggtgggaaagaaaaattaggatgcacagtcattctagaaaacatcacaaattccctcgacctgagtagcatgatctcagtgaaaggcacagaaacaaggctagagatgccactttttgggtcttggtaatgcatcatggaagaccacatgttaggaagaaagaacttttatgaagatgcaaatatggggacagattgctattttcacaccgacggctctgtccaaattctgtcaagaaaagtaattgaacaaaatattctatttttatttagcataaaaatatacatgcacacccagaaaagacaggaagagtggattttaaaagtgctaacagtgtcggggcatgagatttcagtgagatcatagctattattttttccttttttgaattatgtattttccaagttttctacactgaatgtgtattattttacatttaaagtgttttttattttgtaggttagacatgtaatatgtattctaacagcaatctttttttaccttcaagtttaatgaatcataaaaaaattattttcttcagaagaaacttttagtcattgctgtatattgactttaaatttctggcttagtggatcactgataactaatcttattcccttaaaaagtttttcaagatttatctttttctaaagattgttttaaaaacaagtggcaaagctgttttccactggtgcgagaattttggtttaacataaactagccttgcatgaaggtctaacaaaatcccatttttgtacccttaaaagtaccttgattccatggtgatagtttttcttccacaggaacccttcttaccaaaattcagaatcaattaaatgttctcttttaggagacagccagcctgggggaattgtgagtctatgtaaagtctacatattttacatttaaaatgttttccttgtcccaaaattcttatatgggaagtttacatgtatttacgttgttgtttaaatgaaaatcatcattgccattgccatttccaaaaggactgtttaaaatattggcaagcgtctttttacatgtgtctagatctgattgtaattcccactttaatatcagcaggcacagctgtttggtctagaaatggaggacaggcctcatcgtctcctaattatgaaggacccttacactctttggtatgtctcatttgctaatctctgtcccacccattttcaggtcatgttctttcttgttcagtctcctttactctccaagattttgattttccctgttagtaactttaagtcagcattaagcacacaggtttgcgggagccagagtcattagcctatgcttgctcctatttggagatgggaacccagatactactgtaatggcagccccagggctctaaatatctagtagcagataaaatcctggaagggcaatggccttctccccatctctaggaaagatccctgtcaatgattaaatcactttcctgctatcagagtgctggaactccagccaggtcctatacctggaacatttgattccctctacctctgctttactttccagaataacaggtttacaggagctttccttctcgtagaaacccagtggtatccttcgtggtagagaaatgcctactcttccaggagtgaattgctgaaaatttccatggatgtagttaattattataaatactcacatgatgattcagtgtctgacacttcagtctttctctcctcatgatggtgggggccagaaatatgcaggaaacaatgctggttgtgcagcatttaggctgtacatgaatttagcgggaaggaatagcagtaagggagaggagccttttagttcctcggggttgaggttttcttttctccctcctatcttgagatgacacatggaagaagacatagatttatctatctgctttagtgttgtcttatattcttccctttcagcttaatcttaaggaaaatctgaaaagaaaagcaaaggtggatttccctcctttgctgtgttcttccttgctatagtgtatgaatcattcagctatgcattttaaccagtaaaggaaaccagacagtgaaacatatatgcactacccagcccaattaatctgcggaccacatccacataattagttgttttagtgtttaccttcatcagttattctctggggcctattcatcaaaaccaggcttcgtccaactatagaactgtaaagacggggtgtatagttatgggccacagcttccattctgtttgaattctgaacactgaagaagagatttacaagcagaaactgctgtctctaccaggaagctgtgagccagaaactgtgataggcacatgtatgatttcttttcctgcatacatttacactcagaagtaagtatgtattatcattcccatatttataaattagaaagcatgcactccaagaggtttagtaacttttccaaggccaaatacgtagcaaagctagcagtctaggggaggtagtttaactcccaaacccaccaaatcagaatgttctgtaccatagactactatattagacacacattcttcctgtcagtataaaatagaaatgttttttctcatgcaatagagctggtacacttgtttgcacagccgattcaaaatcaaagtcaattgtagcatgatctagtgcaaagagtcactagatttaaaataaaaagacctagattccaactctgactttaccatttcctagcagtgtgacactacgtaactaattcactttgtgtctttgagcctcattttcatgtctgtacggaaggaatcataatgtcttccctgcctgcccatacacacgtgaaacaaggatcaatgagatggtatattttaaagtgtacactggagagtggtatttgatatcattattgatcagtttttaaaatgaatacatacctttaaaatgaatacatacattttcttcactaaaaactatacgcattgtctagttgtgaaaaactagaatcctaatggcaaggatgaacaaaggttggttggtttttaatggtttaaagttgcgaattctatgctatagttggggctttgaactcagttagatgcccccagtgaacagttgattcaagtgtttgtgattcttcagtcttaaaatcttatactactttagttgacagaatttatataatttttttctgtaaccattttgaggcccttacacgcataccaccacacacccactggttttgatgacaggaagccagaaacaccggtaaaaactcaacaagaaattatcatccatttgcttttccctgtctctgatttggtacttagcactgggtcatataccacagggaagaccaaagaaatataccttcaggaaaagaatttaattaagaaactataaataggtcatctttccagtggtaattgtttaaaactctttaacttaatacctgccagaaagttccttaaattcagtgaatgtttttctcttctaaaataaatttaaattgcctttcaaaaggcagtaccgtatatagcacatgtatgttataatgtcctggaataattattgaatttagtttgttcatgaaaaataacactataattttaacattaacacgttctaccagttttctggaaacaacactatttgtattattgttttaaggaaatacattttattggaaacatgtatttagaaacacagtgtgttttttgtcgactaaaattttacttgtataatttaggcaccccttttgaactaaatcaaattttacatcatttgttaaccaacagcaaagccgaattgaagatcgtttagaaagactggatgatgctattcatgttctccggaaccatgcagtgggcccatccacagctatgcctggtggtcatggggacatgcatggaatcattggaccttctcataatggagccatgggtggtctgggctcagggtatggaaccggccttctttcagccaacagacattcactcatggtaagtgatgaaatttatagactctatagttatcatatagagttagaatttcagatatagatactattgttgctgttttttaaaaaatcagctttattgagatataattcacttaacatacgatgagcccatttcaggtgtacaattcaagtgttttagtgtatttacaaggttgtgcaaccatcaccatagtctaggttttgaatatttttgccccctgcaaaaagaaaagaatccccgttgcccattaagcagtcattccccatccctccacttccagcccttggcaaccacttgtctacttcctatgtctatagatttacctattctggatattttgaatatatggaatcatacaacatgtggtggtcttttttgactggcatcttttacttagcatgactgttgcagtttttctacagtttgccacgtattagagctttattcatttttattgtcaaatagtatttcactgtatggacataccacattacacagttgggttgttccaactccttggctatgatgaataatgcttctataaatattcatgtttaagtttttgtgcagacacatgtttcccttgaggatgaattgctgggtcattgttggtgtttgaaattattcattttggtgaccctggccaaagtgtacaatttgagttcatattataatatgacattgctagtaattcaaatattagtgttttttttttaattaaagaagccaaaatagtgtctgtcaattctgagtctgggagatagaaatatatggtatgtttatttgtataaatacattgcatgtgactgtgtaatttaatagagtagctttactactacctatttagaataagtctttatttgaattatatttaagcagatttgtccatattacaattgtgatttttttcctcattacttttgaaaggattttggagataattctttttgaggatgattatgaagattcagagactcttcttaatagaatattaagtgatgacaattaatgaggtgaccagagtggtggagaatgtaacttgaccagtgattctctgtagttctgatcctcacaagctctacctcgtctctaagcaccttagtgtcctattttgccccttacaggctcgctaaaagttgcttggatgaaggtatattttccattatcactgtagcatttctcgtttaagcatggtcccaaaaggaaatgcaaaatacatacaaattattatgaggttcttttaagttcttgctcagtagtattctcctgtccatctttcagtttctcttaataaaagtctaagattaagagtaccattctgaacggtgtagtattgaaatctgcaaccaatttgaaaccaaaaatactggtttataaatagaagcaacgaactcacatctaaaatgtggaaagatatttttgaatgccaaagagaaatctttttttctttcccttgacctctgccctaaaaattcatcattgaataaaaattgtttatatgttcatggcagttgcttagagtttacaaaagaaaagtctagattttaatttagcttggcctcaggtaatgtgttaaatacacttgggatgcatataatatgagattttcgtttgtacagctcttttttttctaactacaatgtttaaacatactgcttttaattaagaaatctggctttattaaaagccagatctgtgacttataaccatttctgtatatctgctctcaatcaacagaaaaatagtttaatttctgtagctgtgttcattttgcatatgttaaacggatgtaacatgcacccagggcattgcttcagagactattttttccataaatatgtaaagtttttcttaaataccatatgtaggttaagtggttcttttaaatattaaactatacataaatacttttggggactatttgacctttgaattgactcctttttgagtcagattcagaggtgggatgggaggaaaagactagaattatttttggagatgggaagttggactgacctcagtagaaccgaaagtgagacgactgaatagaacggtagaaaaaaggaaataattagccaatattacatagaaacccctttaatttgatcttgatatacacacacacacacacacacacaaaagcaataaagccgccagttttgctgataaggataagttcctgttttctcctctgaagacatttaatattcaatcaaggacagccacagagccaagcagatcatagcgtaactccaaagatatggcatgtcatcaccctgctgccctttgaaccaaatggggttttgcagtctctctcctttcttcctgaaaaccattcaacgtgtccccagaatctgagctcctcagcctgaaacactaatgtgtgtgaaaaggattggtttggcctatctttcccgtgcaaactggtatgaattttaaaacaaaaacataagaacaaaggaaatagtttttgaatttaatcagtctgaagttagcctttgaccatttgatacattccacaataaaaaggaagtttaaggggaaggcaaaaaaaaaaaaaaaaaaacctcatcccccttccccacaacaacaaaaaaattcaaggaggatactggtaatgttttccacatttgaattttaatacatgaaacaggctataaaactttggccagctgcagtaaataaagtagccgtgggaggtatgcaccggaaacttcagcagagagcactggtgagagtctcattcccaactacacaccttcgtttgttgttctgggcggaagcgagttgcagtaacttgatactcatcccagtcccggttttgtattgagcacatcgcctttctaactctcctcagtaattccttctgattaaagagtagacagctctgaatcctctcgacctccgtacgcttctcatttcctttctccctgccttccaaaaatcaaaacaaaatggcttgataacttggaaggtgatataagcatttctttctgcagcagcttgaagttgtggtggggaaaactgtggttctgcctcggctgttatgttatctcatttaattgctaacatattgtccttagcttttgattcataaaatgttttccttggagttctgaagtaggtcttcagtgatttactaagtattagtataatgaaagggatttttttttttcacagcggcatggctcataacacaagagcgaatgtttgtatacttgcaagctctctggatgatattattgagctatgcttatttcctgctcaaaaaccttccctgcctttccattttctacaagataaagaccaattccttagctcagcatttgaagcctattaccatttaccgaaagccttatgttgagctcttccaatctgcaacaagtcttccagcaagacaaggctgggcatattaccagaattcaccctgtatgttctccttcggaacttttgtatctctttgtcttgtccagccctatctgcttatctctgtacacctaatacccacccattctcaaagcactgactcaaatcattcttcttccaggaagccttcccttgctaccccactcatgctagccatttttttctctattcttacagccctatgaatcataccatttctagatatttatcttaaccagctccgcatagctgtgcatcttttatagatatgactctgccttaccaactgttgtaaattcctcgagtctcacatattatattttgtctctctccccccgacccctgtaaatagatcatccatagaaacgggagaaaagaaacgaggaaacttaacattctgtgagtgtgagttggcagcccctctgctaggcgctctgcatgtgttgtcttaggcagtcttcacaacagcccagtgaggatgataatagtggtcatttcaggtgtcggtaaagtgagccttagaagtttgagcagttagtctcaagtcctgcagcgggatttaaactcaagcacatcaactccaaattcaatgctcttttttactaccaggcatactctccagagattatctatgagaacaccttttcagaacttattttaaatgctaggagcttgtgattttcaaaacttgataagtgttggttggcaaaagaagtttccaggtattccatggctgggttcccagagcagctctcttcccaaatgtatagacagagaactttccctccaaagtggtggcatgcttggattaaaacccacattatctatgcacttattcttaaaccaacatgtttgcgctgagtgcctaagaggtgtgaactctccctaccagggtccttgaggtagcaaattttaagttatcaagttatttttcttactataaccacccacttttcttccaaaattaaagcagaaatctctgaatgtgggagaataaggaaatagccaggtcttcactaccctagttagaaactcttaccaagtatgattccctctctgcctcagagacctccatgattaatcctgatattaaatgattagatttcttataaattatggaaagggcaattttccagatagaattctctctgttactcattcagtattcacatccacagatgaggcctgaaaagaagcgtttcaaatgacctaaccgcttttttaactgactaagaacaaaacccacatcaaacttgtctttatgtgactctatgtgttcccgtttatttgttggtagagtcagcaactacgtgatcattgagctaaaaatcccctctactattcatatatcgcattagtgtagctctcagatccttcttgtttaaagtctatttattcatttcaataacatttatccgtggttaccaagtgtaggttctgtgctctcaaggaattcacaggctagtaggaaaagatgtgtacttaagcagattgctccctgccagtctgctatgccctctaaaagaccaggggcctgacccttatccagtagtgaaagatcacatggttgtttagtagaggagtggtcatctccagttgacttagggatgggggagtcatgtgcaactcaccccacacacctgtcctccacagcatcccttcagagtcctgcaggtgggggatgtggaacccatttcagaaatcaccaataaaagtggatctttgcccagttttcctcttttcagtaacaatttttgttttactttggattaaatgcagtctatcaaaagagcattccttaggaaaagtggtatctttttatttaactgacattatatacatgagaacttttacctcttagggcttcataggacaaacaacttcagttagttttccttgtatagttaagagctcagaccactgaattttagattctaaaagtaccctggaaatcagcccattgcccttctttgaagactaaggcctaggaaggggaagtgaccaaaccatgggtactcactagtagaattagaaaccagacaaaagaggctggacacggtggctcacccctgtaatcccagcaatttaggaggccgaggcgggtggatcactcgaggtcaggagttcgaggccagcctggccaacatggtgaaaccctgtctctaccaaaaatacaaaaattagccgggcatggtggtgcacacctgtaatcccagctactcaggaggctgaggcaggagaattgcttgaactctggaggcacaggttgcagtgagccaagattgtgccactgcactccagcctgggtgacagagagaccctgccacacacacaaaaaaggaaaccagacaaaacagcaagcagaccagcactccttgtgctatatcctacactgctcagccgacttcctctttaccctaataccataaccatttcaaaactgtgagtggtagaaattagaaaccattctgttactctgacttaactaatgaaatccaagaaaactctgtagttggccctaggctgcctgcaatgagttgctatttagctctaccagtaatatttggcaaaaagagagggtagtgggcattgatgtgatgtggcagttattggtacatagtcatgggagcagcaggagtcagaagattctgtttctatgtgggcctcttcaacaaagatatgatcaacagaggcatcagcatcttcagttgataaagttgataaaatagaaaactattttctaaatagcctgttacagaatttcagcgaagctattggtggtcagcatcatcttttaatagctactatcttgtttttctttaaattaggatatttgccttctctagtgttctgtcatctctcctaatctccacaactatcaggtatttcggagagcagattagtaacctcaactgaaagttttgatctttatcaatttatcagttgctcctcttgggctttcacaggttttgattccataaagttctgtgtctatttgagtgcatacttcatttctaagcagttattcccatggactctcagggaatttaagagattatctctactgaaatctccctacagatttcctgccaagcagtcaacaagtcttgatcagcctccttccttcaagggtgactagctccaaatgcccacaaagtccattttcatcaaatatttgaaagttcttcctaggtccagcccaaatttgcttttttctacagtccttatgtttctgcccaatagaattgcccacaaatcaagtccaacaagcacttgagaaactcagttatttgaagacagtctgctgagtgttttttccctctagacgaaacatcactatcttcaaatatttaacctgaaaaaaagtttggactccctgtcatgaactccattgcttcccagtgcattctccctagtttagcaaggatgcctttttctccacaagaaccttttagtgtgtggaaccgcaaactgaacacagtgcttaagaaaggatcaagtggactagggtggatctatctcctcccccattcagtaccttgtatcttcattaaggccacctaacaatatcctgttttgctatgtttgatgctttcattgtcctgctgacatatattcaatttgtaatcaactgaaatccataagccacctatctccccagtctcattgtgtactttttgttgtgtctgtacaaaacttcatgaaaccccattgaatgttatgttgtagcctcagtctgattcctgtttaatggtttccctgaagccctcattcagtcacatactctgccatctctgttgctggcaaatgtgatgggtgtgactaatgcccacatcaaagccaccaatacaatattttcaggggaggggattgaccagaaggccatgaggctcagtgttacagacattctttctacacgagtgctgtcttctatcctttgagtttaatctcagctggttctgtctccctccttatacaccgtatggcccacctttgctcattttgtccgtagcgttgtcacagaagccgggcatgcagcactcactgtgaagcaggaaatgaggcttgtccagaatgccttgctctggtggaaccaaactgagtttgagaggccattcctgtgtttcagagcactttcaaaactattttctaaataccctgttacagaatttcacccaagctattggtggtcaacatcatctttcaatagctactatcttgtttttctttaaattaggatatttgccttctctagtgttctgtcatctctcctaatctccacaactatcaagtatttcggagagcagattagcaacctcaaccgaaagttttgaactttatcaatatcatactttatttttttaaaactgaaaaaaaaaaggacagaaaggtaaaagaacttgaagaaattcttttagccatggatgagtgataacagctgagaatccttgagcttaccatttgatatttctatattaatttaaagaaaagtcaaaagattttgaaaacagcaatagaagtaagatcctttaagctctattcagcagcccctaagaaaagtgatgaggacactgtgcatgcccatatgtgaacatggttggccaccttaggtatttccccttctctccacatgaatacatattttactcaaattcagactctatgatgttgaaacagtctggcattggatgtttacctcaaaaccctgctctctctgcacctaggacaaacaaatcctagttctctggtgtttagcatcttggagccatgaattttaaataaatcaaagacaaaaaccttgtctttcccagttttaaaatataaaagatacacacacacacacacacacacacacacacgtgtatttaaaatagaccctataacctcatcatattcttacatccttacatggttttcttcttaaattgtggaggaaaaggcaggcagacacatttaatagcacagtgatcatcattttttaaatgaactgttacagggacataatcttaaactatccataatttggaataggcacaactgtgcatttaaaaaaatgcaatattacccttattttctcaggaaagcagattttctggagggaaaagtatatattgtatatattagaaaatatacatatgttcattcactctttctgcatctgctgtgcttcagatgcttttggggatgcataaacgtgtaaaagaaagtatctgatcttacaggccttttatcctggtagagtgataatacaaatatgggtctaactataatgcaaggtagaattatgaaatgacctaaggagcaattcagaccgctaggaaaagcttcccggagaagatgccattgagctcatattcgagtccacatagaatttcaacaattagagacaggatagaaaaggcgtttcagagccatataataaacatgatttaaaaccaaaaacagaaaataaaggctcatgcacctaaatggaagtaagaaaactgcctgatgataccagtccttgcagcttgccagccagggctgcattgggtgaaaagcccctccacagcacggcagctccagcagttggctcgaatatttcacatgagagtccacaggaagagcgagctttcatgtatattttttacatccaaattaagttaactcatggaattttccacccttaggaattaaagtagcaactcatgaagtaattcagttatgtcattcataccaaaacagaaaatactggagcaacttggcactgtttaaaagccaagattaggccttggccattttatattttttcacattccatggccgttgtgttattttaacttttattatggctgtaaatttttcaaatcaaaagtatcttaattgcttagaaaacagaagttgaaaatgggttcatagtaagaagagggtttaggcaaagcagctttaggagtgagaactgaaaaaaagctgtagcattacattttctgtaatgcgagggttctacctatttggttgacattcacagttgtgcataattatagcttcctctatatccataaatcatcttagaactataaagttgagtttaaccaaaagatctgtccaatattagtgaaatgacatctttagggaagcattgtcctgatacaatagccacattcattttaaagcagttaattggacacattgtcaaaaaccacggtattgagtttccacattttaatttcacatttgccttctccctggcttctgcacacggacgggtctcttttggagctgaaagtgtgtgaaagttattggagaatggtagtctctgggtaatgtttctgtaagctgcccaaaattttccccctgtagtctagatgggaaacagctggtatttgtttaaaaagctgttttgcaaaatgtctaaaccttgagatatagaactgaggtcaccattaaagcaggtgcttaagagcaagtgagaaagacttcagaggccgactggctctggaatcttctgcagggcacttcctattagaagaaaaagtgttgaagtttgctcctttatttaggacacggctataagtattaataagtaagtgcactagcaatactactagaaattgagtatttttgaacatagccagccctcaagtgaataattagctcagtatgaaaggaactaaaatggtcatttttctcacagggcttcaagatacaagagcccaaggcgctctagtctcctttgggtgtttgaatttcctctttaaacacaccaacagtaaaagaactactatttcaaataagcagtaccataactgactatatcttccaaggttttggatgcaatctaagggaaagggggaaaagagacccgacttggcaagacccgtaccgaagcagtctggaaaaaaagcaaagcaaaaaacatgtggaaccactaaaggccagtgcacgtcaggtatccaccagtctgaagatgaaaggaagtaagcctcctcccctgggagctggaggttattagcagctgtttatccagtcgggaatagagattaacattgtactttttttttaagaactagaagaaaatttgtttgggaagttggcttttcatatcaagtcactgtgctttgccaaaaaaaacttcctttctcagaactcatgtactagcattgagcaatgttatgattctctgagaaactctgaattaccaaaaagtctttctccattaaatagaacagaaaaggacagagaaatgggtgaacgtttgccattgacacattgcagttgtactctttaccatgtgaaatttgccgtttggtctattacctgttctccaacctgactctaaatgggacactctgccctctacccctcacacgtaccctcacaacttaatcattgccactctaaggtgcacacaatgggttctgcagatacctactgcttgcaaaaagacctttcatgagatattggggaaactgcctagtactctgggtgctttattctcaaaaaacaaacaaacaaacaaacaaaaaacgagttggatataggtatttttcccctgatttaatgctactcttaatgtcattttcttttattaaatcctttcttctgcttttgatcttatttatagcagagccactggtcatatggaaactattactgtatagctgcgagatgaaagacttcatggcaattaaataagagtgaatcatttgggccaataatacacacatacagtgaggtaccatttgtgtccaaaatgccctgtgttgttcactttgtagcaaagccattgagctttacaaagggctttacaaaaatctgctttttgtcagaaatatgtagtctgacaatatgaaaacacatgttaacacacagtccttagctgcttgcttcttcacacatacacagtatctaaatcatgccacttattgatataaaatgaaattttcacttaaatttgggatattatttagttgtgttaagcgtcagctctttaaaaatatatttggataatctatatcaaaattcgacccatcactcaaaacctgcctaaaatgtcatgttcttcttaaagtagtccctggtttcctaaacgggtatgacttcatcattttttaaaaccctacatgaccttgtactcctttatgacattcatcgtattttgccttgtatagtaatattatcccatcattaaaatatcagtgcctgggctaggcgcggtggttcaggcctgtaatcccagcactttgggaagccaaggcgggaggatcacaagttcaggagttcgagaccagcctagccaacatggtgaaaccccgtctctactaaaaatacaaaaattagctgggcgtaaaggtgcacgcctgtaatcccagctactggggaggctgaggcaggagaatcgcttgaacccgggaggcggaggttgcagtgagccaagatcatgccactgcactcctttctgggcaacaaagcaacactccatcttaaaaaaaaaaaaaaaaatcagtgcctgcaaagtcatagacgtgtttatttttccttgcaaatgcccatgtagtgccttgcatatagtacactttcataaggcgcttgtcaaattaagtgaaatgtttatttgatagaaacatgctaaatgtatatttggcaatatcaaacaattaaatttcagacatagtctcacagatccatagcatttgtgtcatcatttgctaagcatctaactgcacattgtactattacactcccgtgcagtgacctgtgcagttcctgtccttgggatgggatgcccacaaatggagacaagtataggctttacgaatggcagcaaaacaaacttattgaagtttatgccctgcaccattcaacaatgaccttgaatgtgttttaagggtggtgtctgtaatgcatagtgagctcgtgaggtgacaagaaagtggagatttctggagatccactcagccctgaagggtcagagagtgaggggatctgtgaggctaataaaagagaagcagttggtgagttaggaggaaaaaactagcccagcagacagagcagggagggctttgctcaagccttagtgatgtgggcgttaacccagcagatgagaggccatgcgtaggtaattgaacattgatagtgaggaatttaaaaataggagggaactgcattggtcctgggagtctaggtgaaggatgcatcagcacaaggtggacctcttagactggatccatacagcaagcaagagccaggctgaagccttaatattgcatcaactgatggagagagaatattgcatttaaaagatgagtatttggaaagtgatggggaagaaatggttcattcgtttaggtgagcttctttatacttctactctcttttcaaatatattacagtaagcatgtgttacttgaataacaagaaaagcatttaagaaataaaggccaatgggtaatggtaaatccctagggatccttagggatgggccacctggactggctaaaaactgtgtggaggtcagcagcatgactgtgcactctcacaggtatgcttgcacttcaggcattcagaattccaagtgtaaatcaagtgtccagttgtcttttcctttaaacaaaagctgtttacacataattgctagacttcaccatattctctgtgctagatatgtttggttcactaggatggattaactttagttccataccatctacttactagcctgctatgtggagcaaggaagagatagaggaatgggctctgttaatctgccagtgtccccgctaggtgagctctctccagttatggtttccactgtataggaaaatgatgtcgagaattgagggtgtgggacacagaagagagaaatgaaacagttttaatagatggaacgtatgagttagtacaagaaagatgaactgaggtcggctcacatccgtttgcatttcttgaactatatcatagaatcattcatttaaccattttggtgaacatccaggggagtttcagcccagctgatcatatgatagacaagcactgccaaggtcaggatcatttagatcatgtttaaatcctcttgaaaattactttattatctggagaatcaatattaaataaatctccaagaattgcacaataaggaattaccttacatttcatacagaacataagagaagctgtgatgtttctggaaaacaatgtaggtgttctcaagacagttatgaaatcttctcccgacatacatgttaagaatcaagtaaaaatccaaacaaaagaattgaatccagatctgatgttaatgaaaagtctcttaaaggtttaatcacatgtactaaagaaaaatcatctgataattttttaaactgagaaatatggaaattatgtttgtggttggagtgtcccagatgttagctctttctcccacaacaggtggttattagaggtaggtcttgttttctgcagagcctctgtgcctctagtgttgttcctcacagtatctatctactgctgccattccatgaacttcctaattcccatctgtgagccattaaaaaagtttgcatgaccgcttcccacctctttaaaagatgcacttttgtactaaatggtgttttgcacatttgagaaaataagtttgctttcctctaatatgacagaggtctggcaagataattgaaactgaaatctagtactctacaactgtcatgtataattgatatttcatggggagattacagttcagacaccaaaactgttttctgtatcaatgggtttctaattacagtgaaaacccatcagcttttcttttgtgttaatggaaaaacaacagagaaaagtaacagtaagttgcagttaccaggacttctgtctttgtcccattttgttgttgttcttctttctaaaaaccaaaaaaatctatgtccaaaattggaaaccagatgccattaatagcaaactttaattttgatgtaccaaaatgtttataatagtatatccagttttgtgtcattatcacttggtctagaaactgatgacaagtttcctaaagttcccattgtatactcttttagaaggattatggtagaatagaagtgactgaggtctgaaagcctgttttgaagcagttatctctggagataacattaactaggattgaataactgccaaatgaaatttaatacattttcccatccatgaaataggcctcttaaatacaacagaataattactttcacaatactccctggaaacaaagagagcaaaaatattgaatgtcttttttgtttgtggtgtttgttgttagctagaggataaggacaaggatatttaccacaatgctgaatgcatctccatataaaaacagccttgccaacagccacctaatttgaatctgcatgtcttttaaatctgtttatgttggagggatcgtggcaaatattaaattttataatttagttagacatcttggccttggcctgagttaatgaactatgattttccccctgcaataaagaaaaaggaaatgattttcctctatctatatatgtacgtatatatatgtatgttatatgcttgtacctaggtgtgtgtatacatgtatggacacacacacacactgttttaaaacaaaagctctgggaaataaacgcatcttgccccctaactctcctcccctctcctatataattgttcagtgttgtaagttttctgagttcaaaatctgttttagatctccaactaagcatcgaaagttggatcttaagtcacttcaccattcttggccttagctttctttgtaaaatgaagagtttgacctaactgatatataaccaaggtcctccaagccctcgacgtctaagttctgtgatttaaaagtgtttctatcagtttgtcaagccctttcttggaaactaaggttatttaaaattatatggtgcttacgtgattcaaaataattattgcatatctaatgacatttaattatttccattgacaaattcacacaggagaattcaaatagctgtgttggaatttgaatataatttgacctaagatacaatgtaactcagacatttacacctacatgtaccagtcaatatgtggacgggacaggccaagccgcctgtgtttggactacatgatcttatccccccttcctcgtttgtagctctctggaccgggaaaatgcctgtcattaaggtggcccattcatagtatgacctatgtctgcttcaaaatgagctgggccatccagtgatcttggcattctgagcttagaaatacaaagacaaagaggaaattagcaggaggtacagaaccagaaagaatgcaccaagaggtatcatgaagaaagagtccaatctgtcatcatgagagggcagaagccagagagaagcagaggtccccccagagagaggagagaggctgaatagcccagcagaggcgaggagtggcattcggttcccaagagctctctgagtccaaaacctaagctacagaaaactatttatgataaatcttttatttgaacaaactcaaataggtttctcttccttactattaaaactaccccactaaattgatcagcatacaaaaatccccccaagaatcattatgagttccacaaaaaccaggaccacatctgagttatttctcattctatccccagtgtctcccaaagtgacaggcatgagctagattagaaaatgtttgttaaattagtaaatgcattctctgatcaatcaatgaataatcattgaataatttttaaatttcacttctatcttctatttttagcatagatatcactaaaactgcattatacgtgactatgggaagattcacatttacaatgagtattaataaaattttcataagctggcttttaactttagactattgttatctctatgaaaaggttatcaaaatagagctttaacgaagtatggattttctaaaaatagggacgaaatgtcatgcttagaattgacttgtgggaatctcctttctcctagtcacattatgacgtatttaagttcagaatgccaagatcattggatgccccagctcattttgaagcagacatgggtcattctatgaatgggccgccttaatgccagtgggcaaatccctgacccttgtatatacagagaacagtgtgagtttctccatctatttctgtgttattctagcgatggatttgtgccgacagtccactgtgtttcttcccttgtctcttatgtgaccagaaataatgtttctgaaagagaagaaaacagggttagaatatgccatctgtggccaaggaaacaagcaaagccaagccaattattcaaattggaatactcttccacagccacaggcaatggagttgatcctatcctggagaatcaagctcattattacatggctctggacctatcagagggcattcacatgacctggaatagacacaaggggagtcttaaaacatcacgacaaattagccggcgtggtggtgggcgcctgtaattccagttacttgggaggctgaaacaggagaattgcttgaacctgggaggcagaggttgcagtgaacggagattgcacccctgcactccagcctgggtgacagagcaagactctgtctccaaaaaaaaaaaaaaaaaaagtcagaacaactttgtctctaacattctttatggaaaatgattgatattatttaagatgatctatagaaaatagatggagttaggtaacatatgggcctaaaatccaaacaaaaatgtagttggaacaactatatcctcagatatatttataatatttaagagtttacagtcattgtataggggaaagatttaaaattaaatggattttaacaaaatagagacaaagatcaccgtaactgaagatagcttgagttttgagggggttcttgaactacacaggctattatttctatataacatgcaagtattttcagtcaaaacacatgattctgtctgcagttattatgtacctattacataccagttgtcatgtacgattgcatgggttctctttttctcttttgagaacttacctcaatgtgatctagagggaaaaaatttcaggagcagtaactgaatatattttaagtaaaaagcaaaacattactcttaagttatgtcacagatgcttgcaaagaaatcttgagagtgttaatgattctgaaataggagtacacttctcctctatgctcaaatctgtggttaccttcagtgattttgacttagagtcatcctttgtagaaattcaagaaattagatccattgggaatacaaataaatatgaatcagcacgaagaattatttaggtttatattgattgacagacataaagagccaccatttgatcaaggcctgtaaaaattcatgcttacaagttgacatcttagattgaaaggataatcattgattgaatccgttttctaatgcatgaatataaaaatagcaaatcaaaacctcaatggaaaatagctatcatgcttctgaataaaaattaaaatatataagagagtgagttacaaatggttgctggagcaggtgggcgtggtctgcctataagagagcagacttcagtcacagaggaaaggagtggtgtggcaggcaacagggttgaatatgtttaaaaaaaaaaaaaggtttgtacttaacgccacagagctctagaagctgaaactagaatcagtgagtgaaatctacaaagaggccaatttgtggtaaaaatggaatgggcttctttgggagatatcagtctcagtacatttgaagcaccccacagaggccaaataaccaccattcagaaagttctgtgttgcgacacaggcaccggggagcagtgctggacttcctacatctctctgctgaaacattcatttatacttcctgaggctcataagcctcaagtgttgtcttattcttgctgtattttgaatccaaacaattaatatgatttatgtgatcatctccacccaaaatttaaaaaaaagttggagtgcatacacacacacacacacacacacatgcacacatgaatataaaaatggcatacttcaggatcaattacttaaatatattttcagtaaaaagcaaaatattataggtgatacttaatacatggctgcctttaaatagcatgtgcttattaggtcctgtgaatttgttgttggttcagatacttattgttgatgcattctttggaaatacccttttaaaatatattggtaacacaagagtgatgattctcctttctggtttcatatttttgactggaaaaaaaaataaacctgattcatagcagtataaatgtatggttaattttttgtgttttagacccaccgtcctgtgtaaatgctcacttaaccataggctaagaaaatacttggaaatagaaaagaaaatgtgaactactgattgtcctcttagttgacaaatgcttcatgttttcgcttgaaggcatgtgctatgaagtaggcagttgctgtctcagtgccacaagttcaatgtctctggaccccagagtcgatagtagtagttaataaaaagctcagcagtatttttttaatgaagtaatcatgctgtactctataattttattcttggaagcataaagagtatttacaatatggtgtctttctagggtcagaatagtgaggaaaaaaatggaaaaatgtccaaacatccttccttgcatggcaatgatggcattactggtgtgtttaataaaacctttattggtacattttccggtgtggtggcattggcagaaaccatccccctttggatttggaactcagcagctgatgaaatacagtaaacattaatttggaatgggctgccagttttggaaagccaggtgacattttattatatttgtaccaagcagaggctgtgtcccatactgctgtagcttccgctgtcagaggcttagctggcattatggaaaaaaaaaaatggcaggcctgagaatcttatcccctgaaatgaaagtcgaatgccaaattgaaattcctgtaggatttccgatagcaatgggggaattgagaagctcacaattaagcatatgggcattaagataattgtcagatctgttggcggacatgatagaagacagatgggtacgaatcagtgcgctccactgcagcaccctgggaggcaatttgacgttttacctgcctgagctactctgccatatttgtcactgaatgtacagcacggcatcttactgagtgttaagtgttttcgccgggaactataggtgcatgtgcggtccttcagcgccctctagtgaaacgcgtttgggagtatggtttttgaaaagccagccttcatcaggtcctcttggcctctggaaatagctgtcgcacctccggttcctgctcacctctctggttcctctcgccctttcaggtggggacccatcgtgaagatggcgtggccctgagaggcagccattctcttctgccaaaccaggttccggttccacagcttcctgtccagtctgcgacttcccctgacctgaacccaccccaggacccttacagaggtaggttggcctcaccagggcacttctgacctcactttcacaataggaccagtgttgatacccagcctcttggtgttcatccctcaagaagcactggcagaaacccaggaatcaaattgggcacaaaaatggtaaggaaatggcaaagtatttagaacttcgcccgctaattgtgtttctccagggactgttttcctcaaacatcctctgaaatcctggtcctatatcagcagggaatgaggccacagactgatgagaggaaattttattttagctatttccacatttttctcattcaggtcctctaatgtggttagttgtggcctgaaaatgatatttccaaatgaataggaaggaaggaaattgtttttgttgtttaagatggaaggaaatataggtgcatttaaaaaatggagcttggttgcatgattttcgctcttgagtcatctagccctctaatgattgcctcataccggtgattacgagcggcttttcatgaccccaggaagttgggctattgctggccagctgactaggagtcgcttagataacatcttctcagtcccttcacatttaatataaaaatgataacattgccacaggaatacatgtgggcattttttcagctgttcaacattgtacagatctgagtgtcaattatatgtatgggtatgtctgcccattttttatgaataataatcattttatggactttttttttttttttttttgacagagcctcactctgtcgcccaggctggagtacagtggtgcgatctcagctcactgcaacctccacctcccaggttcaagcgattctcctgcctcagcctcccagggggtagctaggattacagacatgcatcaccatgcctggctatttttcgtatttttagtagagacagggtttcaccacattagccaggctggtcttgaattcctgacctcaagtgatgcacccgcctcagcctcccgaagtgctgggattacaggtgtgaaccaccacaactggccaggacctttcttatcaggaggctttggattttgccctctttgtcctaaacctgtgcttctcaaactgcacataagcacaacctgagcatcttgttaaaatgcagattccacttctgtaggtctgggattgtccatttctaatgggctcacagatgatgaggccgcatggaccaaagtttgagtggcaaggttctagaatacacagattacaaataaagaggaatacttgacagatatgcttctacctttaaaaaaattactacattagggtcgtgttttaaaatgcagtgtgacttggaaagttgagcaatgataaagctagaaatttctaaaatgagtagcaaactgccttccatatgtaccattttaaaatgctgattacttcttgagaataagagaagcctaatttcagaatatcattagggtacctattgaagtcttgactgcacatatttagcatactccctgggaattatattttaaggacatttttctattaaatcattgcatatggaagaaactcaatataatagctgatatttacttgggttcttaatcagaacattggctgtgtgattttcatgattatgattttcattgcaattaagttgatgttttgtagacagtgaaattaccatctactccaaaagattgcaaaatagaatttaaccttagagccaatgcagggaaaacttgtttctgcaggtgcattttttgaaacttcaacagatagcagggggaaaaaaaagtgacagaaggatcacagttcagcagtatgaattgtctgctggcagccttgcaatctggtgtgcaggcagtgagattgtggtgtacatgtcacctgatttctctttttcggcaggcatgccaccaggactacaggggcagagtgtctcctctggcagctctgagatcaaatccgatgacgagggtgatgagaacctgcaagacacgaaatcttcggaggacaagaaattagatgacgacaagaaggatatcaaatcaattactaggtcaagatctaggtaacagtatataatactgtcgcttcatttaattcctttattggactttgatgaagtgaacagaacgggaagaaactattcagttttttcctggcaggtaaatttacagctgaaaagaaaattaaaggcctactctagaagtactaaaagtatcgtttcagatacctgtactctattggagcctaaactgttttggcatttatgaatctggacccaatgctaatgacacacagtgaaaaaatttgtctctgattcaagtacagtttatttgtaaaactatacttattctacaaatttggtcagaaatgttgtgtctataatatttctaaaaagagattgtagccatgttaaaaactcaactgatgtatgtgccaactataactcttttcttacctctaaagtaagaaaataatttcctagatttatcctaaacatgctgatgtatataagagtaataccttaattgtttatggtttttcttcctggacactcttttctacagaaaacacaactgcaggaaaatagcttctgtctggttttcttaaatatctgctatctttaaattcaaatctatatctccttgaactttaatctggtaatcagatggtttttgaataccaacacccgtgtactttgcctcaattccctgaggttgtttttattcacaaattcaaccaattgtcctaagactacagctttccttctaaaggctgtggttctcaaggttctatctggaatcttttgtgaattaagaacatgctgcctctttatgttgctgttgtaattattgagataaattccgtgtcttgccacaagtttaaaaatgccgaatacttctagataacccctttccttccttgttgtctttttctgattcttggccactttggcaagaaatcccaaggaggggatttcatacctttagcagcttctgtgttagaccagtcagttcttggtaatttaacttattgtggccaaacttatgcatgttaatggattctttgaagttttggaacaacattttcattcgctgttgagaaccttcttatttaaaaaggtcactcttatgacatttacttatgtatgcctccaaaactgtattataaggcagtgctttttcaaatctaggcagttttatttgcataactagtttatttgtaagtgaataaccaattctaattggtcgttagcctgaaaatctttggaagaaaagttcctattttccagtctcctttgtgtaaggtgtagcatttgttggatgtataaaaatatcacccaaatgctcagcttccggacaggcctggcagagactgttttcatttgctttttacagcctatttgcatagtagaatataggagtgaattaatcattactgatttccttggcactggcagcagttgggggtgagggcagaggagggatccgcagaaggcagagaaagagggccttttccagtggactcagttgacttccatgtttaccatacacacctgtggcagacagtgccatctggaaaggcgcttacgctatggagagagaggagcctggtcttacagcatccttctgtggtgtcatcctccttgcccctaacttttctccttcacccaagtgttcttgacttacgtgcattatctttatgtgtaacgtatacttgcaaccgaagaataccactcccacttttgattgattggagcttctcaagtgtaattggtccttattgccacttggaagttacccagagattctccaaaatggaacatcagagtcatatattttaaaccagcattcattaaatatacatttaattgagtagataatttcccacatcttccaactccgaaatgttgtgattaatcatctttattctgtgaacatttccaatgtgtgaaattaccctttaggttaattgttagtcacttccatggagtttcttgtgatggggagtctactgatgttcagtgaagtttgtttcattttctgtgtctctcataagccccccaaaagtcctcactcatgtttattcacaatagtcattcagagctttatagcacgtgctgctctgccttcttgagacaagacgtcgtgcacacttctcttttttacatgacagcccttggaatatttgaaccctgctgctgtgacgacttcctcatatgatatgctttccaggtggctcatcatcctctttgccttccattcaaaagtttctaatttgtcactgtaacactcagaaatggacagaaccgatcttatcttttcagactattctgggcccggccatgcatttgttatgaatcatggaatattttggttttcacaattagaaattaccttttggcttttttttttttttttttttgtaagagacagagtctggctgtgttgcccaggctggagtgcagtggcctgatcacatctcactgtagcctccacctcctagattcaagtgagcctcccacctcagcctcctgagtagctgagaccgcaggtgtgcatcactgtgcccagctaatttttttttattttttgtagagacgaggtctcactatatcgtccaggctggggttataggcatgagccactgcacccagctttctggcttcatttttgactcacaatgaggtcatggtcattcataagctgcaggtgtttggtttgttgaatcgttttgcatgactgatatcagttcaggtttcccaaacttgttctgtggatcataaacatctataagattaaagaccatggaagtcatgtttttgtaactttttgtttaatacatagagaaaatgagactcacatagtgggttgaccaggccttcaaagcaaggtaatggggacacctgaataaaagcctcactgtcttcactcccattgctctggtgtcttacatataggcctttcttcttactcctgttaagctgccttgtatttttttgacctatcaaaatcatttttcaattacttgtttcccctagatttcagatgtcacggtatgaaaggttttatatatatttaaaaaataaagtataaacataaagtctttttgaagcgtggttatgcaacatatgctaggcgtaagttggtgaatgcctgctttgcagagtgtaaccccattgaataaaaaaagctttgttttccctttctgcccccctgtatcagtatgggcacaccctgcactctaactttaatctacgtcaccctcacctgtttggtttgggtttaatgtctgcgagaaaaccaaatatcttgtgtattgtgaactgtcaaagccatctaaaccaatcccaaggtcaagtggatataaaaattctgccaaaaacatggcataagatggaaaagttccctgaaaactctggaagaaaacaaagtaatgtagacaccttctttttccccacaccattagaaaatgttgcatcccttttgtcccacagcaataatgacgatgaggacctgacaccagagcagaaggcagagcgtgagaaggagcggaggatggccaacaatgcccgagagcgtctgcgggtccgtgacatcaacgaggctttcaaagagctcggccgcatggtgcagctccacctcaagagtgacaagccccagaccaagctcctgatcctccaccaggcggtggccgtcatcctcagtctggagcagcaagtccgaggtcagtgcaggccagcctccttgcagagctcgtgaggagcttgtggcaggcacaagctgagatgggcacgccagtcttgagcagtggcagacagtagactttcaagcatcattccaaagaattgtttccattgcagactgtgtctaaatccataaggcagcatccctttctcctgtaattaagttgtgggattctcttataactaagattatattgcaactttccctatatcctttcagtaatttgagcttagtttatttgctttaccaacctttgcttactgtaaagtggctgtacacactcacatgcagttcaccttttactagtgactgaccaaatggattgccacagtacttagtaactgttccttttgttctgtaatataaacactgagaaaaaggtcagacacgcaagaagagtgcattgctgccctctgccagaagcctcagcattaaacaaaggttctgtgctttaatcctccacagaaaggaatctgaatccgaaagctgcgtgtctgaaaagaagggaggaagagaaggtgtcctcagagcctccccctctctccttggccggcccacaccctggaatgggagacgcatcgaatcacatgggacagatgtaaaagggcaagtttgttttcagccatttctgagatcgatcattcaaaactctcatcagtgtatcagccataaaagtgaatttcacccaaattgacagatattttctttcatggaaaaagaattttttttaaaaaaagcatactttttctgttacaaatatattaatgaattttttctctcttttttcctttctcaggtccaagttgccacattgcttcattaaaacaagagaccacttccttaacagctgtattatcttaaacccacataaacacttctccttaacccccatttttgtaatataagacaagtctgagtagttatgaatcgcagacgcaagaggtttcagcattcccaattatcaaaaaacagaaaaacaaaaaaaagaaagaaaaaagtgcaacttgagggacgactttctttaacatatcattcagaatgtgcaaagcagtatgtacaggctgagacacagcccagagactgaacggcaatctttccacactgtggaacaatgcatttgtgcctaaacttcttttggaaaaaaaaaatataattaatttgtaagtctgaaaaaaaaatatttaatttaaaaaaaattgtaaacttgcaataatgaaaaagtgtacttctgaagaaaactacatgaacgtttttgttggtattcaagtcagctagtgtttataattactggatattgaattaggggaagctcggctgccctagtaacaaaaccagcaaacgtcctgatgacaacgaagtgatgacattagccattccttagggtaggaggaacagatggatcttatagacctatgacaaatatatatataaatatatatataaatatatattaaaaatttagtgactatggtaagcttttgttcatttgtttcagacttttttctcctgtaaaaaaatagtactgattaacttttttaaaagaaagattttactgtaaatatggatttttttttttttggtcttatttctgtccctttccctggtttgttatcgtaacctgtagtgccaactctgcttccagaggggtagtgcaggatgaaatgctgaccctgatgttgcttctcattcataaataagtagaaagttgtttctccagtcttttgggaacacaggacttaaaagtcacatcatgtgtagatattacaagcagcattaccaagacatggcaaaaagagtttgtctgaattgtaatgttgcgtttgtgaacctattctgggattttcagaggtacaaggttagaatgctacaatgttaccactgtgccttccaatgtttatatcatcggaaacataacataatcaaagtggctgtgatttaacaaaatgattaaagtgttacctacctgtgtagccgaagtagtgtgcagtgaggcgtttctgaatacatggtcagatttttggaaaaaaacaaaaacaaaaaaaacaagtaaagttcaaaaaccgtcaaatgagaaaattgcaagtagtgtgacagagctgattgattttgttgctttcttgattttttttttcaaaatgggtttactaaaatgtagatgacttaactgcctcctccttcgtctgaaaaatgccaatattcaatcatcatgcagcattataacaagccttataagtcctaaagcattaagttgcacttttttgaggaggggtagtgcagtatttctctggccagtatgaatgaagtttatacttaccatatttgatagaaacatagatcaagctatggcacagcgactcatcagatagctagctttgacgtctgggcacaattgaaccaacttccatcgtgaatctttataatgattgactttggtgtatagtgcagtaaacaaatagtgctcctagttaagtatttgtcagcatccttttgtctctaacttgtttctatttttacagccacacaattcttggcatgtattaagaaaaaaaaaaatccctgttcaagtagtttttccacctatcagcactgagtaaatgccataaatccattgaaatggtctaaatgttccatctgttctcctgttttgccagttatatagtaatgaaatacatttgtaaattttatgcaacaaatggcaaacgtatcattattttgaaattgtgtatgtaaaagttatatttttacatgtagactcttgttattatgtgttttaatacattgtatcagtttttgtttttttttaaaaactgtggtttaaaaagaagtctcatttaaatgaaatagctacaagaatcagaattttatgttcatttctgaaaatgtaagaacaaataagatagttaccacgtggtcatcttttacaaacccataaacattttgattagctgtgtgtgtgttgaaaaactgtaaatatgttcagtagcgataaaactaaaataactttgatttgttgataagttcctaaaatgtggaggtggattaaaaccttaggagaatagcagaaatcaaacttcatgaaaagttattttggggctttcctgtgaaatgtatgaacaaagaggctcagagaaggacatggaagacaataatgtatactctctcctcctccctgaataatgaaaaccatgtgtatttgttccctccgtatgttaaagatttccttttagtggtacattctgcactcattttgtatagtctaccaaggcgggtatccctaggaacaatattatataggaagcaggtatactctgatcacattcaggataagtgtacagaagaaaatacggtgtttactctttagggaactggaaacactccctgcattgatgtacattttaagaatggcacttttgatacatgttatcataaaggtgcttaatagagctgaattaaagtttttcaaatctgtaaacaaagcaaaaaagtaaattgtagtcatttgattattttttaaattggtgctttatattttgttctcactcagagtaaaagctgcaatttattgttcaccagctttgatgtattcattactcagtaatgcaatacctctattgttgaattccctttggaaataagtgaaaattctaacggccactgaaagctgctcgctaggttttgcttggtggagaaacataatctgcacctatccatattaattgggttgtatccccattaaaaaagaaaaaaagggaatgtggcctttttagtgtgttttttattgttgttgttttgtaattatcaaacccaggtaagatattggtatcctgcactggattttcaaatgaagttcagcagaagacagttaagattaaagtactatacaaaaatttcaaaagggtccatactacgctatctgtatgacgacacttaggctggggatctctttcagaaactcggactttaaaagcaacttggagcagttgatccacctccacattcaagtaatttatgaatatgcagaatagggatctgttcatctagaaatttttaccatttgtcttctgtgtagctgcaaggaacactaatgtttatacaactgtcagtccacccagtggtgcaactggttctgattcagtcttccgattcctttttatttttcactttttcctatttctgaatttttttttttatttgtgatcttgattttgatgaggggttggggagtggggagggagtcgaaccaagacttggagttaagaggattttcatcttttgcatccaacaggcagaatatgatctgtgtccaaaagtgaacttgagtcaggaatgaatcaatttcagcataaacaagcacaaaaatttagtctgctggctgactggaagcaaaaaagtcaagatggaatatgatgaattccaacacaatggggcaccaaggcctttaggcctctctttttattttgctttggttttgtttgtttttctttagagacatgctctttctcatgggacttgaagtggactcatctttgtgcagtgctggttttgccatactcatttcaagtattatagacatatgtaatggtgaaaatatatgaactgtggcctttttcattcttgttacttgtgatgcaattaagtgaagataagaaaaaaaaaaaaaaagcagagatttaccatgtatcagtgcctggctttttgttataaagctttgtttgtctagtgctcttttgctataaaatagactgtagtacaccctagtaggaaaaaaaaaaaactaaatttaaaaataaaaaatatatttggcttatttttcgcaggagcaatccttttataccatgaatattacaaaaaaattgtcagattctgaatatttcttctttgtagatttttggaatcattatgagtaaaagtttgttactttattttactatttaaaagatgttattttaccatgtgttaccaagatgaaactgtatgggtagcttttttgtttgttttttgttttgtttttgtttttgtttttgtttttagttgtaggtcgcagcggggaaattttttgcgactgtacacatagctgcagcattaaaaacttaaaaaaattgttaaaaaaaaaaaaagggaaaacatttcaaaaaaaaaaaaagataaacagttacaccttgttttcaatgtgtggctgagtgcctcgattttttcatgtttttggtgtatttctgatttgtagaagtgtccaaacaggttgtgtgctggagttccttcaagacaaaaacaaacccagcttggtcaaggccattacctgtttcccatctgtagttattcgatgaagtcatgtacatgaccgttctgtagcaataaatgtgccatttttataaactgtttctgacacttgtttcatttcattttgcattgtccatatagctatgattctcttctgtaagtaaaacgcatctatatttcattttccaagtgttggaggtattgacagcttaacaaacaaaacatacaaaaaaaatcacaaaaacaaattgaaaagcaaagcacatgattgatcaaggaagagatgcccttaatgaaaatggaacgggatgcatgcaaaacaaaaagaaaactgtctagaggattaactaattgaaggaatataattaatgtgtgtgtaacactgaagctatgcatttgaagagctctgaactgcaccagtgttttcggttgtgctgcaggttgctaagtcaagtcagccttaaccttttgcaccagttggtcggctgtttggcagaacattctcagatcttttcagtcaaaaatctaagatgatttattttgtatcactttgttaaaagctgaatattgttaactacagttaatattaacactgtatttatactttctcaaactacatccgccccaccacttctggttgcctctgttgactattaatccagatgtaaacaaccagatgtttttttctaacttgtacaaactgacgtgtgtcaactatcatggaaggaaaaaaatgtacagattaaaattattcagtgttatgtactgtaagttaatatttttgtagaatggacatcaatctactttgcaaaatttggaggctatttcaacattgcactgtagaaatgtaaagtaatgtatgcaatgtaaaggaaagcccgcggtagctgagcgcttcataacagaatgttctaatcaagtacgtggtatttggggatgtctccaatattgctcttgtattctttctaattgggtttagtgactagttgaaggaaaatgttataacgccatttggttcacatgtgaagtgccctccatagccaaatgttgggatttttttttttttcgtttttggttggactgtttgcagatatttaaattttatgaaatttccaaagattttggttgataacccccttttaccttctaaatgatttgagatgttcttatgttcttactgtgtgttttaaatatatataaaagagccacaagcattta

SEQ ID NO: 166 - DNA, 7612 bp, Homo sapiens
gtctacagtatcacctttcttgtagattggcacttatgcggccaaaggaacaacaccatgttttctaaaaggctggagaaaataccacaggtgcctctcctctttcccttcatcttcatcattttgacaaattactcaaagatggagggtgcagttgaaagccagccatcattttttaaaacttctcaggacattgtaacatgcacttgggttgagaactgctactcgagcttctccaggaggcccttggagcaaatgttttgtaaacaccaatctaagaacattatctcttggacgggcatggtggctcacacctgtaatcccagcactttgggaggccaaggtttgtgtgattttgctaaaatgcatcaccaacagcgaatggctgccttagggacggacaaagagctgagtgatttactggatttcagtgcgatgttttcacctcctgtgagcagtgggaaaaatggaccaacttctttggcaagtggacattttactggctcaaatgtagaagacagaagtagctcagggtcctgggggaatggaggacatccaagcccgtccaggaactatggagatgggactccctatgaccacatgaccagcagggaccttgggtcacatgacaatctctctccaccttttgtcaattccagaatacaaagtaaaacagaaaggggctcatactcatcttatgggagagaatcaaacttacagggttgccaccagcagagtctccttggaggtgacatggatatgggcaacccaggaaccctttcgcccaccaaacctggttcccagtactatcagtattctagcaataatccccgaaggaggcctcttcacagtagtgccatggaggtacagacaaagaaagttcgaaaagttcctccaggtttgccatcttcagtctatgctccatcagcaagcactgccgactacaatagggactcgccaggctatccttcctccaaaccagcaaccagcactttccctagctccttcttcatgcaagatggccatcacagcagtgacccttggagctcctccagtgggatgaatcagcctggctatgcaggaatgttgggcaactcttctcatattccacagtccagcagctactgtagcctgcatccacatgaacgtttgagctatccatcacactcctcagcagacatcaattccagtcttcctccgatgtccactttccatcgtagtggtacaaaccattacagcacctcttcctgtacgcctcctgccaacgggacagacagtataatggcaaatagaggaagcggggcagccggcagctcccagactggagatgctctggggaaagcacttgcttcgatctattctccagatcacactaacaacagcttttcatcaaacccttcaactcctgttggctctcctccatctctctcagcaggcacagctgtttggtctagaaatggaggacaggcctcatcgtctcctaattatgaaggacccttacactctttgcaaagccgaattgaagatcgtttagaaagactggatgatgctattcatgttctccggaaccatgcagtgggcccatccacagctatgcctggtggtcatggggacatgcatggaatcattggaccttctcataatggagccatgggtggtctgggctcagggtatggaaccggccttctttcagccaacagacattcactcatggtggggacccatcgtgaagatggcgtggccctgagaggcagccattctcttctgccaaaccaggttccggttccacagcttcctgtccagtctgcgacttcccctgacctgaacccaccccaggacccttacagaggcatgccaccaggactacaggggcagagtgtctcctctggcagctctgagatcaaatccgatgacgagggtgatgagaacctgcaagacacgaaatcttcggaggacaagaaattagatgacgacaagaaggatatcaaatcaattactagcaataatgacgatgaggacctgacaccagagcagaaggcagagcgtgagaaggagcggaggatggccaacaatgcccgagagcgtctgcgggtccgtgacatcaacgaggctttcaaagagctcggccgcatggtgcagctccacctcaagagtgacaagccccagaccaagctcctgatcctccaccaggcggtggccgtcatcctcagtctggagcagcaagtccgagaaaggaatctgaatccgaaagctgcgtgtctgaaaagaagggaggaagagaaggtgtcctcagagcctccccctctctccttggccggcccacaccctggaatgggagacgcatcgaatcacatgggacagatgtaaaagggtccaagttgccacattgcttcattaaaacaagagaccacttccttaacagctgtattatcttaaacccacataaacacttctccttaacccccatttttgtaatataagacaagtctgagtagttatgaatcgcagacgcaagaggtttcagcattcccaattatcaaaaaacagaaaaacaaaaaaaagaaagaaaaaagtgcaacttgagggacgactttctttaacatatcattcagaatgtgcaaagcagtatgtacaggctgagacacagcccagagactgaacggcaatctttccacactgtggaacaatgcatttgtgcctaaacttcttttggaaaaaaaaaatataattaatttgtaagtctgaaaaaaaaatatttaatttaaaaaaaattgtaaacttgcaataatgaaaaagtgtacttctgaagaaaactacatgaacgtttttgttggtattcaagtcagctagtgtttataattactggatattgaattaggggaagctcggctgccctagtaacaaaaccagcaaacgtcctgatgacaacgaagtgatgacattagccattccttagggtaggaggaacagatggatcttatagacctatgacaaatatatatataaatatatatataaatatatattaaaaatttagtgactatggtaagcttttgttcatttgtttcagacttttttctcctgtaaaaaaatagtactgattaacttttttaaaagaaagattttactgtaaatatggatttttttttttttggtcttatttctgtccctttccctggtttgttatcgtaacctgtagtgccaactctgcttccagaggggtagtgcaggatgaaatgctgaccctgatgttgcttctcattcataaataagtagaaagttgtttctccagtcttttgggaacacaggacttaaaagtcacatcatgtgtagatattacaagcagcattaccaagacatggcaaaaagagtttgtctgaattgtaatgttgcgtttgtgaacctattctgggattttcagaggtacaaggttagaatgctacaatgttaccactgtgccttccaatgtttatatcatcggaaacataacataatcaaagtggctgtgatttaacaaaatgattaaagtgttacctacctgtgtagccgaagtagtgtgcagtgaggcgtttctgaatacatggtcagatttttggaaaaaaacaaaaacaaaaaaaacaagtaaagttcaaaaaccgtcaaatgagaaaattgcaagtagtgtgacagagctgattgattttgttgctttcttgattttttttttcaaaatgggtttactaaaatgtagatgacttaactgcctcctccttcgtctgaaaaatgccaatattcaatcatcatgcagcattataacaagccttataagtcctaaagcattaagttgcacttttttgaggaggggtagtgcagtatttctctggccagtatgaatgaagtttatacttaccatatttgatagaaacatagatcaagctatggcacagcgactcatcagatagctagctttgacgtctgggcacaattgaaccaacttccatcgtgaatctttataatgattgactttggtgtatagtgcagtaaacaaatagtgctcctagttaagtatttgtcagcatccttttgtctctaacttgtttctatttttacagccacacaattcttggcatgtattaagaaaaaaaaaaatccctgttcaagtagtttttccacctatcagcactgagtaaatgccataaatccattgaaatggtctaaatgttccatctgttctcctgttttgccagttatatagtaatgaaatacatttgtaaattttatgcaacaaatggcaaacgtatcattattttgaaattgtgtatgtaaaagttatatttttacatgtagactcttgttattatgtgttttaatacattgtatcagtttttgtttttttttaaaaactgtggtttaaaaagaagtctcatttaaatgaaatagctacaagaatcagaattttatgttcatttctgaaaatgtaagaacaaataagatagttaccacgtggtcatcttttacaaacccataaacattttgattagctgtgtgtgtgttgaaaaactgtaaatatgttcagtagcgataaaactaaaataactttgatttgttgataagttcctaaaatgtggaggtggattaaaaccttaggagaatagcagaaatcaaacttcatgaaaagttattttggggctttcctgtgaaatgtatgaacaaagaggctcagagaaggacatggaagacaataatgtatactctctcctcctccctgaataatgaaaaccatgtgtatttgttccctccgtatgttaaagatttccttttagtggtacattctgcactcattttgtatagtctaccaaggcgggtatccctaggaacaatattatataggaagcaggtatactctgatcacattcaggataagtgtacagaagaaaatacggtgtttactctttagggaactggaaacactccctgcattgatgtacattttaagaatggcacttttgatacatgttatcataaaggtgcttaatagagctgaattaaagtttttcaaatctgtaaacaaagcaaaaaagtaaattgtagtcatttgattattttttaaattggtgctttatattttgttctcactcagagtaaaagctgcaatttattgttcaccagctttgatgtattcattactcagtaatgcaatacctctattgttgaattccctttggaaataagtgaaaattctaacggccactgaaagctgctcgctaggttttgcttggtggagaaacataatctgcacctatccatattaattgggttgtatccccattaaaaaagaaaaaaagggaatgtggcctttttagtgtgttttttattgttgttgttttgtaattatcaaacccaggtaagatattggtatcctgcactggattttcaaatgaagttcagcagaagacagttaagattaaagtactatacaaaaatttcaaaagggtccatactacgctatctgtatgacgacacttaggctggggatctctttcagaaactcggactttaaaagcaacttggagcagttgatccacctccacattcaagtaatttatgaatatgcagaatagggatctgttcatctagaaatttttaccatttgtcttctgtgtagctgcaaggaacactaatgtttatacaactgtcagtccacccagtggtgcaactggttctgattcagtcttccgattcctttttatttttcactttttcctatttctgaatttttttttttatttgtgatcttgattttgatgaggggttggggagtggggagggagtcgaaccaagacttggagttaagaggattttcatcttttgcatccaacaggcagaatatgatctgtgtccaaaagtgaacttgagtcaggaatgaatcaatttcagcataaacaagcacaaaaatttagtctgctggctgactggaagcaaaaaagtcaagatggaatatgatgaattccaacacaatggggcaccaaggcctttaggcctctctttttattttgctttggttttgtttgtttttctttagagacatgctctttctcatgggacttgaagtggactcatctttgtgcagtgctggttttgccatactcatttcaagtattatagacatatgtaatggtgaaaatatatgaactgtggcctttttcattcttgttacttgtgatgcaattaagtgaagataagaaaaaaaaaaaaaaagcagagatttaccatgtatcagtgcctggctttttgttataaagctttgtttgtctagtgctcttttgctataaaatagactgtagtacaccctagtaggaaaaaaaaaaaactaaatttaaaaataaaaaatatatttggcttatttttcgcaggagcaatccttttataccatgaatattacaaaaaaattgtcagattctgaatatttcttctttgtagatttttggaatcattatgagtaaaagtttgttactttattttactatttaaaagatgttattttaccatgtgttaccaagatgaaactgtatgggtagcttttttgtttgttttttgttttgtttttgtttttgtttttgtttttagttgtaggtcgcagcggggaaattttttgcgactgtacacatagctgcagcattaaaaacttaaaaaaattgttaaaaaaaaaaaaagggaaaacatttcaaaaatttttcatgtttttggtgtatttctgatttgtagaagtgtccaaacaggttgtgtgctggagttccttcaagacaaaaacaaacccagcttggtcaaggccattacctgtttcccatctgtagttattcgatgaagtcatgtacatgaccgttctgtagcaataaatgtgccatttttataaactgtttctgacacttgtttcatttcattttgcattgtccatatagctatgattctcttctgtaagtaaaacgcatctatatttcattttccaagtgttggaggtattgacagcttaacaaacaaaacatacaaaaaaaatcacaaaaacaaattgaaaagcaaagcacatgattgatcaaggaagagatgcccttaatgaaaatggaacgggatgcatgcaaaacaaaaagaaaactgtctagaggattaactaattgaaggaatataattaatgtgtgtgtaacactgaagctatgcatttgaagagctctgaactgcaccagtgttttcggttgtgctgcaggttgctaagtcaagtcagccttaaccttttgcaccagttggtcggctgtttggcagaacattctcagatcttttcagtcaaaaatctaagatgatttattttgtatcactttgttaaaagctgaatattgttaactacagttaatattaacactgtatttatactttctcaaactacatccgccccaccacttctggttgcctctgttgactattaatccagatgtaaacaaccagatgtttttttctaacttgtacaaactgacgtgtgtcaactatcatggaaggaaaaaaatgtacagattaaaattattcagtgttatgtactgtaagttaatatttttgtagaatggacatcaatctactttgcaaaatt

SEQ ID NO: 167 - protein, 757 aa, Homo sapiens
MFSKRLEKIPQVPLLFPFIFIILTNYSKMEGAVESQPSFFKTSQDIVTCTWVENCSFSRRPLEQMFCKHQSKNIISWTGMVAHTCNPSTLGGQGLCDFAKMHHQQRMAALGTDKELSDLLDFSAMFSPPVSSGKNGPTSLASGHFTGSNVEDRSSSGSWGNGGHPSPSRNYGDGTPYDHMTSRDLGSHDNLSPPFVNSRIQSKTERGSYSSYGRESNLQGCHQQSLLGGDMDMGNPGTLSPTKPGSQYYQYSSNNPRRRPLHSSAMEVQTKKVRKVPPGLPSSVYAPSASTADYNRDSPGYPSSKPATSTFPSSFFMQDGHHSSDPWSSSSGMNQPGYAGMLGNSSHIPQSSSYCSLHFRLSYPSHSSADINSSLPPMSTFHRSGTNHYSTSSCTPPANGTDSIMANRGSGAAGSSQTGDALGKASIYSPDHTNNSFSSNPSTPVGSPPSLSAGTAVWSRNGGQASSSPNYEGPLHSLQSRIEDRLERLDDAIHVLRNHAVGPSTAMPGGHGDMHGIIGPSHNGAMGGLGSGYGTGLLSANRHSLMVGTEDGVRGSHSLLPNQVPVPQLPVQSATSPDLNPPQDPYRGMPPGLQGQSVSSGSSEIKSDDEGDENLQDTKSSEDKKLDDDKKDIKSITSNNDDEDLTPEQKAEREKERRMANNARERLRVRDINEAFKELGRMVQLHLKSDKPQTKLLILHQAVAVILSLEQQVRERNLNPKAACLKRREEEKVSSEPPPLSLAGPHPGMGDNHMGQM

SEQ ID NO: 168 - DNA, 7501 bp, Homo sapiens
cagggatcttggctgtgtgtctgcggatctgtagtggcggcggcggcggcggcggcggggaggcagcaggcgcgggagcgggcgcaggagcaggcggcggcggtggcggcggcggttagacatgaacgccgcctcggcgccggcggtgcacggagagccccttctcgcgcgcgggcggtttgtgtgattttgctaaaatgcatcaccaacagcgaatggctgccttagggacggacaaagagctgagtgatttactggatttcagtgcgatgttttcacctcctgtgagcagtgggaaaaatggaccaacttctttggcaagtggacattttactggctcaaatgtagaagacagaagtagctcagggtcctgggggaatggaggacatccaagcccgtccaggaactatggagatgggactccctatgaccacatgaccagcagggaccttgggtcacatgacaatctctctccaccttttgtcaattccagaatacaaagtaaaacagaaaggggctcatactcatcttatgggagagaatcaaacttacagggttgccaccagcagagtctccttggaggtgacatggatatgggcaacccaggaaccctttcgcccaccaaacctggttcccagtactatcagtattctagcaataatccccgaaggaggcctcttcacagtagtgccatggaggtacagacaaagaaagttcgaaaagttcctccaggtttgccatcttcagtctatgctccatcagcaagcactgccgactacaatagggactcgccaggctatccttcctccaaaccagcaaccagcactttccctagctccttcttcatgcaagatggccatcacagcagtgacccttggagctcctccagtgggatgaatcagcctggctatgcaggaatgttgggcaactcttctcatattccacagtccagcagctactgtagcctgcatccacatgaacgtttgagctatccatcacactcctcagcagacatcaattccagtcttcctccgatgtccactttccatcgtagtggtacaaaccattacagcacctcttcctgtacgcctcctgccaacgggacagacagtataatggcaaatagaggaagcggggcagccggcagctcccagactggagatgctctggggaaagcacttgcttcgatctattctccagatcacactaacaacagcttttcatcaaacccttcaactcctgttggctctcctccatctctctcagcaggcacagctgtttggtctagaaatggaggacaggcctcatcgtctcctaattatgaaggacccttacactctttgcaaagccgaattgaagatcgtttagaaagactggatgatgctattcatgttctccggaaccatgcagtgggcccatccacagctatgcctggtggtcatggggacatgcatggaatcattggaccttctcataatggagccatgggtggtctgggctcagggtatggaaccggccttctttcagccaacagacattcactcatggtggggacccatcgtgaagatggcgtggccctgagaggcagccattctcttctgccaaaccaggttccggttccacagcttcctgtccagtctgcgacttcccctgacctgaacccaccccaggacccttacagaggcatgccaccaggactacaggggcagagtgtctcctctggcagctctgagatcaaatccgatgacgagggtgatgagaacctgcaagacacgaaatcttcggaggacaagaaattagatgacgacaagaaggatatcaaatcaattactagcaataatgacgatgaggacctgacaccagagcagaaggcagagcgtgagaaggagcggaggatggccaacaatgcccgagagcgtctgcgggtccgtgacatcaacgaggctttcaaagagctcggccgcatggtgcagctccacctcaagagtgacaagccccagaccaagctcctgatcctccaccaggcggtggccgtcatcctcagtctggagcagcaagtccgagaaaggaatctgaatccgaaagctgcgtgtctgaaaagaagggaggaagagaaggtgtcctcagagcctccccctctctccttggccggcccacaccctggaatgggagacgcatcgaatcacatgggacagatgtaaaagggtccaagttgccacattgcttcattaaaacaagagaccacttccttaacagctgtattatcttaaacccacataaacacttctccttaacccccatttttgtaatataagacaagtctgagtagttatgaatcgcagacgcaagaggtttcagcattcccaattatcaaaaaacagaaaaacaaaaaaaagaaagaaaaaagtgcaacttgagggacgactttctttaacatatcattcagaatgtgcaaagcagtatgtacaggctgagacacagcccagagactgaacggcaatctttccacactgtggaacaatgcatttgtgcctaaacttcttttggaaaaaaaaaatataattaatttgtaagtctgaaaaaaaaatatttaatttaaaaaaaattgtaaacttgcaataatgaaaaagtgtacttctgaagaaaactacatgaacgtttttgttggtattcaagtcagctagtgtttataattactggatattgaattaggggaagctcggctgccctagtaacaaaaccagcaaacgtcctgatgacaacgaagtgatgacattagccattccttagggtaggaggaacagatggatcttatagacctatgacaaatatatatataaatatatatataaatatatattaaaaatttagtgactatggtaagcttttgttcatttgtttcagacttttttctcctgtaaaaaaatagtactgattaacttttttaaaagaaagattttactgtaaatatggatttttttttttttggtcttatttctgtccctttccctggtttgttatcgtaacctgtagtgccaactctgcttccagaggggtagtgcaggatgaaatgctgaccctgatgttgcttctcattcataaataagtagaaagttgtttctccagtcttttgggaacacaggacttaaaagtcacatcatgtgtagatattacaagcagcattaccaagacatggcaaaaagagtttgtctgaattgtaatgttgcgtttgtgaacctattctgggattttcagaggtacaaggttagaatgctacaatgttaccactgtgccttccaatgtttatatcatcggaaacataacataatcaaagtggctgtgatttaacaaaatgattaaagtgttacctacctgtgtagccgaagtagtgtgcagtgaggcgtttctgaatacatggtcagatttttggaaaaaaacaaaaacaaaaaaaacaagtaaagttcaaaaaccgtcaaatgagaaaattgcaagtagtgtgacagagctgattgattttgttgctttcttgattttttttttcaaaatgggtttactaaaatgtagatgacttaactgcctcctccttcgtctgaaaaatgccaatattcaatcatcatgcagcattataacaagccttataagtcctaaagcattaagttgcacttttttgaggaggggtagtgcagtatttctctggccagtatgaatgaagtttatacttaccatatttgatagaaacatagatcaagctatggcacagcgactcatcagatagctagctttgacgtctgggcacaattgaaccaacttccatcgtgaatctttataatgattgactttggtgtatagtgcagtaaacaaatagtgctcctagttaagtatttgtcagcatccttttgtctctaacttgtttctatttttacagccacacaattcttggcatgtattaagaaaaaaaaaaatccctgttcaagtagtttttccacctatcagcactgagtaaatgccataaatccattgaaatggtctaaatgttccatctgttctcctgttttgccagttatatagtaatgaaatacatttgtaaattttatgcaacaaatggcaaacgtatcattattttgaaattgtgtatgtaaaagttatatttttacatgtagactcttgttattatgtgttttaatacattgtatcagtttttgtttttttttaaaaactgtggtttaaaaagaagtctcatttaaatgaaatagctacaagaatcagaattttatgttcatttctgaaaatgtaagaacaaataagatagttaccacgtggtcatcttttacaaacccataaacattttgattagctgtgtgtgtgttgaaaaactgtaaatatgttcagtagcgataaaactaaaataactttgatttgttgataagttcctaaaatgtggaggtggattaaaaccttaggagaatagcagaaatcaaacttcatgaaaagttattttggggctttcctgtgaaatgtatgaacaaagaggctcagagaaggacatggaagacaataatgtatactctctcctcctccctgaataatgaaaaccatgtgtatttgttccctccgtatgttaaagatttccttttagtggtacattctgcactcattttgtatagtctaccaaggcgggtatccctaggaacaatattatataggaagcaggtatactctgatcacattcaggataagtgtacagaagaaaatacggtgtttactctttagggaactggaaacactccctgcattgatgtacattttaagaatggcacttttgatacatgttatcataaaggtgcttaatagagctgaattaaagtttttcaaatctgtaaacaaagcaaaaaagtaaattgtagtcatttgattattttttaaattggtgctttatattttgttctcactcagagtaaaagctgcaatttattgttcaccagctttgatgtattcattactcagtaatgcaatacctctattgttgaattccctttggaaataagtgaaaattctaacggccactgaaagctgctcgctaggttttgcttggtggagaaacataatctgcacctatccatattaattgggttgtatccccattaaaaaagaaaaaaagggaatgtggcctttttagtgtgttttttattgttgttgttttgtaattatcaaacccaggtaagatattggtatcctgcactggattttcaaatgaagttcagcagaagacagttaagattaaagtactatacaaaaatttcaaaagggtccatactacgctatctgtatgacgacacttaggctggggatctctttcagaaactcggactttaaaagcaacttggagcagttgatccacctccacattcaagtaatttatgaatatgcagaatagggatctgttcatctagaaatttttaccatttgtcttctgtgtagctgcaaggaacactaatgtttatacaactgtcagtccacccagtggtgcaactggttctgattcagtcttccgattcctttttatttttcactttttcctatttctgaatttttttttttatttgtgatcttgattttgatgaggggttggggagtggggagggagtcgaaccaagacttggagttaagaggattttcatcttttgcatccaacaggcagaatatgatctgtgtccaaaagtgaacttgagtcaggaatgaatcaatttcagcataaacaagcacaaaaatttagtctgctggctgactggaagcaaaaaagtcaagatggaatatgatgaattccaacacaatggggcaccaaggcctttaggcctctctttttattttgctttggttttgtttgtttttctttagagacatgctctttctcatgggacttgaagtggactcatctttgtgcagtgctggttttgccatactcatttcaagtattatagacatatgtaatggtgaaaatatatgaactgtggcctttttcattcttgttacttgtgatgcaattaagtgaagataagaaaaaaaaaaaaaaagcagagatttaccatgtatcagtgcctggctttttgttataaagctttgtttgtctagtgctcttttgctataaaatagactgtagtacaccctagtaggaaaaaaaaaaaactaaatttaaaaataaaaaatatatttggcttatttttcgcaggagcaatccttttataccatgaatattacaaaaaaattgtcagattctgaatatttcttctttgtagatttttggaatcattatgagtaaaagtttgttactttattttactatttaaaagatgttattttaccatgtgttaccaagatgaaactgtatgggtagcttttttgtttgttttttgttttgtttttgtttttgtttttgtttttagttgtaggtcgcagcggggaaattttttgcgactgtacacatagctgcagcattaaaaacttaaaaaaattgttaaaaaaaaaaaaagggaaaacatttcaaaaaaaaaaaaagataaacagttacaccttgttttcaatgtgtggctgagtgcctcgattttttcatgtttttggtgtatttctgatttgtagaagtgtccaaacaggttgtgtgctggagttccttcaagacaaaaacaaacccagcttggtcaaggccattacctgtttcccatctgtagttattcgatgaagtcatgtacatgaccgttctgtagcaataaatgtgccatttttataaactgtttctgacacttgtttcatttcattttgcattgtccatatagctatgattctcttctgtaagtaaaacgcatctatatttcattttccaagtgttggaggtattgacagcttaacaaacaaaacatacaaaaaaaatcacaaaaacaaattgaaaagcaaagcacatgattgatcaaggaagagatgcccttaatgaaaatggaacgggatgcatgcaaaacaaaaagaaaactgtctagaggattaactaattgaaggaatataattaatgtgtgtgtaacactgaagctatgcatttgaagagctctgaactgcaccagtgttttcggttgtgctgcaggttgctaagtcaagtcagccttaaccttttgcaccagttggtcggctgtttggcagaacattctcagatcttttcagtcaaaaatctaagatgatttattttgtatcactttgttaaaagctgaatattgttaactacagttaatattaacactgtatttatactttctcaaactacatccgccccaccacttctggttgcctctgttgactattaatccagatgtaaacaaccagatgtttttttctaacttgtacaaactgacgtgtgtcaactatcatggaaggaaaaaaatgtacagattaaaattattcagtgttatgtactgtaagttaatatttttgtagaatggacatcaatctactttgcaaaatt

SEQ ID NO: 169 - protein, 657 aa, Homo sapiens
MHHQQRMAALGTDKELSDLLDFSAMFSPPVSSGKNGPTSLASGHFTGSNVEDRSSSGSWGNGGHPSPSRNYGDGTPYDHMTSRDLGSHDNLSPPFVNSRIQSKTERGSYSSYGRESNLQGCHQQSLLGGDMDMGNPGTLSPTKPGSQYYQYSSNNPRRRPLHSSAMEVQTKKVRKVPPGLPSSVYAPSASTADYNRDSPGYPSSKPATSTFPSSFFMQDGHHSSDPWSSSSGMNQPGYAGMLGNSSHIPQSSSYCSLHFRLSYPSHSSADINSSLPPMSTFHRSGTNHYSTSSCTPPANGTDSIMANRGSGAAGSSQTGDALGKASIYSPDHTNNSFSSNPSTPVGSPPSLSAGTAVWSRNGGQASSSPNYEGPLHSLQSRIEDRLERLDDAIHVLRNHAVGPSTAMPGGHGDMHGIIGPSHNGAMGGLGSGYGTGLLSANRHSLMVGTEDGVRGSHSLLPNQVPVPQLPVQSATSPDLNPPQDPYRGMPPGLQGQSVSSGSSEIKSDDEGDENLQDTKSSEDKKLDDDKKDIKSITSNNDDEDLTPEQKAEREKERRMANNARERLRVRDINEAFKELGRMVQLHLKSDKPQTKLLILHQAVAVILSLEQQVRERNLNPKAACLKRREEEKVSSEPPPLSLAGPHPGMGDNHMGQM

SEQ ID NO: 170 - DNA, 6292 bp, Homo sapiens
aagatctattctccagatcacactaacaacagcttttcatcaaacccttcaactcctgttggctctcctccatctctctcagatctgattgtaattcccactttaatatcagcaggcacagctgtttggtctagaaatggaggacaggcctcatcgtctcctaattatgaaggacccttacactctttgcaaagccgaattgaagatcgtttagaaagactggatgatgctattcatgttctccggaaccatgcagtgggcccatccacagctatgcctggtggtcatggggacatgcatggaatcattggaccttctcataatggagccatgggtggtctgggctcagggtatggaaccggccttctttcagccaacagacattcactcatggtggggacccatcgtgaagatggcgtggccctgagaggcagccattctcttctgccaaaccaggttccggttccacagcttcctgtccagtctgcgacttcccctgacctgaacccaccccaggacccttacagaggcatgccaccaggactacaggggcagagtgtctcctctggcagctctgagatcaaatccgatgacgagggtgatgagaacctgcaagacacgaaatcttcggaggacaagaaattagatgacgacaagaaggatatcaaatcaattactagcaataatgacgatgaggacctgacaccagagcagaaggcagagcgtgagaaggagcggaggatggccaacaatgcccgagagcgtctgcgggtccgtgacatcaacgaggctttcaaagagctcggccgcatggtgcagctccacctcaagagtgacaagccccagaccaagctcctgatcctccaccaggcggtggccgtcatcctcagtctggagcagcaagtccgagaaaggaatctgaatccgaaagctgcgtgtctgaaaagaagggaggaagagaaggtgtcctcagagcctccccctctctccttggccggcccacaccctggaatgggagacgcatcgaatcacatgggacagatgtaaaagggtccaagttgccacattgcttcattaaaacaagagaccacttccttaacagctgtattatcttaaacccacataaacacttctccttaacccccatttttgtaatataagacaagtctgagtagttatgaatcgcagacgcaagaggtttcagcattcccaattatcaaaaaacagaaaaacaaaaaaaagaaagaaaaaagtgcaacttgagggacgactttctttaacatatcattcagaatgtgcaaagcagtatgtacaggctgagacacagcccagagactgaacggcaatctttccacactgtggaacaatgcatttgtgcctaaacttcttttggaaaaaaaaaatataattaatttgtaagtctgaaaaaaaaatatttaatttaaaaaaaattgtaaacttgcaataatgaaaaagtgtacttctgaagaaaactacatgaacgtttttgttggtattcaagtcagctagtgtttataattactggatattgaattaggggaagctcggctgccctagtaacaaaaccagcaaacgtcctgatgacaacgaagtgatgacattagccattccttagggtaggaggaacagatggatcttatagacctatgacaaatatatatataaatatatatataaatatatattaaaaatttagtgactatggtaagcttttgttcatttgtttcagacttttttctcctgtaaaaaaatagtactgattaacttttttaaaagaaagattttactgtaaatatggatttttttttttttggtcttatttctgtccctttccctggtttgttatcgtaacctgtagtgccaactctgcttccagaggggtagtgcaggatgaaatgctgaccctgatgttgcttctcattcataaataagtagaaagttgtttctccagtcttttgggaacacaggacttaaaagtcacatcatgtgtagatattacaagcagcattaccaagacatggcaaaaagagtttgtctgaattgtaatgttgcgtttgtgaacctattctgggattttcagaggtacaaggttagaatgctacaatgttaccactgtgccttccaatgtttatatcatcggaaacataacataatcaaagtggctgtgatttaacaaaatgattaaagtgttacctacctgtgtagccgaagtagtgtgcagtgaggcgtttctgaatacatggtcagatttttggaaaaaaacaaaaacaaaaaaaacaagtaaagttcaaaaaccgtcaaatgagaaaattgcaagtagtgtgacagagctgattgattttgttgctttcttgattttttttttcaaaatgggtttactaaaatgtagatgacttaactgcctcctccttcgtctgaaaaatgccaatattcaatcatcatgcagcattataacaagccttataagtcctaaagcattaagttgcacttttttgaggaggggtagtgcagtatttctctggccagtatgaatgaagtttatacttaccatatttgatagaaacatagatcaagctatggcacagcgactcatcagatagctagctttgacgtctgggcacaattgaaccaacttccatcgtgaatctttataatgattgactttggtgtatagtgcagtaaacaaatagtgctcctagttaagtatttgtcagcatccttttgtctctaacttgtttctatttttacagccacacaattcttggcatgtattaagaaaaaaaaaaatccctgttcaagtagtttttccacctatcagcactgagtaaatgccataaatccattgaaatggtctaaatgttccatctgttctcctgttttgccagttatatagtaatgaaatacatttgtaaattttatgcaacaaatggcaaacgtatcattattttgaaattgtgtatgtaaaagttatatttttacatgtagactcttgttattatgtgttttaatacattgtatcagtttttgtttttttttaaaaactgtggtttaaaaagaagtctcatttaaatgaaatagctacaagaatcagaattttatgttcatttctgaaaatgtaagaacaaataagatagttaccacgtggtcatcttttacaaacccataaacattttgattagctgtgtgtgtgttgaaaaactgtaaatatgttcagtagcgataaaactaaaataactttgatttgttgataagttcctaaaatgtggaggtggattaaaaccttaggagaatagcagaaatcaaacttcatgaaaagttattttggggctttcctgtgaaatgtatgaacaaagaggctcagagaaggacatggaagacaataatgtatactctctcctcctccctgaataatgaaaaccatgtgtatttgttccctccgtatgttaaagatttccttttagtggtacattctgcactcattttgtatagtctaccaaggcgggtatccctaggaacaatattatataggaagcaggtatactctgatcacattcaggataagtgtacagaagaaaatacggtgtttactctttagggaactggaaacactccctgcattgatgtacattttaagaatggcacttttgatacatgttatcataaaggtgcttaatagagctgaattaaagtttttcaaatctgtaaacaaagcaaaaaagtaaattgtagtcatttgattattttttaaattggtgctttatattttgttctcactcagagtaaaagctgcaatttattgttcaccagctttgatgtattcattactcagtaatgcaatacctctattgttgaattccctttggaaataagtgaaaattctaacggccactgaaagctgctcgctaggttttgcttggtggagaaacataatctgcacctatccatattaattgggttgtatccccattaaaaaagaaaaaaagggaatgtggcctttttagtgtgttttttattgttgttgttttgtaattatcaaacccaggtaagatattggtatcctgcactggattttcaaatgaagttcagcagaagacagttaagattaaagtactatacaaaaatttcaaaagggtccatactacgctatctgtatgacgacacttaggctggggatctctttcagaaactcggactttaaaagcaacttggagcagttgatccacctccacattcaagtaatttatgaatatgcagaatagggatctgttcatctagaaatttttaccatttgtcttctgtgtagctgcaaggaacactaatgtttatacaactgtcagtccacccagtggtgcaactggttctgattcagtcttccgattcctttttatttttcactttttcctatttctgaatttttttttttatttgtgatcttgattttgatgaggggttggggagtggggagggagtcgaaccaagacttggagttaagaggattttcatcttttgcatccaacaggcagaatatgatctgtgtccaaaagtgaacttgagtcaggaatgaatcaatttcagcataaacaagcacaaaaatttagtctgctggctgactggaagcaaaaaagtcaagatggaatatgatgaattccaacacaatggggcaccaaggcctttaggcctctctttttattttgctttggttttgtttgtttttctttagagacatgctctttctcatgggacttgaagtggactcatctttgtgcagtgctggttttgccatactcatttcaagtattatagacatatgtaatggtgaaaatatatgaactgtggcctttttcattcttgttacttgtgatgcaattaagtgaagataagaaaaaaaaaaaaaaagcagagatttaccatgtatcagtgcctggctttttgttataaagctttgtttgtctagtgctcttttgctataaaatagactgtagtacaccctagtaggaaaaaaaaaaaactaaatttaaaaataaaaaatatatttggcttatttttcgcaggagcaatccttttataccatgaatattacaaaaaaattgtcagattctgaatatttcttctttgtagatttttggaatcattatgagtaaaagtttgttactttattttactatttaaaagatgttattttaccatgtgttaccaagatgaaactgtatgggtagcttttttgtttgttttttgttttgtttttgtttttgtttttgtttttagttgtaggtcgcagcggggaaattttttgcgactgtacacatagctgcagcattaaaaacttaaaaaaattgttaaaaaaaaaaaaagggaaaacatttcaaaaatttttcatgtttttggtgtatttctgatttgtagaagtgtccaaacaggttgtgtgctggagttccttcaagacaaaaacaaacccagcttggtcaaggccattacctgtttcccatctgtagttattcgatgaagtcatgtacatgaccgttctgtagcaataaatgtgccatttttataaactgtttctgacacttgtttcatttcattttgcattgtccatatagctatgattctcttctgtaagtaaaacgcatctatatttcattttccaagtgttggaggtattgacagcttaacaaacaaaacatacaaaaaaaatcacaaaaacaaattgaaaagcaaagcacatgattgatcaaggaagagatgcccttaatgaaaatggaacgggatgcatgcaaaacaaaaagaaaactgtctagaggattaactaattgaaggaatataattaatgtgtgtgtaacactgaagctatgcatttgaagagctctgaactgcaccagtgttttcggttgtgctgcaggttgctaagtcaagtcagccttaaccttttgcaccagttggtcggctgtttggcagaacattctcagatcttttcagtcaaaaatctaagatgatttattttgtatcactttgttaaaagctgaatattgttaactacagttaatattaacactgtatttatactttctcaaactacatccgccccaccacttctggttgcctctgttgactattaatccagatgtaaacaaccagatgtttttttctaacttgtacaaactgacgtgtgtcaactatcatggaaggaaaaaaatgtacagattaaaattattcagtgttatgtactgtaagttaatatttttgtagaatggacatcaatctactttgcaaaatt

SEQ ID NO: 171 - protein, 251 aa, Homo sapiens
MPGGHGDMHGIIGPSHNGAMGGLGSGYGTGLLSANRHSLMVGTEDGVRGSHSLLPNQVPVPQLPVQSATSPDLNPPQDPYRGMPPGLQGQSVSSGSSEIKSDDEGDENLQDTKSSEDKKLDDDKKDIKSITSNNDDEDLTPEQKAEREKERRMANNARERLRVRDINEAFKELGRMVQLHLKSDKPQTKLLILHQAVAVILSLEQQVRERNLNPKAACLKRREEEKVSSEPPPLSLAGPHPGMGDNHMGQM

SEQ ID NO: 172 - DNA, 6879 bp, Homo sapiens
ggaaaatgcaactgaaggaattgttgtgaaaaaagggacagcgagtttgaaataaaagttgttagagtggtactgaggagaaaaaagaatccgagaccatgtactgcgcatacacaatcccgggcatgggcggcaactctttgatgtactactataatgggaaagcggtctatgctccatcagcaagcactgccgactacaatagggactcgccaggctatccttcctccaaaccagcaaccagcactttccctagctccttcttcatgcaagatggccatcacagcagtgacccttggagctcctccagtgggatgaatcagcctggctatgcaggaatgttgggcaactcttctcatattccacagtccagcagctactgtagcctgcatccacatgaacgtttgagctatccatcacactcctcagcagacatcaattccagtcttcctccgatgtccactttccatcgtagtggtacaaaccattacagcacctcttcctgtacgcctcctgccaacgggacagacagtataatggcaaatagaggaagcggggcagccggcagctcccagactggagatgctctggggaaagcacttgcttcgatctattctccagatcacactaacaacagcttttcatcaaacccttcaactcctgttggctctcctccatctctctcagcaggcacagctgtttggtctagaaatggaggacaggcctcatcgtctcctaattatgaaggacccttacactctttgcaaagccgaattgaagatcgtttagaaagactggatgatgctattcatgttctccggaaccatgcagtgggcccatccacagctatgcctggtggtcatggggacatgcatggaatcattggaccttctcataatggagccatgggtggtctgggctcagggtatggaaccggccttctttcagccaacagacattcactcatggtggggacccatcgtgaagatggcgtggccctgagaggcagccattctcttctgccaaaccaggttccggttccacagcttcctgtccagtctgcgacttcccctgacctgaacccaccccaggacccttacagaggcatgccaccaggactacaggggcagagtgtctcctctggcagctctgagatcaaatccgatgacgagggtgatgagaacctgcaagacacgaaatcttcggaggacaagaaattagatgacgacaagaaggatatcaaatcaattactaggtcaagatctagcaataatgacgatgaggacctgacaccagagcagaaggcagagcgtgagaaggagcggaggatggccaacaatgcccgagagcgtctgcgggtccgtgacatcaacgaggctttcaaagagctcggccgcatggtgcagctccacctcaagagtgacaagccccagaccaagctcctgatcctccaccaggcggtggccgtcatcctcagtctggagcagcaagtccgagaaaggaatctgaatccgaaagctgcgtgtctgaaaagaagggaggaagagaaggtgtcctcagagcctccccctctctccttggccggcccacaccctggaatgggagacgcatcgaatcacatgggacagatgtaaaagggtccaagttgccacattgcttcattaaaacaagagaccacttccttaacagctgtattatcttaaacccacataaacacttctccttaacccccatttttgtaatataagacaagtctgagtagttatgaatcgcagacgcaagaggtttcagcattcccaattatcaaaaaacagaaaaacaaaaaaaagaaagaaaaaagtgcaacttgagggacgactttctttaacatatcattcagaatgtgcaaagcagtatgtacaggctgagacacagcccagagactgaacggcaatctttccacactgtggaacaatgcatttgtgcctaaacttcttttggaaaaaaaaaatataattaatttgtaagtctgaaaaaaaaatatttaatttaaaaaaaattgtaaacttgcaataatgaaaaagtgtacttctgaagaaaactacatgaacgtttttgttggtattcaagtcagctagtgtttataattactggatattgaattaggggaagctcggctgccctagtaacaaaaccagcaaacgtcctgatgacaacgaagtgatgacattagccattccttagggtaggaggaacagatggatcttatagacctatgacaaatatatatataaatatatatataaatatatattaaaaatttagtgactatggtaagcttttgttcatttgtttcagacttttttctcctgtaaaaaaatagtactgattaacttttttaaaagaaagattttactgtaaatatggatttttttttttttggtcttatttctgtccctttccctggtttgttatcgtaacctgtagtgccaactctgcttccagaggggtagtgcaggatgaaatgctgaccctgatgttgcttctcattcataaataagtagaaagttgtttctccagtcttttgggaacacaggacttaaaagtcacatcatgtgtagatattacaagcagcattaccaagacatggcaaaaagagtttgtctgaattgtaatgttgcgtttgtgaacctattctgggattttcagaggtacaaggttagaatgctacaatgttaccactgtgccttccaatgtttatatcatcggaaacataacataatcaaagtggctgtgatttaacaaaatgattaaagtgttacctacctgtgtagccgaagtagtgtgcagtgaggcgtttctgaatacatggtcagatttttggaaaaaaacaaaaacaaaaaaaacaagtaaagttcaaaaaccgtcaaatgagaaaattgcaagtagtgtgacagagctgattgattttgttgctttcttgattttttttttcaaaatgggtttactaaaatgtagatgacttaactgcctcctccttcgtctgaaaaatgccaatattcaatcatcatgcagcattataacaagccttataagtcctaaagcattaagttgcacttttttgaggaggggtagtgcagtatttctctggccagtatgaatgaagtttatacttaccatatttgatagaaacatagatcaagctatggcacagcgactcatcagatagctagctttgacgtctgggcacaattgaaccaacttccatcgtgaatctttataatgattgactttggtgtatagtgcagtaaacaaatagtgctcctagttaagtatttgtcagcatccttttgtctctaacttgtttctatttttacagccacacaattcttggcatgtattaagaaaaaaaaaaatccctgttcaagtagtttttccacctatcagcactgagtaaatgccataaatccattgaaatggtctaaatgttccatctgttctcctgttttgccagttatatagtaatgaaatacatttgtaaattttatgcaacaaatggcaaacgtatcattattttgaaattgtgtatgtaaaagttatatttttacatgtagactcttgttattatgtgttttaatacattgtatcagtttttgtttttttttaaaaactgtggtttaaaaagaagtctcatttaaatgaaatagctacaagaatcagaattttatgttcatttctgaaaatgtaagaacaaataagatagttaccacgtggtcatcttttacaaacccataaacattttgattagctgtgtgtgtgttgaaaaactgtaaatatgttcagtagcgataaaactaaaataactttgatttgttgataagttcctaaaatgtggaggtggattaaaaccttaggagaatagcagaaatcaaacttcatgaaaagttattttggggctttcctgtgaaatgtatgaacaaagaggctcagagaaggacatggaagacaataatgtatactctctcctcctccctgaataatgaaaaccatgtgtatttgttccctccgtatgttaaagatttccttttagtggtacattctgcactcattttgtatagtctaccaaggcgggtatccctaggaacaatattatataggaagcaggtatactctgatcacattcaggataagtgtacagaagaaaatacggtgtttactctttagggaactggaaacactccctgcattgatgtacattttaagaatggcacttttgatacatgttatcataaaggtgcttaatagagctgaattaaagtttttcaaatctgtaaacaaagcaaaaaagtaaattgtagtcatttgattattttttaaattggtgctttatattttgttctcactcagagtaaaagctgcaatttattgttcaccagctttgatgtattcattactcagtaatgcaatacctctattgttgaattccctttggaaataagtgaaaattctaacggccactgaaagctgctcgctaggttttgcttggtggagaaacataatctgcacctatccatattaattgggttgtatccccattaaaaaagaaaaaaagggaatgtggcctttttagtgtgttttttattgttgttgttttgtaattatcaaacccaggtaagatattggtatcctgcactggattttcaaatgaagttcagcagaagacagttaagattaaagtactatacaaaaatttcaaaagggtccatactacgctatctgtatgacgacacttaggctggggatctctttcagaaactcggactttaaaagcaacttggagcagttgatccacctccacattcaagtaatttatgaatatgcagaatagggatctgttcatctagaaatttttaccatttgtcttctgtgtagctgcaaggaacactaatgtttatacaactgtcagtccacccagtggtgcaactggttctgattcagtcttccgattcctttttatttttcactttttcctatttctgaatttttttttttatttgtgatcttgattttgatgaggggttggggagtggggagggagtcgaaccaagacttggagttaagaggattttcatcttttgcatccaacaggcagaatatgatctgtgtccaaaagtgaacttgagtcaggaatgaatcaatttcagcataaacaagcacaaaaatttagtctgctggctgactggaagcaaaaaagtcaagatggaatatgatgaattccaacacaatggggcaccaaggcctttaggcctctctttttattttgctttggttttgtttgtttttctttagagacatgctctttctcatgggacttgaagtggactcatctttgtgcagtgctggttttgccatactcatttcaagtattatagacatatgtaatggtgaaaatatatgaactgtggcctttttcattcttgttacttgtgatgcaattaagtgaagataagaaaaaaaaaaaaaaagcagagatttaccatgtatcagtgcctggctttttgttataaagctttgtttgtctagtgctcttttgctataaaatagactgtagtacaccctagtaggaaaaaaaaaaaactaaatttaaaaataaaaaatatatttggcttatttttcgcaggagcaatccttttataccatgaatattacaaaaaaattgtcagattctgaatatttcttctttgtagatttttggaatcattatgagtaaaagtttgttactttattttactatttaaaagatgttattttaccatgtgttaccaagatgaaactgtatgggtagcttttttgtttgttttttgttttgtttttgtttttgtttttgtttttagttgtaggtcgcagcggggaaattttttgcgactgtacacatagctgcagcattaaaaacttaaaaaaattgttaaaaaaaaaaaaagggaaaacatttcaaaaatttttcatgtttttggtgtatttctgatttgtagaagtgtccaaacaggttgtgtgctggagttccttcaagacaaaaacaaacccagcttggtcaaggccattacctgtttcccatctgtagttattcgatgaagtcatgtacatgaccgttctgtagcaataaatgtgccatttttataaactgtttctgacacttgtttcatttcattttgcattgtccatatagctatgattctcttctgtaagtaaaacgcatctatatttcattttccaagtgttggaggtattgacagcttaacaaacaaaacatacaaaaaaaatcacaaaaacaaattgaaaagcaaagcacatgattgatcaaggaagagatgcccttaatgaaaatggaacgggatgcatgcaaaacaaaaagaaaactgtctagaggattaactaattgaaggaatataattaatgtgtgtgtaacactgaagctatgcatttgaagagctctgaactgcaccagtgttttcggttgtgctgcaggttgctaagtcaagtcagccttaaccttttgcaccagttggtcggctgtttggcagaacattctcagatcttttcagtcaaaaatctaagatgatttattttgtatcactttgttaaaagctgaatattgttaactacagttaatattaacactgtatttatactttctcaaactacatccgccccaccacttctggttgcctctgttgactattaatccagatgtaaacaaccagatgtttttttctaacttgtacaaactgacgtgtgtcaactatcatggaaggaaaaaaatgtacagattaaaattattcagtgttatgtactgtaagttaatatttttgtagaatggacatcaatctactttgcaaaatt

SEQ ID NO: 173 - protein, 501 aa, Homo sapiens
MYCAYTIPGMGGNSLMYYYNGKAVYAPSASTADYNRDSPGYPSSKPATSTFPSSFFMQDGHHSSDPWSSSSGMNQPGYAGMLGNSSHIPQSSSYCSLHFRLSYPSHSSADINSSLPPMSTFHRSGTNHYSTSSCTPPANGTDSIMANRGSGAAGSSQTGDALGKASIYSPDHTNNSFSSNPSTPVGSPPSLSAGTAVWSRNGGQASSSPNYEGPLHSLQSRIEDRLERLDDAIHVLRNHAVGPSTAMPGGHGDMHGIIGPSHNGAMGGLGSGYGTGLLSANRHSLMVGTEDGVRGSHSLLPNQVPVPQLPVQSATSPDLNPPQDPYRGMPPGLQGQSVSSGSSEIKSDDEGDENLQDTKSSEDKKLDDDKKDIKSITRSRSSNNDDEDLTPEQKAEREKERRMANNARERLRVRDINEAFKELGRMVQLHLKSDKPQTKLLILHQAVAVILSLEQQVRERNLNPKAACLKRREEEKVSSEPPPLSLAGPHPGMGDNHMGQM

SEQ ID NO: 174 - DNA, 1539 bp, Homo sapiens
gtctacagtatcacctttcttgtagattggcacttatgcggccaaaggaacaacaccatgttttctaaaaggctggagaaaataccacaggtgcctctcctctttcccttcatcttcatcattttgacaaattactcaaagatggagggtgcagttgaaagccagccatcattttttaaaacttctcaggacattgtaacatgcacttgggttgagaactgctactcgagcttctccaggaggcccttggagcaaatgttttgtaaacaccaatctaagaacattatctcttggacgggcatggtggctcacacctgtaatcccagcactttgggaggccaaggtttgtgtgattttgctaaaatgcatcaccaacagcgaatggctgccttagggacggacaaagagctgagtgatttactggatttcagtgcgatgttttcacctcctgtgagcagtgggaaaaatggaccaacttctttggcaagtggacattttactggctcaaatgtagaagacagaagtagctcagggtcctgggggaatggaggacatccaagcccgtccaggaactatggagatgggactccctatgaccacatgaccagcagggaccttgggtcacatgacaatctctctccaccttttgtcaattccagaatacaaagtaaaacagaaaggggctcatactcatcttatgggagagaatcaaacttacagggttgccaccagagtctccttggaggtgacatggatatgggcaacccaggaaccctttcgcccaccaaacctggttcccagtactatcagtattctagcaataatccccgaaggaggcctcttcacagtagtgccatggaggtacagacaaagaaagttcgaaaagttcctccaggtttgccatcttcagtctatgctccatcagcaagcactgccgactacaatagggactcgccaggctatccttcctccaaaccagcaaccagcactttccctagctccttcttcatgcaagatggccatcacagcagtgacccttggagctcctccagtgggatgaatcagcctggctatgcaggaatgttgggcaactcttctcatattccacagtccagcagctactgtagcctgcatccacatgaacgtttgagctatccatcacactcctcagcagacatcaattccagtcttcctccgatgtccactttccatcgtagtggtacaaaccattacagcacctcttcctgtacgcctcctgccaacgggacagacagtataatggcaaatagaggaagcggggcagccggcagctcccagactggagatgctctggggaaagcacttgcttcgatctattctccagatcacactaacaacagcttttcatcaaacccttcaactcctgttggctctcctccatctctctcaggtagtgtatttcaaatcccatttcatcatataacagtttataagaatgattccccccttgtacttcctgattttgtaggtggaaactcacttccccccaaatcccaaagc

SEQ ID NO: 175 - protein, 488 aa, Homo sapiens
MFSKRLEKIPQVPLLFPFIFIILTNYSKMEGAVESQPSFFKTSQDIVTCTWVENCSFSRRPLEQMFCKHQSKNIISWTGMVAHTCNPSTLGGQGLCDFAKMHHQQRMAALGTDKELSDLLDFSAMFSPPVSSGKNGPTSLASGHFTGSNVEDRSSSGSWGNGGHPSPSRNYGDGTPYDHMTSRDLGSHDNLSPPFVNSRIQSKTERGSYSSYGRESNLQGCHQSLLGGDMDMGNPGTLSPTKPGSQYYQYSSNNPRRRPLHSSAMEVQTKKVRKVPPGLPSSVYAPSASTADYNRDSPGYPSSKPATSTFPSSFFMQDGHHSSDPWSSSSGMNQPGYAGMLGNSSHIPQSSSYCSLHFRLSYPSHSSADINSSLPPMSTFHRSGTNHYSTSSCTPPANGTDSIMANRGSGAAGSSQTGDALGKASIYSPDHTNNSFSSNPSTPVGSPPSLSGSVFQIPFHHITVYKNDSPLVLPDFVGGNSLPPKSQS

SEQ ID NO: 176 - DNA, 7624 bp, Homo sapiens
gtctacagtatcacctttcttgtagattggcacttatgcggccaaaggaacaacaccatgttttctaaaaggctggagaaaataccacaggtgcctctcctctttcccttcatcttcatcattttgacaaattactcaaagatggagggtgcagttgaaagccagccatcattttttaaaacttctcaggacattgtaacatgcacttgggttgagaactgctactcgagcttctccaggaggcccttggagcaaatgttttgtaaacaccaatctaagaacattatctcttggacgggcatggtggctcacacctgtaatcccagcactttgggaggccaaggtttgtgtgattttgctaaaatgcatcaccaacagcgaatggctgccttagggacggacaaagagctgagtgatttactggatttcagtgcgatgttttcacctcctgtgagcagtgggaaaaatggaccaacttctttggcaagtggacattttactggctcaaatgtagaagacagaagtagctcagggtcctgggggaatggaggacatccaagcccgtccaggaactatggagatgggactccctatgaccacatgaccagcagggaccttgggtcacatgacaatctctctccaccttttgtcaattccagaatacaaagtaaaacagaaaggggctcatactcatcttatgggagagaatcaaacttacagggttgccaccagcagagtctccttggaggtgacatggatatgggcaacccaggaaccctttcgcccaccaaacctggttcccagtactatcagtattctagcaataatccccgaaggaggcctcttcacagtagtgccatggaggtacagacaaagaaagttcgaaaagttcctccaggtttgccatcttcagtctatgctccatcagcaagcactgccgactacaatagggactcgccaggctatccttcctccaaaccagcaaccagcactttccctagctccttcttcatgcaagatggccatcacagcagtgacccttggagctcctccagtgggatgaatcagcctggctatgcaggaatgttgggcaactcttctcatattccacagtccagcagctactgtagcctgcatccacatgaacgtttgagctatccatcacactcctcagcagacatcaattccagtcttcctccgatgtccactttccatcgtagtggtacaaaccattacagcacctcttcctgtacgcctcctgccaacgggacagacagtataatggcaaatagaggaagcggggcagccggcagctcccagactggagatgctctggggaaagcacttgcttcgatctattctccagatcacactaacaacagcttttcatcaaacccttcaactcctgttggctctcctccatctctctcagcaggcacagctgtttggtctagaaatggaggacaggcctcatcgtctcctaattatgaaggacccttacactctttgcaaagccgaattgaagatcgtttagaaagactggatgatgctattcatgttctccggaaccatgcagtgggcccatccacagctatgcctggtggtcatggggacatgcatggaatcattggaccttctcataatggagccatgggtggtctgggctcagggtatggaaccggccttctttcagccaacagacattcactcatggtggggacccatcgtgaagatggcgtggccctgagaggcagccattctcttctgccaaaccaggttccggttccacagcttcctgtccagtctgcgacttcccctgacctgaacccaccccaggacccttacagaggcatgccaccaggactacaggggcagagtgtctcctctggcagctctgagatcaaatccgatgacgagggtgatgagaacctgcaagacacgaaatcttcggaggacaagaaattagatgacgacaagaaggatatcaaatcaattactaggtcaagatctagcaataatgacgatgaggacctgacaccagagcagaaggcagagcgtgagaaggagcggaggatggccaacaatgcccgagagcgtctgcgggtccgtgacatcaacgaggctttcaaagagctcggccgcatggtgcagctccacctcaagagtgacaagccccagaccaagctcctgatcctccaccaggcggtggccgtcatcctcagtctggagcagcaagtccgagaaaggaatctgaatccgaaagctgcgtgtctgaaaagaagggaggaagagaaggtgtcctcagagcctccccctctctccttggccggcccacaccctggaatgggagacgcatcgaatcacatgggacagatgtaaaagggtccaagttgccacattgcttcattaaaacaagagaccacttccttaacagctgtattatcttaaacccacataaacacttctccttaacccccatttttgtaatataagacaagtctgagtagttatgaatcgcagacgcaagaggtttcagcattcccaattatcaaaaaacagaaaaacaaaaaaaagaaagaaaaaagtgcaacttgagggacgactttctttaacatatcattcagaatgtgcaaagcagtatgtacaggctgagacacagcccagagactgaacggcaatctttccacactgtggaacaatgcatttgtgcctaaacttcttttggaaaaaaaaaatataattaatttgtaagtctgaaaaaaaaatatttaatttaaaaaaaattgtaaacttgcaataatgaaaaagtgtacttctgaagaaaactacatgaacgtttttgttggtattcaagtcagctagtgtttataattactggatattgaattaggggaagctcggctgccctagtaacaaaaccagcaaacgtcctgatgacaacgaagtgatgacattagccattccttagggtaggaggaacagatggatcttatagacctatgacaaatatatatataaatatatatataaatatatattaaaaatttagtgactatggtaagcttttgttcatttgtttcagacttttttctcctgtaaaaaaatagtactgattaacttttttaaaagaaagattttactgtaaatatggatttttttttttttggtcttatttctgtccctttccctggtttgttatcgtaacctgtagtgccaactctgcttccagaggggtagtgcaggatgaaatgctgaccctgatgttgcttctcattcataaataagtagaaagttgtttctccagtcttttgggaacacaggacttaaaagtcacatcatgtgtagatattacaagcagcattaccaagacatggcaaaaagagtttgtctgaattgtaatgttgcgtttgtgaacctattctgggattttcagaggtacaaggttagaatgctacaatgttaccactgtgccttccaatgtttatatcatcggaaacataacataatcaaagtggctgtgatttaacaaaatgattaaagtgttacctacctgtgtagccgaagtagtgtgcagtgaggcgtttctgaatacatggtcagatttttggaaaaaaacaaaaacaaaaaaaacaagtaaagttcaaaaaccgtcaaatgagaaaattgcaagtagtgtgacagagctgattgattttgttgctttcttgattttttttttcaaaatgggtttactaaaatgtagatgacttaactgcctcctccttcgtctgaaaaatgccaatattcaatcatcatgcagcattataacaagccttataagtcctaaagcattaagttgcacttttttgaggaggggtagtgcagtatttctctggccagtatgaatgaagtttatacttaccatatttgatagaaacatagatcaagctatggcacagcgactcatcagatagctagctttgacgtctgggcacaattgaaccaacttccatcgtgaatctttataatgattgactttggtgtatagtgcagtaaacaaatagtgctcctagttaagtatttgtcagcatccttttgtctctaacttgtttctatttttacagccacacaattcttggcatgtattaagaaaaaaaaaaatccctgttcaagtagtttttccacctatcagcactgagtaaatgccataaatccattgaaatggtctaaatgttccatctgttctcctgttttgccagttatatagtaatgaaatacatttgtaaattttatgcaacaaatggcaaacgtatcattattttgaaattgtgtatgtaaaagttatatttttacatgtagactcttgttattatgtgttttaatacattgtatcagtttttgtttttttttaaaaactgtggtttaaaaagaagtctcatttaaatgaaatagctacaagaatcagaattttatgttcatttctgaaaatgtaagaacaaataagatagttaccacgtggtcatcttttacaaacccataaacattttgattagctgtgtgtgtgttgaaaaactgtaaatatgttcagtagcgataaaactaaaataactttgatttgttgataagttcctaaaatgtggaggtggattaaaaccttaggagaatagcagaaatcaaacttcatgaaaagttattttggggctttcctgtgaaatgtatgaacaaagaggctcagagaaggacatggaagacaataatgtatactctctcctcctccctgaataatgaaaaccatgtgtatttgttccctccgtatgttaaagatttccttttagtggtacattctgcactcattttgtatagtctaccaaggcgggtatccctaggaacaatattatataggaagcaggtatactctgatcacattcaggataagtgtacagaagaaaatacggtgtttactctttagggaactggaaacactccctgcattgatgtacattttaagaatggcacttttgatacatgttatcataaaggtgcttaatagagctgaattaaagtttttcaaatctgtaaacaaagcaaaaaagtaaattgtagtcatttgattattttttaaattggtgctttatattttgttctcactcagagtaaaagctgcaatttattgttcaccagctttgatgtattcattactcagtaatgcaatacctctattgttgaattccctttggaaataagtgaaaattctaacggccactgaaagctgctcgctaggttttgcttggtggagaaacataatctgcacctatccatattaattgggttgtatccccattaaaaaagaaaaaaagggaatgtggcctttttagtgtgttttttattgttgttgttttgtaattatcaaacccaggtaagatattggtatcctgcactggattttcaaatgaagttcagcagaagacagttaagattaaagtactatacaaaaatttcaaaagggtccatactacgctatctgtatgacgacacttaggctggggatctctttcagaaactcggactttaaaagcaacttggagcagttgatccacctccacattcaagtaatttatgaatatgcagaatagggatctgttcatctagaaatttttaccatttgtcttctgtgtagctgcaaggaacactaatgtttatacaactgtcagtccacccagtggtgcaactggttctgattcagtcttccgattcctttttatttttcactttttcctatttctgaatttttttttttatttgtgatcttgattttgatgaggggttggggagtggggagggagtcgaaccaagacttggagttaagaggattttcatcttttgcatccaacaggcagaatatgatctgtgtccaaaagtgaacttgagtcaggaatgaatcaatttcagcataaacaagcacaaaaatttagtctgctggctgactggaagcaaaaaagtcaagatggaatatgatgaattccaacacaatggggcaccaaggcctttaggcctctctttttattttgctttggttttgtttgtttttctttagagacatgctctttctcatgggacttgaagtggactcatctttgtgcagtgctggttttgccatactcatttcaagtattatagacatatgtaatggtgaaaatatatgaactgtggcctttttcattcttgttacttgtgatgcaattaagtgaagataagaaaaaaaaaaaaaaagcagagatttaccatgtatcagtgcctggctttttgttataaagctttgtttgtctagtgctcttttgctataaaatagactgtagtacaccctagtaggaaaaaaaaaaaactaaatttaaaaataaaaaatatatttggcttatttttcgcaggagcaatccttttataccatgaatattacaaaaaaattgtcagattctgaatatttcttctttgtagatttttggaatcattatgagtaaaagtttgttactttattttactatttaaaagatgttattttaccatgtgttaccaagatgaaactgtatgggtagcttttttgtttgttttttgttttgtttttgtttttgtttttgtttttagttgtaggtcgcagcggggaaattttttgcgactgtacacatagctgcagcattaaaaacttaaaaaaattgttaaaaaaaaaaaaagggaaaacatttcaaaaatttttcatgtttttggtgtatttctgatttgtagaagtgtccaaacaggttgtgtgctggagttccttcaagacaaaaacaaacccagcttggtcaaggccattacctgtttcccatctgtagttattcgatgaagtcatgtacatgaccgttctgtagcaataaatgtgccatttttataaactgtttctgacacttgtttcatttcattttgcattgtccatatagctatgattctcttctgtaagtaaaacgcatctatatttcattttccaagtgttggaggtattgacagcttaacaaacaaaacatacaaaaaaaatcacaaaaacaaattgaaaagcaaagcacatgattgatcaaggaagagatgcccttaatgaaaatggaacgggatgcatgcaaaacaaaaagaaaactgtctagaggattaactaattgaaggaatataattaatgtgtgtgtaacactgaagctatgcatttgaagagctctgaactgcaccagtgttttcggttgtgctgcaggttgctaagtcaagtcagccttaaccttttgcaccagttggtcggctgtttggcagaacattctcagatcttttcagtcaaaaatctaagatgatttattttgtatcactttgttaaaagctgaatattgttaactacagttaatattaacactgtatttatactttctcaaactacatccgccccaccacttctggttgcctctgttgactattaatccagatgtaaacaaccagatgtttttttctaacttgtacaaactgacgtgtgtcaactatcatggaaggaaaaaaatgtacagattaaaattattcagtgttatgtactgtaagttaatatttttgtagaatggacatcaatctactttgcaaaatt

SEQ ID NO: 177 - protein, 761 aa, Homo sapiens
MFSKRLEKIPQVPLLFPFIFIILTNYSKMEGAVESQPSFFKTSQDIVTCTWVENCSFSRRPLEQMFCKHQSKNIISWTGMVAHTCNPSTLGGQGLCDFAKMHHQQRMAALGTDKELSDLLDFSAMFSPPVSSGKNGPTSLASGHFTGSNVEDRSSSGSWGNGGHPSPSRNYGDGTPYDHMTSRDLGSHDNLSPPFVNSRIQSKTERGSYSSYGRESNLQGCHQQSLLGGDMDMGNPGTLSPTKPGSQYYQYSSNNPRRRPLHSSAMEVQTKKVRKVPPGLPSSVYAPSASTADYNRDSPGYPSSKPATSTFPSSFFMQDGHHSSDPWSSSSGMNQPGYAGMLGNSSHIPQSSSYCSLHFRLSYPSHSSADINSSLPPMSTFHRSGTNHYSTSSCTPPANGTDSIMANRGSGAAGSSQTGDALGKASIYSPDHTNNSFSSNPSTPVGSPPSLSAGTAVWSRNGGQASSSPNYEGPLHSLQSRIEDRLERLDDAIHVLRNHAVGPSTAMPGGHGDMHGIIGPSHNGAMGGLGSGYGTGLLSANRHSLMVGTEDGVRGSHSLLPNQVPVPQLPVQSATSPDLNPPQDPYRGMPPGLQGQSVSSGSSEIKSDDEGDENLQDTKSSEDKKLDDDKKDIKSITRSRSSNNDDEDLTPEQKAEREKERRMANNARERLRVRDINEAFKELGRMVQLHLKSDKPQTKLLILHQAVAVILSLEQQVRERNLNPKAACLKRREEEKVSSEPPPLSLAGPHPGMGDNHMGQM

SEQ ID NO: 178 - DNA, 7609 bp, Homo sapiens
gtctacagtatcacctttcttgtagattggcacttatgcggccaaaggaacaacaccatgttttctaaaaggctggagaaaataccacaggtgcctctcctctttcccttcatcttcatcattttgacaaattactcaaagatggagggtgcagttgaaagccagccatcattttttaaaacttctcaggacattgtaacatgcacttgggttgagaactgctactcgagcttctccaggaggcccttggagcaaatgttttgtaaacaccaatctaagaacattatctcttggacgggcatggtggctcacacctgtaatcccagcactttgggaggccaaggtttgtgtgattttgctaaaatgcatcaccaacagcgaatggctgccttagggacggacaaagagctgagtgatttactggatttcagtgcgatgttttcacctcctgtgagcagtgggaaaaatggaccaacttctttggcaagtggacattttactggctcaaatgtagaagacagaagtagctcagggtcctgggggaatggaggacatccaagcccgtccaggaactatggagatgggactccctatgaccacatgaccagcagggaccttgggtcacatgacaatctctctccaccttttgtcaattccagaatacaaagtaaaacagaaaggggctcatactcatcttatgggagagaatcaaacttacagggttgccaccagagtctccttggaggtgacatggatatgggcaacccaggaaccctttcgcccaccaaacctggttcccagtactatcagtattctagcaataatccccgaaggaggcctcttcacagtagtgccatggaggtacagacaaagaaagttcgaaaagttcctccaggtttgccatcttcagtctatgctccatcagcaagcactgccgactacaatagggactcgccaggctatccttcctccaaaccagcaaccagcactttccctagctccttcttcatgcaagatggccatcacagcagtgacccttggagctcctccagtgggatgaatcagcctggctatgcaggaatgttgggcaactcttctcatattccacagtccagcagctactgtagcctgcatccacatgaacgtttgagctatccatcacactcctcagcagacatcaattccagtcttcctccgatgtccactttccatcgtagtggtacaaaccattacagcacctcttcctgtacgcctcctgccaacgggacagacagtataatggcaaatagaggaagcggggcagccggcagctcccagactggagatgctctggggaaagcacttgcttcgatctattctccagatcacactaacaacagcttttcatcaaacccttcaactcctgttggctctcctccatctctctcagcaggcacagctgtttggtctagaaatggaggacaggcctcatcgtctcctaattatgaaggacccttacactctttgcaaagccgaattgaagatcgtttagaaagactggatgatgctattcatgttctccggaaccatgcagtgggcccatccacagctatgcctggtggtcatggggacatgcatggaatcattggaccttctcataatggagccatgggtggtctgggctcagggtatggaaccggccttctttcagccaacagacattcactcatggtggggacccatcgtgaagatggcgtggccctgagaggcagccattctcttctgccaaaccaggttccggttccacagcttcctgtccagtctgcgacttcccctgacctgaacccaccccaggacccttacagaggcatgccaccaggactacaggggcagagtgtctcctctggcagctctgagatcaaatccgatgacgagggtgatgagaacctgcaagacacgaaatcttcggaggacaagaaattagatgacgacaagaaggatatcaaatcaattactagcaataatgacgatgaggacctgacaccagagcagaaggcagagcgtgagaaggagcggaggatggccaacaatgcccgagagcgtctgcgggtccgtgacatcaacgaggctttcaaagagctcggccgcatggtgcagctccacctcaagagtgacaagccccagaccaagctcctgatcctccaccaggcggtggccgtcatcctcagtctggagcagcaagtccgagaaaggaatctgaatccgaaagctgcgtgtctgaaaagaagggaggaagagaaggtgtcctcagagcctccccctctctccttggccggcccacaccctggaatgggagacgcatcgaatcacatgggacagatgtaaaagggtccaagttgccacattgcttcattaaaacaagagaccacttccttaacagctgtattatcttaaacccacataaacacttctccttaacccccatttttgtaatataagacaagtctgagtagttatgaatcgcagacgcaagaggtttcagcattcccaattatcaaaaaacagaaaaacaaaaaaaagaaagaaaaaagtgcaacttgagggacgactttctttaacatatcattcagaatgtgcaaagcagtatgtacaggctgagacacagcccagagactgaacggcaatctttccacactgtggaacaatgcatttgtgcctaaacttcttttggaaaaaaaaaatataattaatttgtaagtctgaaaaaaaaatatttaatttaaaaaaaattgtaaacttgcaataatgaaaaagtgtacttctgaagaaaactacatgaacgtttttgttggtattcaagtcagctagtgtttataattactggatattgaattaggggaagctcggctgccctagtaacaaaaccagcaaacgtcctgatgacaacgaagtgatgacattagccattccttagggtaggaggaacagatggatcttatagacctatgacaaatatatatataaatatatatataaatatatattaaaaatttagtgactatggtaagcttttgttcatttgtttcagacttttttctcctgtaaaaaaatagtactgattaacttttttaaaagaaagattttactgtaaatatggatttttttttttttggtcttatttctgtccctttccctggtttgttatcgtaacctgtagtgccaactctgcttccagaggggtagtgcaggatgaaatgctgaccctgatgttgcttctcattcataaataagtagaaagttgtttctccagtcttttgggaacacaggacttaaaagtcacatcatgtgtagatattacaagcagcattaccaagacatggcaaaaagagtttgtctgaattgtaatgttgcgtttgtgaacctattctgggattttcagaggtacaaggttagaatgctacaatgttaccactgtgccttccaatgtttatatcatcggaaacataacataatcaaagtggctgtgatttaacaaaatgattaaagtgttacctacctgtgtagccgaagtagtgtgcagtgaggcgtttctgaatacatggtcagatttttggaaaaaaacaaaaacaaaaaaaacaagtaaagttcaaaaaccgtcaaatgagaaaattgcaagtagtgtgacagagctgattgattttgttgctttcttgattttttttttcaaaatgggtttactaaaatgtagatgacttaactgcctcctccttcgtctgaaaaatgccaatattcaatcatcatgcagcattataacaagccttataagtcctaaagcattaagttgcacttttttgaggaggggtagtgcagtatttctctggccagtatgaatgaagtttatacttaccatatttgatagaaacatagatcaagctatggcacagcgactcatcagatagctagctttgacgtctgggcacaattgaaccaacttccatcgtgaatctttataatgattgactttggtgtatagtgcagtaaacaaatagtgctcctagttaagtatttgtcagcatccttttgtctctaacttgtttctatttttacagccacacaattcttggcatgtattaagaaaaaaaaaaatccctgttcaagtagtttttccacctatcagcactgagtaaatgccataaatccattgaaatggtctaaatgttccatctgttctcctgttttgccagttatatagtaatgaaatacatttgtaaattttatgcaacaaatggcaaacgtatcattattttgaaattgtgtatgtaaaagttatatttttacatgtagactcttgttattatgtgttttaatacattgtatcagtttttgtttttttttaaaaactgtggtttaaaaagaagtctcatttaaatgaaatagctacaagaatcagaattttatgttcatttctgaaaatgtaagaacaaataagatagttaccacgtggtcatcttttacaaacccataaacattttgattagctgtgtgtgtgttgaaaaactgtaaatatgttcagtagcgataaaactaaaataactttgatttgttgataagttcctaaaatgtggaggtggattaaaaccttaggagaatagcagaaatcaaacttcatgaaaagttattttggggctttcctgtgaaatgtatgaacaaagaggctcagagaaggacatggaagacaataatgtatactctctcctcctccctgaataatgaaaaccatgtgtatttgttccctccgtatgttaaagatttccttttagtggtacattctgcactcattttgtatagtctaccaaggcgggtatccctaggaacaatattatataggaagcaggtatactctgatcacattcaggataagtgtacagaagaaaatacggtgtttactctttagggaactggaaacactccctgcattgatgtacattttaagaatggcacttttgatacatgttatcataaaggtgcttaatagagctgaattaaagtttttcaaatctgtaaacaaagcaaaaaagtaaattgtagtcatttgattattttttaaattggtgctttatattttgttctcactcagagtaaaagctgcaatttattgttcaccagctttgatgtattcattactcagtaatgcaatacctctattgttgaattccctttggaaataagtgaaaattctaacggccactgaaagctgctcgctaggttttgcttggtggagaaacataatctgcacctatccatattaattgggttgtatccccattaaaaaagaaaaaaagggaatgtggcctttttagtgtgttttttattgttgttgttttgtaattatcaaacccaggtaagatattggtatcctgcactggattttcaaatgaagttcagcagaagacagttaagattaaagtactatacaaaaatttcaaaagggtccatactacgctatctgtatgacgacacttaggctggggatctctttcagaaactcggactttaaaagcaacttggagcagttgatccacctccacattcaagtaatttatgaatatgcagaatagggatctgttcatctagaaatttttaccatttgtcttctgtgtagctgcaaggaacactaatgtttatacaactgtcagtccacccagtggtgcaactggttctgattcagtcttccgattcctttttatttttcactttttcctatttctgaatttttttttttatttgtgatcttgattttgatgaggggttggggagtggggagggagtcgaaccaagacttggagttaagaggattttcatcttttgcatccaacaggcagaatatgatctgtgtccaaaagtgaacttgagtcaggaatgaatcaatttcagcataaacaagcacaaaaatttagtctgctggctgactggaagcaaaaaagtcaagatggaatatgatgaattccaacacaatggggcaccaaggcctttaggcctctctttttattttgctttggttttgtttgtttttctttagagacatgctctttctcatgggacttgaagtggactcatctttgtgcagtgctggttttgccatactcatttcaagtattatagacatatgtaatggtgaaaatatatgaactgtggcctttttcattcttgttacttgtgatgcaattaagtgaagataagaaaaaaaaaaaaaaagcagagatttaccatgtatcagtgcctggctttttgttataaagctttgtttgtctagtgctcttttgctataaaatagactgtagtacaccctagtaggaaaaaaaaaaaactaaatttaaaaataaaaaatatatttggcttatttttcgcaggagcaatccttttataccatgaatattacaaaaaaattgtcagattctgaatatttcttctttgtagatttttggaatcattatgagtaaaagtttgttactttattttactatttaaaagatgttattttaccatgtgttaccaagatgaaactgtatgggtagcttttttgtttgttttttgttttgtttttgtttttgtttttgtttttagttgtaggtcgcagcggggaaattttttgcgactgtacacatagctgcagcattaaaaacttaaaaaaattgttaaaaaaaaaaaaagggaaaacatttcaaaaatttttcatgtttttggtgtatttctgatttgtagaagtgtccaaacaggttgtgtgctggagttccttcaagacaaaaacaaacccagcttggtcaaggccattacctgtttcccatctgtagttattcgatgaagtcatgtacatgaccgttctgtagcaataaatgtgccatttttataaactgtttctgacacttgtttcatttcattttgcattgtccatatagctatgattctcttctgtaagtaaaacgcatctatatttcattttccaagtgttggaggtattgacagcttaacaaacaaaacatacaaaaaaaatcacaaaaacaaattgaaaagcaaagcacatgattgatcaaggaagagatgcccttaatgaaaatggaacgggatgcatgcaaaacaaaaagaaaactgtctagaggattaactaattgaaggaatataattaatgtgtgtgtaacactgaagctatgcatttgaagagctctgaactgcaccagtgttttcggttgtgctgcaggttgctaagtcaagtcagccttaaccttttgcaccagttggtcggctgtttggcagaacattctcagatcttttcagtcaaaaatctaagatgatttattttgtatcactttgttaaaagctgaatattgttaactacagttaatattaacactgtatttatactttctcaaactacatccgccccaccacttctggttgcctctgttgactattaatccagatgtaaacaaccagatgtttttttctaacttgtacaaactgacgtgtgtcaactatcatggaaggaaaaaaatgtacagattaaaattattcagtgttatgtactgtaagttaatatttttgtagaatggacatcaatctactttgcaaaatt

SEQ ID NO: 179 - protein, 756 aa, Homo sapiens
MFSKRLEKIPQVPLLFPFIFIILTNYSKMEGAVESQPSFFKTSQDIVTCTWVENCSFSRRPLEQMFCKHQSKNIISWTGMVAHTCNPSTLGGQGLCDFAKMHHQQRMAALGTDKELSDLLDFSAMFSPPVSSGKNGPTSLASGHFTGSNVEDRSSSGSWGNGGHPSPSRNYGDGTPYDHMTSRDLGSHDNLSPPFVNSRIQSKTERGSYSSYGRESNLQGCHQSLLGGDMDMGNPGTLSPTKPGSQYYQYSSNNPRRRPLHSSAMEVQTKKVRKVPPGLPSSVYAPSASTADYNRDSPGYPSSKPATSTFPSSFFMQDGHHSSDPWSSSSGMNQPGYAGMLGNSSHIPQSSSYCSLHFRLSYPSHSSADINSSLPPMSTFHRSGTNHYSTSSCTPPANGTDSIMANRGSGAAGSSQTGDALGKASIYSPDHTNNSFSSNPSTPVGSPPSLSAGTAVWSRNGGQASSSPNYEGPLHSLQSRIEDRLERLDDAIHVLRNHAVGPSTAMPGGHGDMHGIIGPSHNGAMGGLGSGYGTGLLSANRHSLMVGTEDGVRGSHSLLPNQVPVPQLPVQSATSPDLNPPQDPYRGMPPGLQGQSVSSGSSEIKSDDEGDENLQDTKSSEDKKLDDDKKDIKSITSNNDDEDLTPEQKAEREKERRMANNARERLRVRDINEAFKELGRMVQLHLKSDKPQTKLLILHQAVAVILSLEQQVRERNLNPKAACLKRREEEKVSSEPPPLSLAGPHPGMGDNHMGQM

SEQ ID NO: 180 - DNA, 8153 bp, Homo sapiens
attacaatgtatctttcagggaaacctattattatcaatgtgactccacgggggagtccatggtgatgatgatgaggaggaggatgatgatgatgagacacctctaaacttggaacaagtttaagactttatgagagaattttttttttataaacaataagaaaaagttgttggatttttttttaatgatttcttttttgggggagggaattttgttgcagttttatggtggaaaatgcaaaaaccagagccaggtgcataatcttgtaatctgtggatatccctggagcaggactgagtaccagttaaaatactttttggggatacacatgtgagatactaagtacttgcagaagatttttgtctctctttttaaagtctctttccttggaatattgtgagaatatttgtggccatttaaggtttgtgtgattttgctaaaatgcatcaccaacagcgaatggctgccttagggacggacaaagagctgagtgatttactggatttcagtgcgatgttttcacctcctgtgagcagtgggaaaaatggaccaacttctttggcaagtggacattttactggctcaaatgtagaagacagaagtagctcagggtcctgggggaatggaggacatccaagcccgtccaggaactatggagatgggactccctatgaccacatgaccagcagggaccttgggtcacatgacaatctctctccaccttttgtcaattccagaatacaaagtaaaacagaaaggggctcatactcatcttatgggagagaatcaaacttacagggttgccaccagcagagtctccttggaggtgacatggatatgggcaacccaggaaccctttcgcccaccaaacctggttcccagtactatcagtattctagcaataatccccgaaggaggcctcttcacagtagtgccatggaggtacagacaaagaaagttcgaaaagttcctccaggtttgccatcttcagtctatgctccatcagcaagcactgccgactacaatagggactcgccaggctatccttcctccaaaccagcaaccagcactttccctagctccttcttcatgcaagatggccatcacagcagtgacccttggagctcctccagtgggatgaatcagcctggctatgcaggaatgttgggcaactcttctcatattccacagtccagcagctactgtagcctgcatccacatgaacgtttgagctatccatcacactcctcagcagacatcaattccagtcttcctccgatgtccactttccatcgtagtggtacaaaccattacagcacctcttcctgtacgcctcctgccaacgggacagacagtataatggcaaatagaggaagcggggcagccggcagctcccagactggagatgctctggggaaagcacttgcttcgatctattctccagatcacactaacaacagcttttcatcaaacccttcaactcctgttggctctcctccatctctctcagcaggcacagctgtttggtctagaaatggaggacaggcctcatcgtctcctaattatgaaggacccttacactctttgcaaagccgaattgaagatcgtttagaaagactggatgatgctattcatgttctccggaaccatgcagtgggcccatccacagctatgcctggtggtcatggggacatgcatggaatcattggaccttctcataatggagccatgggtggtctgggctcagggtatggaaccggccttctttcagccaacagacattcactcatggtggggacccatcgtgaagatggcgtggccctgagaggcagccattctcttctgccaaaccaggttccggttccacagcttcctgtccagtctgcgacttcccctgacctgaacccaccccaggacccttacagaggcatgccaccaggactacaggggcagagtgtctcctctggcagctctgagatcaaatccgatgacgagggtgatgagaacctgcaagacacgaaatcttcggaggacaagaaattagatgacgacaagaaggatatcaaatcaattactagcaataatgacgatgaggacctgacaccagagcagaaggcagagcgtgagaaggagcggaggatggccaacaatgcccgagagcgtctgcgggtccgtgacatcaacgaggctttcaaagagctcggccgcatggtgcagctccacctcaagagtgacaagccccagaccaagctcctgatcctccaccaggcggtggccgtcatcctcagtctggagcagcaagtccgagaaaggaatctgaatccgaaagctgcgtgtctgaaaagaagggaggaagagaaggtgtcctcagagcctccccctctctccttggccggcccacaccctggaatgggagacgcatcgaatcacatgggacagatgtaaaagggcaagtccaagttgccacattgcttcattaaaacaagagaccacttccttaacagctgtattatcttaaacccacataaacacttctccttaacccccatttttgtaatataagacaagtctgagtagttatgaatcgcagacgcaagaggtttcagcattcccaattatcaaaaaacagaaaaacaaaaaaaagaaagaaaaaagtgcaacttgagggacgactttctttaacatatcattcagaatgtgcaaagcagtatgtacaggctgagacacagcccagagactgaacggcaatctttccacactgtggaacaatgcatttgtgcctaaacttcttttggaaaaaaaaaatataattaatttgtaagtctgaaaaaaaaatatttaatttaaaaaaaattgtaaacttgcaataatgaaaaagtgtacttctgaagaaaactacatgaacgtttttgttggtattcaagtcagctagtgtttataattactggatattgaattaggggaagctcggctgccctagtaacaaaaccagcaaacgtcctgatgacaacgaagtgatgacattagccattccttagggtaggaggaacagatggatcttatagacctatgacaaatatatatataaatatatatataaatatatattaaaaatttagtgactatggtaagcttttgttcatttgtttcagacttttttctcctgtaaaaaaatagtactgattaacttttttaaaagaaagattttactgtaaatatggatttttttttttttggtcttatttctgtccctttccctggtttgttatcgtaacctgtagtgccaactctgcttccagaggggtagtgcaggatgaaatgctgaccctgatgttgcttctcattcataaataagtagaaagttgtttctccagtcttttgggaacacaggacttaaaagtcacatcatgtgtagatattacaagcagcattaccaagacatggcaaaaagagtttgtctgaattgtaatgttgcgtttgtgaacctattctgggattttcagaggtacaaggttagaatgctacaatgttaccactgtgccttccaatgtttatatcatcggaaacataacataatcaaagtggctgtgatttaacaaaatgattaaagtgttacctacctgtgtagccgaagtagtgtgcagtgaggcgtttctgaatacatggtcagatttttggaaaaaaacaaaaacaaaaaaaacaagtaaagttcaaaaaccgtcaaatgagaaaattgcaagtagtgtgacagagctgattgattttgttgctttcttgattttttttttcaaaatgggtttactaaaatgtagatgacttaactgcctcctccttcgtctgaaaaatgccaatattcaatcatcatgcagcattataacaagccttataagtcctaaagcattaagttgcacttttttgaggaggggtagtgcagtatttctctggccagtatgaatgaagtttatacttaccatatttgatagaaacatagatcaagctatggcacagcgactcatcagatagctagctttgacgtctgggcacaattgaaccaacttccatcgtgaatctttataatgattgactttggtgtatagtgcagtaaacaaatagtgctcctagttaagtatttgtcagcatccttttgtctctaacttgtttctatttttacagccacacaattcttggcatgtattaagaaaaaaaaaaatccctgttcaagtagtttttccacctatcagcactgagtaaatgccataaatccattgaaatggtctaaatgttccatctgttctcctgttttgccagttatatagtaatgaaatacatttgtaaattttatgcaacaaatggcaaacgtatcattattttgaaattgtgtatgtaaaagttatatttttacatgtagactcttgttattatgtgttttaatacattgtatcagtttttgtttttttttaaaaactgtggtttaaaaagaagtctcatttaaatgaaatagctacaagaatcagaattttatgttcatttctgaaaatgtaagaacaaataagatagttaccacgtggtcatcttttacaaacccataaacattttgattagctgtgtgtgtgttgaaaaactgtaaatatgttcagtagcgataaaactaaaataactttgatttgttgataagttcctaaaatgtggaggtggattaaaaccttaggagaatagcagaaatcaaacttcatgaaaagttattttggggctttcctgtgaaatgtatgaacaaagaggctcagagaaggacatggaagacaataatgtatactctctcctcctccctgaataatgaaaaccatgtgtatttgttccctccgtatgttaaagatttccttttagtggtacattctgcactcattttgtatagtctaccaaggcgggtatccctaggaacaatattatataggaagcaggtatactctgatcacattcaggataagtgtacagaagaaaatacggtgtttactctttagggaactggaaacactccctgcattgatgtacattttaagaatggcacttttgatacatgttatcataaaggtgcttaatagagctgaattaaagtttttcaaatctgtaaacaaagcaaaaaagtaaattgtagtcatttgattattttttaaattggtgctttatattttgttctcactcagagtaaaagctgcaatttattgttcaccagctttgatgtattcattactcagtaatgcaatacctctattgttgaattccctttggaaataagtgaaaattctaacggccactgaaagctgctcgctaggttttgcttggtggagaaacataatctgcacctatccatattaattgggttgtatccccattaaaaaagaaaaaaagggaatgtggcctttttagtgtgttttttattgttgttgttttgtaattatcaaacccaggtaagatattggtatcctgcactggattttcaaatgaagttcagcagaagacagttaagattaaagtactatacaaaaatttcaaaagggtccatactacgctatctgtatgacgacacttaggctggggatctctttcagaaactcggactttaaaagcaacttggagcagttgatccacctccacattcaagtaatttatgaatatgcagaatagggatctgttcatctagaaatttttaccatttgtcttctgtgtagctgcaaggaacactaatgtttatacaactgtcagtccacccagtggtgcaactggttctgattcagtcttccgattcctttttatttttcactttttcctatttctgaatttttttttttatttgtgatcttgattttgatgaggggttggggagtggggagggagtcgaaccaagacttggagttaagaggattttcatcttttgcatccaacaggcagaatatgatctgtgtccaaaagtgaacttgagtcaggaatgaatcaatttcagcataaacaagcacaaaaatttagtctgctggctgactggaagcaaaaaagtcaagatggaatatgatgaattccaacacaatggggcaccaaggcctttaggcctctctttttattttgctttggttttgtttgtttttctttagagacatgctctttctcatgggacttgaagtggactcatctttgtgcagtgctggttttgccatactcatttcaagtattatagacatatgtaatggtgaaaatatatgaactgtggcctttttcattcttgttacttgtgatgcaattaagtgaagataagaaaaaaaaaaaaaaagcagagatttaccatgtatcagtgcctggctttttgttataaagctttgtttgtctagtgctcttttgctataaaatagactgtagtacaccctagtaggaaaaaaaaaaaactaaatttaaaaataaaaaatatatttggcttatttttcgcaggagcaatccttttataccatgaatattacaaaaaaattgtcagattctgaatatttcttctttgtagatttttggaatcattatgagtaaaagtttgttactttattttactatttaaaagatgttattttaccatgtgttaccaagatgaaactgtatgggtagcttttttgtttgttttttgttttgtttttgtttttgtttttgtttttagttgtaggtcgcagcggggaaattttttgcgactgtacacatagctgcagcattaaaaacttaaaaaaattgttaaaaaaaaaaaaagggaaaacatttcaaaaaaaaaaaaagataaacagttacaccttgttttcaatgtgtggctgagtgcctcgattttttcatgtttttggtgtatttctgatttgtagaagtgtccaaacaggttgtgtgctggagttccttcaagacaaaaacaaacccagcttggtcaaggccattacctgtttcccatctgtagttattcgatgaagtcatgtacatgaccgttctgtagcaataaatgtgccatttttataaactgtttctgacacttgtttcatttcattttgcattgtccatatagctatgattctcttctgtaagtaaaacgcatctatatttcattttccaagtgttggaggtattgacagcttaacaaacaaaacatacaaaaaaaatcacaaaaacaaattgaaaagcaaagcacatgattgatcaaggaagagatgcccttaatgaaaatggaacgggatgcatgcaaaacaaaaagaaaactgtctagaggattaactaattgaaggaatataattaatgtgtgtgtaacactgaagctatgcatttgaagagctctgaactgcaccagtgttttcggttgtgctgcaggttgctaagtcaagtcagccttaaccttttgcaccagttggtcggctgtttggcagaacattctcagatcttttcagtcaaaaatctaagatgatttattttgtatcactttgttaaaagctgaatattgttaactacagttaatattaacactgtatttatactttctcaaactacatccgccccaccacttctggttgcctctgttgactattaatccagatgtaaacaaccagatgtttttttctaacttgtacaaactgacgtgtgtcaactatcatggaaggaaaaaaatgtacagattaaaattattcagtgttatgtactgtaagttaatatttttgtagaatggacatcaatctactttgcaaaatttggaggctatttcaacattgcactgtagaaatgtaaagtaatgtatgcaatgtaaaggaaagcccgcggtagctgagcgcttcataacagaatgttctaatcaagtacgtggtatttggggatgtctccaatattgctcttgtattctttctaattgggtttagtgactagttgaaggaaaatgttataacgccatttggttcacatgtgaagtgccctccatagccaaatgttgggatttttttttttttcgtttttggttggactgtttgcagatatttaaattttatgaaatttccaaagattttggttgataacccccttttaccttctaaatgatttgagatgttcttatgttcttactgtgtgttttaaatatatataaaagagccacaagcattta

SEQ ID NO: 181 - protein, 657 aa, Homo sapiens; identical to SEQ ID NO: 169

SEQ ID NO: 182 - DNA, 95742 bp, Mus musculus
  misc_feature (1)...(95742): n = A,T,C or G
gagtttgacagaaacagaccgcgacgtcgcggaggtagggtgtatggccgaggctgtgaagccccgccgggccaaggccaaggccagccgcaccaaaggcaaggtgaggatgctgtcactgccatgcgagccctctgctcgccgcgcgccccgtggggtcccgtggggtcccgtggggtcgcgctgtcagggccgcttggccggctccctgacccgacttcactgggcttttgctcattttctttacttcccacaccaacgcctggctgcgtgcgctgaggcagctttttcctccatctttcacttcctagcctctcctctgtaacatgggagccctcccaggttctggaaatgcacggagacctgacgtccttcgcctgggaagtatagattgtagatagcagcgatatgtcaaacctcttcgttttcaaaattcagagcgacagtgttatttcccgtgtatctgattgtttacagtgtggcgtgaatatacagaaatcatcccagggcagaatccaggcagtagggatgggtttgaaattttttttctggattgttgcatgtcagcgtggttttaggtggacttgtttttaggtgcattttgggtttttcactttgctcctgtatacttgctgagacgaacaagttacattctaccctaaggtgttggttagacccatctgtagctataactatgtatatttaaatagggttttaattatgtcgccctgcctggcctggaactcaccatatatctcaaactcccagaggttcggtgtgccaccagacctgactatcatctagacaaactttgccttatccaaaacagaatttacacgaattgaaatcaacaatgaaggtgatattactgacatacatagggggatttccttcttcagaatgggtgatgttactgaacctaaagtataactttttgtgtgtttgggaatgagttttaacggtgatttgtagaaacttaatttaatagagtgcaaacgaagtgtgtggattcctttggtaatgtggtatggattcaaaggcttagttcaggaagtggagtgtcacgtgctgttgtgccaaggttgctgtggcttctggatttgtcccagtacctggcctacattcctcagtgctaactacctggtaggtgactccaggatgacaagttgtggttatgtgtctggtgtttactactggatactttagacagagccctaataatggttttattcttttagtttgatcttctgttaaagaaaaaatcccccccacaccccccattctgaggatctggacttcatttatcttagtaaacgtaggtttaataggacagagtcttgaatttggatttgctctgcagatttaataggttttgtagttaggcgagtgatgatgacaccggaggaaatgagactcagctgactcaaggatgaggtttgagttcaaggccagctggggttgataatgacgtctaggttagcatgttgttatatgagccgaccctgtctcagaaacattgtatcaagttggaacttctaacaaccaacaggtgtgtctggtaatagatggggtgggttaggatgcttcctggttaacaacccccccccctactgcttaggaagttgttgtcctcctctgtttcttctaggcatgggttgttgttggaataaagttgggcagtgctatgtattattattatctaagcctcctttgtgccttgtgagagccacgtattgtttcccacaaaaggattctatccgtttgggatataggagaaaacccttaggcctcattggtgcttacagtcaggagaagccaaacccaacccaactgaacagtactcatcgacattaagacacatgctagtaggtgagagcagtgccgtggctaaagaacagctgtggtcgagttttgcagtacttgtgagaggcttggacaggttgcagtttcaaatagttgggcagtgcagtccttattcagggggacttgtttgtttttgtttggatttgtttattttgagacaaactgtcagccctggctgtcctggcactcactatgtagatcaggctggccttgaactctgcacgcctctgcctccaagtgctgcgattaaaggcatttgtccccttccacccctgttaaggagactgacaagagagggtgctgcagactggaggggttaacagaccgaaagccagtgtgttccgtccttgaaattgcaacggggccgtgtggctagggtggggcgagtgggcagaagcggagtggtcagaaaggcaggccctgtaaggaggttagcctttcctccctgtgactttagagtttgtgtgggcttgagcagaggagggtaggctctgacttaggcttctcggggaactctgcgcttgcgtggttgaaaagaaagtaccaggggtattaatgtgaaaacagctcagatttcagagggagtaggagattcattccggagccaagtgttagtgactgtggcctagggacacagctttatgtgacccagagtgccacactgtagtgcggtgacagtttcattaaggtcttgtagttaatccaagaaagccataaataattaaaaaaaaaagtaccagtgggacattagttggttgggttacagtgaagagggaaatctgctgtaggcctcagggttggtggaagccagggctgtgtaggttttgaaataaaagtttgttagtagcatagagatattgtgtggggttggatatgtgaatctagttttctggacttagcctgaggctgagatgaaaatttgccagtaattaacacatagcttcagatggcagagaactggaggatgcagagatggagggcagacatagcccctcatggagggcagagggtggagggcatttgtatagcatgtgaaacaccctgggttctgtccctgatactgaaacagtagcagtactgagggcatttaagccagaagcagaatcgtctcattctttggattaatgccttagtaagaagggtggtaggatggctcagtaggtaaggggatatatgtgccagcctggtgacctgagatcaaatcccggagcacaaagaaagggggaaggaaagaaccaggccctggaagttgtcctctgacctccacccatatgttccatctcccctgccccaccctgtctgtctctccctctcacagacacacagaatgtacatgcatgtgtgcacacacatatattaataatagatcagtaagttaaagaagtggtcagatccaactgcccttcattactaagtggttgggaggaggaggaagaggaggagccggagccagagccagagctgccaagaaatgagcagttcgtgaggtgggccgtgctcccacggccttcacggagactgtgggtcctggaagctgaggaaagagtggaggagggagggagaggtcaagtcagccacgtgcctcggatgagggaagcagggttggcaggtgatcagagcaacactaaaatcttgaagccccagggacagtgctcacagaaagagccccatccgaagcacaatgccttctacctgtgtggcagtctgtacccaaagagagctggtaaaactgcctccagtgcttggatctgacacttgtgctggtatgcctacctctccctccttttaattgatcccaggctaggcttcatgccacatgtgtagcgtggggcacacactgggttgataaaccacactggttttaaaacagtctaataacaggcattgcatacaatataaaaactgagccatagtgattcatgaaggaggtccgtgtcttttaaggaaagaaaggagttgtaggtttacttaatggagtatgcagagagaggtggaaggcatagttgacgttcccacctgtgtttcagaacaaacatactgcatgactgttttcacactgcttaaagaagcacacacacgatcgtgtgcacatgcacattcagaaatggacagcccacctctttctccaggagatgctgtttgtcacagcctgtgcccttctagtttagctttgccctcttctgccaccacagccctccagggcatttgactgtgacaagcccaaggtccaggaccagaaattatgtaaaagttttaagaaagaatgatgtaaattgtgaacacaaacacaggcaaattccccaaaagagacaattgttgtcctcgcagggaagagggtacatgagcagcagttaagaggagtcgtgtggggctggggagatggctcagcggttggtagcacaggctgcattttcacaggacctgacttaggttcccagcgcccacatggcagctcacaacagtctgtaactccaggcccaggtacttagacaccctctgcagcaccaggcacatgtatggtgcacgggcaaaagacccatacacaaacaaataaatgttattaaaataataaatataaataaataatagcataataaaaaagttaccttgtctcgagggtgtttgtgcagctcctgaatgtcggccgctgtaatagtttcatggtctgcttcagaaccgcttagctgttcttccacacatattgaaatagcttattgttttggccattaatctgtagaattttttggctgagcgttcagagaagaataataagcaagcacaggtgatttgtttgactctcttgcttaaaatttcacagccaaaaatgaactttcattcccatgtgtagtttgtttgactgtaacaacttttttcttttctttttcaatttttttgagacacatctctccgtatgtccctggctgtatagaccaggctggcctggaactcacatagagcagtctgccttacctcctgagtgttgagagcatccccatgcacagtctttaatgcaatagcacttttacaatgccatttaaataagatttccatatttaagaaatggcctattgtgtcttacctacttacttttcatgtgtactgtgcattttgcctttccagctttgtgagttgaactcaggccattaggcttttgcagcccctttacctgccaagccgtctcgtcagctcagacatgttcttttaagaccataattataattgtttgttcggggtcacttgctttcgttgtggtgttgagatagggcctcatgtagcagggtgacttggaattctctgtacctgaagatgagtttgagctcctcatcctgctgtttcgtttccaagtactgggtgtgccatagtgccacgccatcatatacattaagggttaattttttaaagatgattcactgatcacatttttgttagtattattgattgtacaaaataatgtgatattttcaaacatgcatgtaacatgctttgatcatatttacccctcacccatccaatagttatttattttttaaaattacttattttatatatgtgagtgcattgtcgctatcttcagacacaccagaagaggacatcagatcccattgcagatggttgtgagccaccacgtggttgctgggaattgaactcaggtcctctggaagagcagtcagtgctcttatcactgagccatctctccagtctcatattttttaatttttttatttaagacagggtctcactctgtagctctagcctggaactcacaaggagttagccactgctttctgaatgctggggtaagggtgtactccaccaggcctggctcacagttacctttcttttgatacagggtctgactgcccttgaatgtgtggtccttcatctgcctctgcctctcagtgctaggatatctatctatctatctctatgcccttaattatccatttatctatgctcattaattatccaattacataactacgtcttctgtgccacagaagggcttatcaaaaccaataaattaacttgggtataataatgttaactaaaaaatagaatatatttgcatttcaagttttctccctaaaataatttttttatttttgttgttccaggatccattctggaatcccaagttagtttagttagcacatctgtagcttccttcttcctctgtcggctgctcactctccccttttcttccggctccatgacagagttactttgtagattgtttgagtttcagctggcagtttcagtggtaaattgaggttatgccttgctagaaggccaccactgaaactctgcctctcttggaacattgtatcaggggatgtttgccgaaacgctgtctctcttggaacattgtatcaggggatgtttgctgaggaatgctttcctgacaatgctggcttggttatttggttatggtgtgtctgccaggattctccattgaaagtcactattttttcttttgtaattatgaaatacttgagactgtttgttttgcttttgctcaggttctggctcagtcactgtaacatttgtcatgcccgtggcatcgtggcatcactgtcactgtggtttaaatatatcccccaaggaggaagtcatatgttcaaaagttcacagcgatacaggaggagctgtgggcccagcaggatattaggggatgcctgttgaaggaattagcgtggttcacatgagaccctggtagttctcagagttgttataacaagagtgagcttggcacctccactctccagctttctgtctcatacaatctttccccgtttctgtagggtttgctattgtgatgtcatggggcaagaaatccttacagatgaagcaccatgcttttgaactgtggtgttaataaatataagtatccaggtttaagcattttattgccacaattgaaaatgggctagcacttgggggtgatggtgactttccggttttcctgctccttgtatgtttattgcagttctgcatagaagggtagtcacttcctgctcactgggtttattttttatttgttcagtaagtatttattttagactcacaggtacttcttttgcatgctataatctaatgctatgggtttgctggtttggttgcttgagttattacagccttctcttgagtttagagggaacatggtagtcaaaatgaagacatgtgtgggtctgtggcagttagagatgctttcattttacttagcctgtggtacatgatccatttaaacattccatcttcatttttgtttcataatttgtcacttatagtgatatctttttctttgcagattagagtagtgaatgtccaaattgaatgtgctcaaaatgggcaatacaaaatatagagtatttcatgaggtggatttatattccatctgttaaatgtgaaaatttcgattttttttcttgaaggagagagtattttgttttgggtctcagttcgaaggagttgtatgtcgtacaagtaaggtctggtcgctctctttgtggcaggaggaggaggcggcggcagcggctggttgcatctgagacaggagactgctgatacgcagtttgttttgtgctttattgcacacagaggcactgcccacattcacagcactcagttaatcctcccatctgtgctgtgtctgctgcaatgattttctatcctatcttaagcccacttcttctcaacttgacagcaaaacgtcattttaaaacgacaacatttcatctttggcttcctatcagctcatatcatctaataagtaaaattgtattaattcaattaaaagtccccatagtcgtgatcactttgaacaatattcagaaatccaaagtctagactatctatcctctgagaattcagatagtccattaactgtgagctcatataaaacaaaaacatgttattatatatatgtgtgtgtgtgtttgtgtatatatatatatatatacatatatatatatatatatatatatatatatatatatatatgtatatatatataatggtaaacattcccattccaatatagaggaaagagagcataggtccaaggaaagattggtttgtccaaagttagatatgtgccatcagatcaaaccccagagtctacaggagcatatgcagcatctgggcttgtgatgactcatcggagtccatctgagtgagctctgaggacccaccagctcatcatttatagtgcgtgcgaccttattctttggccaactcaagtctataggcttgcttgatggatgtcccaaacccctcgcatgtctaacatgctggagtagccagtgtacctgaggctttacctacatagcttcatgcaatgtcattttcatttctccttcagggattttgtccctgttatatgttggcaccatgatacaactctccatgacctcacaattcttgcatctttcatacctgaaaaagtgttatcacatggataacattgctgagttttgtggccagctcaggatgtcgtcttgtcaccttcaggttcagtagcagcggcctctgtgtgctgttgaggatgcctgacacattgttttgaagctgggatttctgtgttccatttctacgtcaggctttctcttttcagatccatttacatatttatagttggggatttcccatggttggattagtgtcctcaaggaaacttttgccccagtgagtgagggaggcttcttcttcttcttcttcttcttttttttttttttttttttttgagacagggtttctctgtatagccctggctgtcctggaactcactttgtagaccaggctgggctcgaactcagaaatccgcttgcctctgcttcccgagtgctgggattaaaggcgtgtgccaccacgcccggcgggaggcttcttcttaatggcagaaattccctggactgttactggtgtttgcaaacccaatgtgtgtgtggttttgaattgctgtcactcagatcctcactgtcatgcgtagttacttattaggaaactttcacagactcacagggaagaggaggaggcaccattgggaggataccttacgtcctgtaaatgcattccattttaaagtacaatttctgagtatgttcagttatggtcatagtccaagcatggcagaaggagctcctttatagagtgatactgtaaaggcagtgggaggttgattcgctgggggcagcccacatcataggtggtcaacaggcctgggagcttgctggttggttgcttttggtttacattatcagttgctgacaacatggtggctgagcttagcactttaaacttcagagatggtgctttggagtctgttcatggttgccacgtgttactgaggagatcgaggttctcttatgaatacatttagaactggactcaaaaactcaagggcgccgggcgtggtggcacatgcctttaatcccagcactcgggaggcagaggcaggcggatttctgagttcgagcccagcctggtcttcaaagtgagttccaggacagccagggctacacagagaaaccctgtcttgaataaccaataaaaaaaaacaaaaaaacaacaacaacaacaaaaaaaactcaagggcagttttattagagtttaagagtttaaatggcagattaggtgacaatcctggcaactgccaggagagatagagaaaatgcactgtcttttacgtgaggcctgaaatggaaagggaggaagggagtctgtgagctgaggaaagagccctcagtgtaaaagttgagatatttatgtatagcttaaaaactcctcatgctgaaaccactagctcttttatatctcctgccttgcttgtaggaaaagaagaagcatgaagcccttcagacttgtgatgcaggtcccctgccagagacctgtcgcgagcaggagagcccgtgtccagcttctgaactcaaaggagatgacctgaagtcgtctgctgacccccagctccacagtgatgtgtgtggatggaatgaaagtgagatgtttgatataccactcacctccttgactataggggatgaaggtcccccggtacaggacacagaggacctaaaagaaaggggagaggtcacagccggtgatggagatgatgaaatggagttgaaggtggaccctggggacaacgttatagctaaaggtgaaccttgtaagaacttcccggaagtagaggaccacacactcatccagtgtgggcctccagagagcacactgcagcctgactttccctgcactcagcaggcagtggagggctcacatgccagagaacatccgactaggaagcaagatgaagccgccctcggctgttcaaaggtgtttcagaatgttagcttgcacagttcttatgaagccaaagaagtttctcagccaccgagagtgaagaaactatatcctgagttgccagctgaaattgctgaagtaccagctctggtggcagtgaagccattgctccgtagtgagcgactctacccagaactcccgtctcaaccagaagtgacacccttcactaaagaacagctcaaactcttggagcctggctcatggctggaaaatgttgcatcatatgtagaagaattcgataacattgctcatcaggacagacacgagttttatgagctgcttttgaattactcacggtgcaggaagcagttgctgttggctgaagctgagctgctcactctgatgtctgactgccacagtgccaaaagtcgactgtggcactttaaggatgagcagatggccgtacaggtatctccactgtgtgcgtcaagcttctgagctgcctttcccatggcgctgtcaaacttacgctggccctggcttcatctgtccagggatcacatggtcaaatggccacaggagcaggcacataacatggaggagaggggcagagtagggtgtggctcagtggagaagcacatgcctagtctggagggacagcggccctcgacatctagttgacacttttatgattgtgaggagtaggggattgctgcatctcagcttttctcagagaagcaggaatctggatttttatataaaggatgctaactggcagtgtgggcaactaactaaacacaaatacatgcagatacataaactacagagttcaagccagcaaaccatatctcaaggtaaaattcagcttttagactattagttttagattttggcataatgccacaagtgtgcagtcagttgagagtgtactggtggagagtgataaagagagtccattagctgttaccccgctcccaggaggccagagccaccatttccaaaggacccaggaggaatggcgaggaagagaaggccacttttgataagtttgccattaaggggaagctggaggagctactgctgacacatgggatttgctggcccctcctctcatttgtacagtgccttgtgaatctttttgtagattctgtggtaagaggcacattggaaatattgaaaaagaaggggaggtggagaaaaagctcaatggagaaataggagctctggttgctcttgcagaagaccctggctccatcccagcatgtgtgtggcagcttgtaattaataactctagctccagggggtcccatgccctctgctcacctccatgggcaactaggcacgcaagggggtgcacacacatactaagggcgtgcacacaaatactaagggcatgcacacacatactaagggggtgcacacacatactaagggcatgcacataagggcgtgcacacacatactaagggcgtgcacacacatactaagggggtgcacacacatactatgcagagggaacagtcatacacacaaaatctaaaaaggaaggaaggatcgagtatggtgggaggaatcaatatcaaggagaaggattccttttgagcagagaatgaggtggatcttgagatattttgggctactgtggagttgagggaatggcacattggccttggtgttcttcgcgtagaaagtaaaatggcagttgtgagagttttagggatacatgttactgttcctcactgacgtcgtagagtcattttttttttaaaaagatttctttattattatatctaagcatactgtagctgtcttcagacacccagaagaggacatcagatctcattacagatggttttgagccaccatgtggttgctgagatttgaactcaggacctttgaaagagcagtcagtgctcttaaccgctgagccatctctccagccctgagtcatttttaaaaaatgatttgtttattttatgtacattggtgttttgcctgcctttctgtgtgaaagtgttggatcatctggaactagagtacagacctgccatgtgggtgctgggaattgaaccaggatcctttggaagagtagccagtgctctttaccactgagccacatctccagctccgtagggtcactcttttcagaacccaccatctattcatgcctggcagtgttctctgacactgaccattatttgctagtagtgttttgtatgtacagtattggcccccactgtgtatatgtacagtgttggcccctctgagtcatatgtacagtgttggcccctctgtgtcctatgtatagtgttggcctctctgtgtcatatgtacagtgttggcccccactgtgtcatatgtacagtgttggccccgctgtgtatatgtacagtgttggccccactgtgtcctatgtacagtgttggcccccgctgtgtactaggctctttgaaatagtgccagagcctgcaagtctccacctgctgcccgactgcatcagaggcagatggtctctcatttcatccctcctctagggcatctgtgcagatcaagtgaaagtctacgggcatcaccactaccagcgagtagagatgaatgaaaatgtcctgggcgagctgaagaagctgtttgatgccaaatctgagcacctccaccagaccctgaccctccactcgtacacttctgtgctctcgaggttgcaagtggagtcctacatcttcacactgctcaatagctcagctgctctgagatctttagcagtttatcaggcagaccaaggtacgtaagcagtgacagcttccctcttacacttgaatgtgggaaacagttgagggcgctggcctgactgagttggccagaccctaacaggtttcactctatcactgtatatttctcctgcccctcagtagcagtgtagggtcaggtctgtttactgaccgtccttgaggagcgtgaggcctccttccccgtggctgtcagtttccttccttcaggagaccagaggccgcctctctttgcctttgctaagttgtggcccaaggggtttgatccccaaactaaccattaggagaccctttctttttctttttaaaaagtttatcatttttactattgttaatattagatttacttattttattttgtgtgtttgaatgttctgcctccatgtctgtcagtgcaccacatgcctggttccttgcggagttcagaagatggagttgggtctcttggcttgagttatggatggttgtaagctgccatgtgggtgctgggaatcaaaccctggtgggttctctgcaagatcaagtgctctaaccactgagcaagctctccaggccccagaataccttttcatttccctgtttcttgtactttatttttttgtttgctcaatttcttgttttcttgaaatttttaactgaagtagaaattgtaatttttttcatggtagttgcttgctctctcctggagccacattctcagtttctctcatgcatgctaagctaagcagtcagccaacagagttcctctttagaccaactgtctgacatactgctaggactttgtggggatcattgtgggagaggggaggagtttatttccatcatggcagggcatgatggcaggatataagcagctgtaaccaggtgtgcagtgcacagacagacatgcaggtagattcttgttcaggatataaaaccttaaaaccaacccccagaggcccactgtaatgaggctccactccctgcaggtatacgaccttccacaaatcaccatcagctgggcactgagtgttgagtatattagggaacatctcatttgcaaaccacccattttgctcttggtcttgggcatctcaatatgtactccgttcaacttcaaaagtccccacagtctttaacagcattgctctcagctcacctaatgcagtttcaagagcacactgtcttgattttgctctttaaaaaaaaaaaagagagaataaaggcaagcatagtggtgcacgtctttagtccagcacttgtacttaagaggcagaggcaggcaattttagtccagcctggtctacaaagtgagttctaggatagttctaggtctagacagagtgagaccctgtctcaaaaacaaacaaacaaacaaaaatcaagccaaacaacaaaagagaataagagagagagatggggagatgagtgtgtgtgtgtgtgtgtgtgtgtgtagagagagagaatgagaatgagtgagaatgagaatgacagggatggctagaggagactcttcagacttccctgagtaaaatccccttgtgaaatctttataacagtcccaagagcaaaagaaaaattaaccttttgtaacattttagagtcgtggggaatcagtctggtatagtgtatatgaccaagagcagcgaggagccagggatcgtaaactgaaatgtggatcaggcagagctgcagggaggtatggcccgattgaggctgtaggctctggctgcaaggttcagggcctcgtcctcacagaaccagcaggggaagcatcagctccccttgctccatgcctaggcatctgggggcttgaggaaaaatcacttgggctccgagacccgtgggctgccctgtttgtctagctggactgcctacagccctcggtttctgtatcgggctggctccgcctgctctgtggctgcagctctccttggtggaggccccgtggtcctggcttcttcagggtcctgaggtcttcactgaaacttaggctccatgtccctccgcagcgctgcttgctggccttgcagctccttctggccgccttactcagcggctctcaggaccctgagggggaccccacgctcccctcctcaccgctgcctcacgtggctttcctacaaaaccaggactgtgtggacagtggcactgattctgttagcctgagatttagcttggcacagttgcccacaacacactgaccacacctcagtgcgcagagcatgccgggttgagagtctccaccaaacaaactatcatttttgaatccagtctcattcaggtcttcagaacatggacagaacgggccagaataccacaggaatgacctctgtcccagttcccaggagagtccttgttcagctcttaaacacttactgagccaggccttcactgtccccagcagaatggcccattaggttctgcttatgtcagtagagacttgttcattccagacccttctgtgtttctccagcacatagtcccaaaggcgtaaggactgagtgccatgcttgtcagagccacaaccctgcctgccccttgtcaccattactttgtattggttgcttctctgacaagggacaacttaagtctgaagagtcgtccctcacagagcggaagccacgacaacagaagcaccgtcaggaagtggacagcccccttgggtgtttatctgaactaaatgttttacacattttggtttctcttctttaagtggagaaactaagagtctacctccccagtaccattccaaggactcatttaatcttctcttccctatagttcctaaactgacagaaagcatcccctctgatgtgtgtcagctgaaggagtgcattagtgtcttgttcatgttcaccaggagagtgagtgaggatgcccagttccatgaggacatcctgctctggctgcagaagctggtaagtgaacagatacaagcatagatgtttattgcttgggtaatttaattcatattttttcttctatagcttttttagccaattcatctaatgagttaataacttttctttgatgacacatggttacaaagttatttgtcttgttactctgactctttaatgaactctgcctttgaggtcagagttggactcgggaggaaatggcagagagaagtctgccacatttgaagactggatgttgactcaccaagtgtctaattatgtttgatgatagacttagtcacacttaacatgagaagaaaagtgtcagaatttggaaaatttaggcgtattatagacagggttatgtctggacactctagcagtatagtgtggacttgactgtgagtcaccgtgtccacgagtctgtgaacccatgagttctttgtcgttcaggtgtccgtgttacaacgagtcggctgtcctggggatcacttctttctcctgaaccacgttctccgctgcccagctggcattcgtaaatgggctgttccttttatacaggtatgatggggactttctggttctgggggtggaataagggttttattaggtagttttccttaggaaatgtctaatataacccccaagctaattgagtgctatttaaatgaaagtttaaagattgccttatttctactacatggatgctatatgtgtctgcatgagtttatgtacaccgtgtatatagtgtcggcagaggctagcaggcattgattccctggaactggggttccaggtggttgtgaacttcctgatctggatgtggggaaccaaacctctctctggaagagcagccagtgttcttacccactgagtcatctctccagctccctaagtaaaacccttcaaccaggaggatgtgtaggagtcactgtcagaactttctgggccatcacggttgaagaaattaggacagaaccggaaaacttgagaagtaacccagcttgctaggctcacaggtgtttaatttgttaagatattggtgcaggacatcttaccagggcagtttttcttttctatcccacagtacaacgggtacagatgaaatataatctgttaacatggcagagcggtcctaggcttgttagtaactcttgtttgaccatgtgatttatagattctcttttcctgggcaccttttggccatttttattattcatagcaaccactcagatagcaggaaccaaaatatactgcaagctcaactcagttccttcctagtttcttaactttagtatctctggtggcatggagcctaaatcattttgaagagaaggggggtgttttgtttgttttgttttttactggtttacagtagcagtgttgccctccattcccagctgtgtaggtgtctgctgtcagctgctcatcctcggcacttaggctgaggcagtgcgcacaggctgagttggtatgcatcgcacataactgctccagctttgcctagtgctttggcttaggtgtgagggtgagcattgttctctgactagcatcttggttgttagatgcgtataaaccagcttgagctggttttctacagtatactttttttattttctgatttcagatcaaagtgttgaataacccttcaggggtctttcattttatgcagtcccttgccctgctgatgtctcctgtcaagtaagtgtgggagagctttgtgaaatagaaattgaaatacttatatccaagggttagttttcttagctgcacatattcagagggaactgctaagggaagtgttattctagaatgtaacattgcagattttctttaggtgtgatggccctgccccaaagtgatgaacctagctgcttattaaccgttttctcggccctccttttagtgtgtttgtctctcgtcgtgcatgtgattgtgaaaggtgccatagactaagagaaggtgtgttcttagaagagacttagtgttagaggggacctgtggagctgtagtactgcagaaggagtggcgcagagagagtgagtagtcagacacagttccgcagtgggtgagttggctctgagagtgggttggattcactgggtgagagggactgaggcagaggccccaattcagggtgtgcagaggacttgggtggaggtaactgcaagtgatgataacagaggtgagggaccggggtgggagctggggggagaaggcctggaagttaaagacgaactgtctacacttggtcaggcttggcctgtgagccagtggagggttcttgaacaaggagcagaaattgtgtttaaggaagattagacgaggcatcgtgaggctccgggattgtaaggctgtgtttggaggatcgtcagtccaaggtcagcctgggttacaccaagacaaaacgggttcgggggcggtgtttaggagaggttggactggaggagggggatgttcttcttcattgcttcactgatgggtgcagacatttccatctcctggctcagggtcctagtctttcttagttttgataagatacattaaaaaaaaaagatttatttttgtttttaatcatgggtgcttgtatatgtctgtgtgttgggggtgtacgtgagagtttgggttcctgtgggggccaaaagagggcactggatcccatggagctggggttacaggtccttgtgaactgtctgacataagtggtgggagctggccttgggccatctacaagagcagcaactgctcttaaccatctgaccatttattttaactcaactcttctcttctcttctcttctcttctcttctcttctcttctcttctcttctcttctctttctttctgaaatagggtctcactatgtcgagcaggctggcctgcaactggttacttagcctaggctgaccttgaattcagaaatctgcccccctttttttttttctgccttctgtagtggggtttaaagataagtatatcattcttggcctagtttttacatatttgctaatttaaaccactgggcagctgggctgattcctgacttctctttagaatagatgatccaaacaagtgcttgtgtcgggcttcctgtgctcatatggtcagagtcatgtctgttgtttttagaaaccgagcggagtttatgtgccacatgaagcccagtgagtggaagccatcatcttcagggccagcatctgggaactggacacttgtagatgaagcgggggaagaggtaacttgtgttgctttgtttcctttagtccgtcctgagcgcttcttctttcttgccaggaatcgttctaagcactttgtggctaacctcagagatagattccgcatttgtgcttggctctcggttaacagtaagaagctgaacaaaactagcaacaagcaagggaaacaaaaacaaaagcaatgcagagggacctagtacttgagagttaagaggtcagtgggattggaagagtctgtgagggaagacaccatggtccattcatgtcatttgcttttcaacacgagttccacagaaggctcacttgagcatcttataaagcttgccaggcccatacttagatctaactgttctggggcctactgggagatctaattttcagccagagtaaaaaaaactatttctcctgtagtttctgaggctcttgtttagcaattatatacatattattctattttgcattactaagttagctttataaaaaggttttaatgagatgataattttggacgctgaatcctccctcacccctcccggccatagcatggcacaggtgctggtgggggcttcatacttcataacagatggcagaacacagagaatctcatcccaagacaaatctgggagctgggtagggctagcttctcatagcgcccttttatgagaacttgcctttgtttattttagaggaagcaccatcaataattaagagccctaactagggctcatgtcttaaaggccacacactaactcccagcactactaagcttgggactaagctccagactcgcgaatcatggggcaaaaccataactaagctgtagtggaaacagtacatagagcagtgcgtgtggggacacaagttagcttggtttctaaggtgacttcaagactctgtttcaaaaggaaaccaatggtgttccctgaatgactttgttcacagttttttcttgcccacagcagaacctgaggcatctgtagcaaatactagctgcttcctcaagtatattaagattgcttccttacttgttgatttgtctgagcagtgaatctcacagtaaggttgtcaggttttttgttttttttgtttgtttttttttgtttctttgttttgtgtcaagacagagtctctttgtgtagtcctggctggcctagaacttgctctgtagaccaggctggtcttgaactcaaagatctgcctccttctgcctcctgagtggtagaattaaaggcctgttctgccacgtcctgcctctagaagagcttttagtcttctttctgatagaaatttaatgagtgtttcaggctctgaactatggatatgaaccaggtacatatgaattatacttgcatttcagaagacttccatcttggctgtggatctaaggctatggggccgctggcctcgaggaggagtctgtagggccccgttggggtttgtgggatggtttagttttatccacagcctgcagtgtgatcttctggttggctgatgtgacttgccgtcttccctttaggatgaagaccctgagaccagttggattctccttaatgaagacgacttggtcacccttttgtcccagtttccctttcaggagctctttcagcatcttcttgggtttaaagccaaaggtagatcaatctctcttgtcataactgaaaggtggtagaggcccaggctccacagggagcagcatgccctgtgtccacccgtgcaaaacctcctctctctgtgtctataagttttttactcatgtttaaatggaggctcagtagtgcacgtgttacctctcttaaatacacaaatgcacattcttccaagctccccacgtgaccttggtattggagcaagagtcgtggggctaactcctcctctcctggctttctcactgaatcgtacgtctgtgttctgcagtgtttttgtctactaactacatttttttcctttttatctgtttcacttctaggtgattatttacctgaaacaacaaggccccaagagatgatgaaaatttttgcctttgccaactcattagtggagcttctggctgtgggactagacacctttaacagagcccgctacaggcagtttgtgaagcgcattggatacctgatcaggtagtgctgctgttggcactcctgtgctggcattgccttgcttgccttgcttagacccaacactgcggatcctagatgcacacttctgtcttctcatagaaggaggtagttctcctgtcacctaggagggatttgataagtgtttccagtgagagtatgtggttaagcatcccagattcagctgccttgtaaattactattcttagagttctgactctcaaagctgctgcggagagaagggtcgaggaagatgcaggccttcactctttgttccctttctgtccacagcctgcgtttctttggagttgtcactgactgaactgtgacaaatgggcagtaattctttactgccattgcccctctaccatcctccatccgtatcgtcttgtagcttaagatacttggaaacacttcaaagtcttaaataagtcactatttgagttgggagaacttcctgtattgagttaaagatgggtttgtggttttattagcaagtgcttgaaacatttttgagtttatggactactttactttaagtcaacctcgtatccttttatacatcttcagggtttttttctcaattatttcctatagcacatacatattttatttttaaatccaacctcttctctaaaaagaaagttcatgaaactgtaaaaatctctcacttgcccagttttgttctccaaagtgaattgatttctattcattcattcattttagtcagttttatgaagacgtataggatgccctcaaagcctggggtcccttagaaagctgagatcctcttacgcgtatctgtactgtgccctcacgtagctgaggggagccatgaatgtaacccgacatgaaatcgcagtcattcattttccttatttacctgtccttccgccttccgctaaggccattaccgtgaggattggtttctcagggtctctgttaagattaccttcagagcagagcagatggtaggagcacagttagtacatactgagcgtgttactcctcctcgtgtgatgtaaaggtgatgctgagtgagtgactgaagagtgccatgttgttttcctcttacgcaggatgacccttggctatgtcagtgaccactgggctcagtatgtgagccacagcacaggcgcggggctaacaccgcagccctactccatggagaaactgcaggtggaatttgatgagctgtttctcagggctgtcctccatgtcctgaaagccaaaaggtgaggaagcgctggtgcaagcttcctgcttgggaagccaggctggcgtgaaggtccttgacgtaagtaggcgtggagtgcagttcgtcagctttttatcttgggtaaaaccttggccttagttcccatatctgtgttgtacttaaaccagttgtgacccaacacacatcagtatcttggaaacagcctctgtgatggattgttttatgttaacttgatgcaaactacagtcatcagagaggaaggagcctcagttgagaaaacacctccgaaaaaattggactatagtcaagccttcagggttgatggggagggcccagtgcattgtgggtggttccatccctgggctgctggtcctgggttctataagaaagcaggctgagtaagcagcacccttccatgacctctgcatcagctcttgccttcaggttcctgccttgcttgagttcctgtactgacttcttttgatgataaacagtgatgtggatgtgtaaactaaataaaccctttgctccccaagttacgttggttcatggtgtttcatcacagcaatagtaaccctgactaaaatagcttctctctcattctggtcctaaaaaggatctttggttcaaaacccagcagttgttcttaatattctccatatgcctgagaggtctcatgggtaaatttatgatgataatgttgcgtttgtttttgtaagaatggaataaattgatggtatgtgcagattaaaccctgtagcacagcaggctcaggagttagaagcttctctcttgtttgtgtttttcaagatagggtgcctctgtgtaacagccttggctgtcctggagctcgctcggtagaccaggctggccttgaactcgcaggtgcacacctaccttttcctctggagtgctgggattaaaagcgtgtgctaccactgcccagcaagaattagaaactttttgtgctaatattatgttacatgtagaaaaatctacatttgacctcatgagatgtgcacacaggcacaataaaaacactgtataacatcatcattacatccatgcagatacagtatacacagaacgtccccatgtaagcctggtgtcttgctcccttctacctctttgtctgtctttctccctcttgactggcctgtttcctctctccaaatagccctcattctgctgaatgcaattacactgcatgtctgtacacgtttccttttcctagtcacctattagtgaacatctagagtcatatctcggctgttgggaatcatgcatcaggctttcatgtttagacttagtctcttccttggtacatactattatatatgtgcagatatccaaaataataaaacttccccaaatctcaaattctctcggtacagagcatctatggcaaagcatacctctctccaggtgcttgttagaaaagtggtggagtgagcgctggtcttgcctccacttccttagtgtggcgaggcctgctaatgcatcatctttccctgttgctgttgattctgtgcagacttggcatttggctgttcatgtctgagatgcccttcggcacgctgtcggtccagatgctctggaagctcttgtacctcatgcaccaggtggagagtggggacctgcagcaactctgtgcctccctgcagccggccgagtgcaagaggcgactccaaggtacctgaccagggtgctgtctctctgtgtgcgtcacgggcagtgtgagtcatgctgttagaagcatatgtatggtatgatgatgttgacattcgggggacggcttcactggtccgttagttagatggaaggtggcctttctccagcccggatccctcaggtccaaggctgtgcggtaagcacagtgatctaccttgacgaatcacttttgtgtgtgtgtaaaatgctagtcagatcaacaacctccttagctgtcttgaagtctgctaaggctcatgcccagctgttccactgatttttttctgttttagttttcttaattgtattgattttatgaagtaggtaagaggtagagagtgatccttcaaaaacttaactgtgtagcacggtgggagtcggtgtgtgttgtgtgtgcttagcttgtgtaaggttctgggtccaatcctcagcaacaaaagaagccctgaactgacacaacggaagtgaacccgagcgagacttgatgatgtttaatgcaatctcatattgagctgcaggatattcatttacagtgttaaaatgttcatgtagaggaccaggtttggttcctattacctacaggggtagtgcctccaggggtagtgcctccaggggtagtgcctccaggggtagtgcctccaggggtagtgcctacaggggtagtgcctacaggggtagtgccaggagatgcagcaccctccggctgcctctgaactgtatgtatgtattgcatcaatatacatgcaggcagaactacccatacttgtaaaataaaaataaatgaaccattttaaaaaagagtatggaccgggtatggtagtccatgcctttgattccaacacaatctggcctacatggtccaagacaaccagggctgtgtagtgagaccgtctcacaaaaactaaaactaaaacaaaaaaaattcagactatttagttagatataaagatatttatccattacccttcatattaaaggaaatatggaacaaaacataatactagtaggattaaaaacacaccaaaatctcttctaaatttttaaacctctgcattgcttaaaagaaaaagcacctttaatctcagaggcaggcagagctcttgagttggaggccaggcaggtttagtgacttctcggacagccagggctatttagaaactttgtctcaaaacagcagcagcagcagcagcagcagcagaaacagcaacaacaaatccaaacaaggagaaagaaaaaaaattatattattggtaggtttttgcagctatccattattttttccttcattctattctgtgtatatatgttatatacaaacttcctttctgtttatttgctgtcctgtttaaaagtttgttgcttttgttgttgttgtttgatttttgcacttctccgcttcataaaacatttccgcactgtcctgggagatgcttgcattactgtttccgtagttgaatgtgacctacctgctctaagggtttcacagccttttctctggccactaattctgtgggtgaagtgacagacgcaggtgagcgagcggcagtccttcctgggcagggcccgagaatgttaagcgtggcctctgactcgggctagatctcgttagctctctgctgtagtgccatcttctgtcccaagtatttctagcctcagctggattatatttcataaatgggctttttgcccatatgtttttgtaaaatttttgttttttgcgcctggttcttacatgtattacagagttatcaaattgataagttacaaagttctgtattaacaaagtataatattgcttacacagcatcctttgagagcgaggccgagtgggttatgtgctgcctgttttatccaacttcctgttcgtcatcttagtttacgagctaatctgctgggtttgagtgccatacttatgctagtggttgccggctgtgacagtttgctgtgacagtgtctgcattcctgtggagagtcccctgtgcccgtgggttggcagtgacacccagcgactgacagcagcagcattttgcactgttttgggttatcctccagatttgtaccaagttctctgcttcattcaatcttttaaaatagtttttgcgagatgaggcatagtttaatgttaactttttgctctgagtctacactatatttctgtttgttgggatctcagaggctggctgattcagcttctgaactggtagggatccattttggaaaggggaagattctttttatctttaaatattttaaagttttaatttttatgtcgcctttctttgtgatagtgtaacccagtatacgatcctgtttctacattttatttttttgccgtgaattgcagacccagaacattttgcgagctttgagaagtgtctttcttccatcaacagctcagaggagatctgtctcctcacggcctttgctcagatggctcgagccagaagaaccaatgtggatgaagacttcataaaaatcattgtcctggagatctatgaggtgagaagtgtgagatctgtgaggtgagagtgtgagatctgtgaggtgagagtgtgagatctgtgaggtgagagtgtgagatctgtgaggtgagagtgtgagatctatgaggtcagagtgtgagatctatgaggtcagagtgtgagatctgtgaggtcagagtgtgagatctgtgaggtcagagtgtgagatctgtgaagtcagagtgtgagatctgtgaggtgagagtgtgagatctgtgaggtcagagtgtgagatctatgaggtcagagtgtgatatctatgaggtcagagtgtgaaatctatgaggtcagagtgtagggctttgtcagtgctatgaggtcagagtgtgggatctatgaggtcagagtgtggagctctgtcagtgcttagggcttccgggctctctgtccatttcttcagtagcgctttaaaaaaaaagtgacttactgagctgccacctgctcttatgggtgggatggagagtcacaacagcatcatctgccataaggaattttgaaaatcatacagatttataattcttttttccattcttctctcttgacattcgctgtaaacttttggtaaggaatgaacagtttagcacagttggacatagagctcatatgtgtctgctatagccacacagctaatgccatttcagtgttcctgccggtgacatggagagatggcctccaagtcactctaagtgagaacatagaacatagaacattgaatttgggaaagaagttttggtttagctctgctattagagtcccatcttaaacagaagaggtaacttgccagtctgcctttatcttcttggtctacacagtgaccagctgaggggaaatccttgcgttctgtagtttttctctgctccttctctacgagaggagaaatgcaaaggttgcagggatctcacctcccctggaccccagaagcctgcggtggtgtgcagttagggcaagactgcatagaagtggctgcacactcacctgggcccgtgcgtccctcttctccctcctctgagcgagtcagcagtgaacgagcctcactctgatgctcatttgtaaactggcataatgagcttctgaggtctgtgttgtttggcttggaagacagtcctatatgccaagattttagaaactcctaggtttttattttgtaggagaggttatgtatttctatgaattgtatttaaaaataattttagtgatttttctcacattaataagttttggtacttgccagagtccagctccaggggagttctgggctgaggatggaggtgggacattggtgaaaatgaagacagtaaccatatgttgatatttaagcaagtagctctaagtagctcgagcagtcttacattatttatacaagttccacagcactcaagcatgagcggttttgactcatgtctttaatcactttctaaggatcatcaacattacccgttttgttttcctctatggttagtctttaacagtatgatgcttttctatttgataatcagcagaagatatgataccatacctggaataatatttttgggtgtgactctaatttctatggcccacatatcacttttgtggggacagcagtgtgatccgattcttcatacattcttagaaaggcaataattgaaacttgattcttttttcccaattaattaattaattaattcagtttatatcctgattgctgccctcacctcctggcctcccctcacacagtccctttcctaactctcccctcttctcctctgagtgagtggaggaccctctgggtatccccccatccagccacattagagctagcacatcctctcccactgtggccagacatggtggccccgttagatactgactgttgggaccaagtttctcttcttcttggcagcttctgcttttacttttgcctcaaggggactgggagatttagattcctttgtcagcttttcccccactggagggatatctgaccttttgtgccctgtactttttccttgtatgttccataagcccttaacgccatcatctaagttcttagaacggagttctccctttaaaacagttaagcaggaaatcattgatcttagtgacttcctcccggttcctcaggcgactgcagaggccgccagggacagcctgagagagttcctatgctaaactgcaaagagggcttcgttctctgcagacgctttcaggaaattatcaaagactcgttcccaatacaccaggccgtagtcacaactgacaaagtgaaactaactattgccataaggataaacagtgaagagcccggaggacttgaagctcaggcgctccaaagtatggacactttgccccttcttagaaatgggaacaaaacacccatggaaggagttacagagacaaaatttggagctgtgacaaaaggatggaccatctagtgattgccatatgcagggatccatcccataatcagcttccaaacgctgacaccattgcatacactagcaagattttgctgaaaggacccagatagagctgtctcttgtgagactatgccggggcctagcaaacacagaagtggatgctcacagtcagctattggatgggtcacacggcctccaatggaggagctagagaaagtacccaaggagctaaaggaaactgcaaccctataggtggaacaacaatatgaactaagcagtaccccggagctcttgtctctagctgtatatgtatcaaaagatggcctagtcggccatcactgcaaagagaggcccattggacttgccaactttatatgccccagtacaggggaactccagggctaaaaagtgggagtgggtgggtaggggattggggggggggtgggtataggggacttttggcatagcattggaaatgtaaaggaggaaaatacctaattaaaaaaaaaaaaagattctcacaggggctgcagcagtgtcctgtctacaggtccttgccccgtaggaaactgccaagggtcttgccacacggagctccatctgcaaaacactcagtgccattcccagaggccacagcatggcttccgccagagtgtcatttgtttcatcaccaatggtctttttgagatgagactttactgtgttgcccaagctggtccccaactaatggactcaaaggattccctagtgtttgtggcctcaggcccatgcccaccaggctctgctgggattgagtctgtgaatgcagcactcgaactcaggctggaaatgttgccgttttcctgttccttctctaacaccttctagcctcaaggtgcgtagtttgcaatcacaagtcctgacaagtttccgaggctcagtgtgagattatgttttgtggagcaaagtctatggaaatgtgctttaattgttaactagtattaaaactatcatttctttccttacctctcatttaggtatcttatgtcacactgtctaccagagagactttctcaaaggttggtcgagagcttctgggagccattgcagctgttcaccctgagattatctctgtccttttggacagagtgcaggagaccattgaccaagttggaatggtaagagtgctgtctatttggcattttaaaggagtcctgaagtagctgagcatcatggcacatgcctttaatcttctagagattaaaggagacagatgcaggtgatggcagcctgctctacagagcgtattctaggacagtcagggctgttacagagaaaccctgtctcggaaacccaaccaaatacaaagaaatcatttaaagaccccccgaagtcatgagacactggcagtaataggagcatggttgggaataactctcccagcaaatgacacccaagtgcaaaggtttctaaggtccagccttccaccgtttgttgtagtcaatccctttgcaatccttgtgcagttttaaagagaactttattagttatcactggtgaaggtgtgtgtgccagggacttctggtatagccacagataggtgcagccatcattacagctaagctttgagcatttttctcatctcacaaagaaactgtcttcacgagtcttcacaagcccttgcctgtcattccttatctgcatcctccttggccctaagcagcgctcacccgcctcctgtctccacacagctgcctgtttcagacatttaatgtgagagttctcacagtgagcagtctcttatgtctggcttactgcactttgcataatgtagtgtttcttcagaatttccttccttgatatcttgagtaatatttcactgaatttctgtctcacactttgtttatccatttgtcagacaatgagcatttggcttgttcccaccttctggtgttgtaagtattgctgttatgagcataacatgagcatagttgccagcaaatacgttttgtgagacttagtttcagttattactatatttttgtttattacttagtgtgtgattgtgtgtgtccctgaatgatgccatggacatgaaaggactggtaaggtttgttttctctcttcactgtgtggattctagggatcggactcaggtggtcaggcacctctgccactgagccacctcaccagtcctgttctcagacacagaacacagaacccacaagtgtatttgatgacagtctgcaaactggtaccaaattgtgtgtgtgtgttgtttatttttccaattttgcagttcaaatattggctcattttcagaatatatatttttgttttgttaataaaatccatatattattcctatagcctcttaaagtaaaattagtggagtttttggtcttgtagtaaaagcatctatctatctatatattttttaatacatcagtatataagatttttaaaaatttattattttttattaggtattttcttcatttacatttccaatgctatcccaaaagtcccccataccctcccccacccccaatcccctacccacccactcccacttcttggccctgacgttcccctgtactgaggcatataaagtttgcaagatcaatgggcctctctttccaatgatggctgactagaccatcttctgatacatatgcagctagagacacgagctctggggggtactggttagttcatataaattctatattgttgaaagagtacctgctagaagatttccctcnnnnnnnnnnnnnnnnnnnnctcctctcctctcccctcccctcccttaccctctcctccccttctcctcttcttttctcctctcctctcctccaagtcttgctagtgcaggttggcttcagagtctacggcgatctcttgtttcagtctcctgagtgctgggattacaagtgtttgctgccacaccaactaacagtgtggtttagtagcacagggcattgaattcagggtttaatgcattctgggcaagtgctctaacactgccctatcagccatctgccagctctgttttctagaattcccgactggtgcttcctatgcagttgccaatgccttgcatttcttttcctagttttatgatactgactagagccttcactacagaagtgtgagtgtcactcttgtgccatccctgtgataggagaatagttcaaaagttcactgatgcctagcaccgttagtttatggtgtctgtcagacacttccaggttcaggtaggactcttctgtttttgaagtttctattttacatccctggcacactgtacagacttaactcgagggcataggctgttgagataggagggttatgaattgagaagccactgtcaactttgtagtgtcacttgtcacagataaacacacaacacaacactcagattgtactagccagggttatctgggaacagaacggatagattgactataaatacagatataaaggagtagatttatttatttattagagtagattaccagttgtggtctgggtagttaaatgaggctgtctcccattggacgggccaagaatctggcagttgcttaatccctgaggcaggatgtctgatgctggagttccgggggattcctggagaggctctggagccaaagaagtaggttctaatagcagcacaggaacgccttggcagcaggatggatgaacttgctagtgacagcgtaggcaggcaggcaacatgtaaaagttttcttcttccatgtctttttatgtgcgctgccacagaaggtatggcccaaatatagggtgggtcttcccagcacaaatggtccagtcaagaaaatccctcacggttgtgcctctcagacgcaccagttttagttgattcagctgtagttacactgaaaatcaaggctggcatcataccaataagaacttcatatgttacttgcaccatcttttaattgaagagccctgcttcagacgttataaaaggatcagttaacacagtgactcttgcctggattcttagtactttggaggctgagacaggagaatcacagggagttccacattagtctaggctacatagacctgttacacaccactctgggctattgagtaagaccttgcctcaaaaaaaaacctcataaaacaaaagtgacattgtaaagttagttattctcctgatcactctcttaaagggaattttatgattgtcaacctgcattttcttaatttgtacatacaggtaatttaaaagtagtattgtagacttttttttttttcactaacaggttttaaaacctattttaattagaatatttgaaatatatgtcaagtacaggactgtcaagatggcttagcatgcaaagtccttgctatgcaaacatgatgactagtatcatccctagaacccacataaaggtaaaaggggagagccggttccacaaaactgtcctaggatccccatgtgcacccacaccaagcctgttcttgtccacacttaggactaggggacacacacatgtacacatgtacacacgtacacacaggcacatgtgcatacacactctgataaatagaattacacagtgaacctagcatccaatttcggaagttatcaacttttggttttgtctcatctgccctcacactgacctattagctgtctcaacaccagattgctttcattgtatagaagaaaaaaaaaatcagtgactttttcagatttatcatcactttaaatttgtgttttggtacggtagtttacctggatagaaacgtaacaatttacatactaaaaaaaactgtgttttcagtatatcattagcttaaaaatgcatttaattttatttgtttgtccaaaattataattttacttgtctcaaaatcaaatttacctccacatcttttccaaggaaattctgcaagagtttaataatgttcttgtcttaaatttaattattattgttttctttttaaaaaggtttctttatacttgtttaaagaactgcctttgtatctttggcgaccttctgccccagagatagctgtgattcgggactggttattgaataataatctgacagcagtgaagaacaagttggcctgtgtgatcctagaaggactgaattggggatttactgaacaggtatgccatttccgagaagtaggagcctttacatgtgtcagtttcaggaaaggatttccttgaagcagtgacatctctgggccactgtgaggccagcagattctttcagctgtatgagagtttagactcccctcctcttcctccctctcccctctggggattgtgcctagggctttgtacatgtctggaagacactctcccacttagctatatcccacaaagtatcttttctttaattctgttttgtgtcatgaatatcctctaatgaatgtattctacattaagaaaccttgtgttgcctaggagttgactcagttgctaaagtacttgctgcataaacatgagaactcaagttccatccctagtaaccacgtgaaaactgattgcccgtcctgtaagctcagcactggagagatggacacaggctgatccaccatggaacttgctgacaagtggccttcacatgtgcacacacagtcagagggagggtggagagggggagagagagcgaattcaaacacaaatcttccctttatcttagaccgtttgagggtttggttttatctctgcctagttacttcatttcctcctgattgtttctgctgccccttctgcagggagtcctgtatgccattgccagagttgttctctacagtgggccttaattacaagtttgactttgctctgatctcagctctgcgacttcctgacagggtgactcttaacaagtttcctgaactctgggcattaattgcccatctgtagattaatattaatagggcttctcatagagttattacaacaagttagagaaactgctgaagttaattcctcagtttagatgtattaatagttattactaagggcttgctatatgtcaagtctcctaagagacatgctagtgattttgactgttacagtgtcctgcctctttacccgggtcttagtaatcagaatacaaacatttggcagggacaaggggcggaaattagctctctacaactgtgcggcagcttttgttttgagcaaatcattaatgtttgcactgtgttgtatggtttgcactcatggaatggtgttgtacagatggggagactaattccagagagcccgtcatggggtgtttctgcttcctgggtgtcgtagggtttccattgttgaccaaggcaactcttataaaggcaaccatttaattgggtttgtcttacagtttcagaggttcagacaatatctttgtggtgcgaagcatggcattgtgtaggctgacttgatctgaaggcagccagaaggagaatgtcttctgccgagagccaggaggaggggcctctcctgtatcctgggcggaccttaagcatagaaccttaaagcctacagtgacacacttcctccagcaaggccacacttcctaatagtgccactccttgggccaagcataatcaaaccaccttactggggttcctctaggccttctctcagtgatgagtgagagccacaggggcatttcttcaactttacattctccagtctgcaaatggaacacctttgctttccatttcccagatgtctgcatgcagagccccctgattgtctcctgcctcctttgttagagtcatgggtcagcctctgtgaaagggccagggaacggaggttttgaaaagtgaaaagaagtcgggcagtggtggcgcacgcctttaatcccagcacttgggaggcagaggcaggaggatttctgagttcgaggccaacctggtctacagagtgagttccaggacagccagggctacacagagaaaccctgtctcaaaaaataaaaaaacaaaacaacaaaacaaaacaaaagtaaacaaacaaacaaagaaaagtgcaaagaagactatttggagatgctgtaggcttgaaaggcagtattatgcatgtttttgagtatatcattgacgatgaaacaacagacaggagtttagacttgatgcaatcctgtgtgattaagaataagcatttttgataggtggcaatgctcttaacctatcctgtaggttctttaaggagattgtagggtggggtgggcaattttagtcaaagatgcttgttgggggtttgaggctgacacatgatgtggtgcagtgtacttgctttgtagatttggggcctcccccgttgtcattttgtaatttcacttcaagggggtgcgagtttggaaacatttatcttctgaatccagtgtcctgctttactgctctgtctttgtagttgtttaaaggactatctactgactacaggatgggatagttgtggaattgtttatttgctttttttcaaaagggtacccttcatttggatcaagcattgcacacggaagtggccttactggttctcgaggcttatcagaaatacctggcacagaaaccttatactgggcttatttctgaaagtatgaaacaggtattaactctttgtctttactgagaattcaagttttcacttaaaaactgcctgggaagatgaccttatagttttgattttatttctgccagttcaagatacaaaatttaatttctatagtttctaaagatttttcttaaaaatttgtcttttattttggagatatggtctcgctgttggcccttgttggcctgaaactctttatatagaccagtttggcctcgaaattacagagatctgcctggctctgcctcccagattctgggattaaagacctgcctacaacacatggcaaaaataatctttttgtgaccatcagtgtttcagaatttggcatgagttatagagataaatggagcttacatgtacaactcaggagaattgactatcatttttaaaaattttgcagattgatagttaaattattggtggcgtgatattagtttttattgccactaaattggcgaaggatatcagcagggcccctagctttgatctgttgagcaaacagcacagtggggctgagcgtcagcctttctgttcttctgcttgagcagctggggtcaagttcacaaagcaggcaagtggggtgaggtgctgtgaggggggcattgctctactacagtgccatggaggtcagtcgaagggcagtgagtgacacgtgacagaggtgggcagatgacgtcactggcctgatgtgtatgtgattaacattgtttcaacgaacgattgtttcaggtttcctatttggccagtattgttcgatatggagagactcctgagacctcatttaaccagtgggcctggaatttaatcttgaggttaaaattgcacaaaaatgattttggaagacagaactttccagtcattcccttctgcagcacagtacctgacatgacagaatcgtccatgtttcaccctctcttgaaggctgtgaaatcaggcttgcccattggctgctatctcgctttagctgtgacagctgttggccacaggtactgtctggtgaacctccagggtaacttgtaggtaggcgttctagactcacatcttttcacaacccaatcatgagaccttcgttaaacccattgggggttaattagggttaaataatgagccttgtttaataatttataaagggagcttacaaagggagagtaatacccaaattcattccggttcatttgccaaaacaaatatgcagataaaacccatctaaatctccctcgtagaagctctaggtggggacttgtttcagccctttgtgtctacagggcttaaggttaagtagacagtggatgaatgtgacagagcgaggggacgtaggcagggcccctggtggggaggacgtgagcagaggaaagagaggaagtacccttaactgaagttgaacagagttgatggatagctgggaggacaaatttgaaaataggcaagagagggtggctgatgtagaatattctagaaggaggcgtggttatttaggcctttaggcctaacacattatacccaggagctcaggtgctagagtagttccttgcctctaagatggaaatgaccgtattgactggttgatgaggcttaagttagtcacagcactcagtacctacatactcagaacagtactggttgatgaggcttaagttactcacaacactcagtacctacatactcagaacagtgtctggcttcttgactctttagtgctagcttcccaaacttgtttcacgatttctctggatgctgtacccattctgagactgggttctttcagtacataatgattactgattcgagtgaaggagacagtaagtgtttccctttagaattggttccatagctacaattggagtagaacagaagtaatttaaagcagcctgtgggctggggctgagagtagagtagacagacagacttcagctatacacaagtattacatcgagtagacagggagtaggaatcagaaagtcacccagaatcgtcatgctaaaacattgttttaaaaaatatttttaatatgtatgtaaatttacgtatatgagtatgaatgctgtcatgtgtgtagctgcatgtgtagggaggcatgtgtgtaggtactgtgtaggccagcatgtgtgcaggtgcatgtgtaggccagcatgtgtgcaggtgcatgtgtaggccagcatgtgtgtaggtactgtgtaggccagcatgtatgtaggtactgtgtaggccagcatgtgtgcaggtgcatgtgtaggccagcatgtgtgcaggtgcatgtgtaggccagcatgtgtgtaggtactgtgtaggccagcatgtgtgtaggtgcatgtataggccagcatgtgtgcaggtgcatgtgtgtaggtactgtgtaggccagcatgtgttcaggtgcatgtgtgtaggtactgtgtaggccagcatgtgtgtaggtactgtgtaggccagcatgtgtgcaggtgcatgtatgtaggtactatgtaggccagcatgtgtgcaggtgcatgtataggccagcatgtgtgcaggtgcatgtgtgtaggtactgtgtaggccagcatgtgtgtaggtactgtgtaggccagcatgtgtgcaggtgcatgtataggccagcatgtgtgcaggtgcatgtgtgtaggtactgtgtaggccagcatgtgtgtaggtactgtgtaggccagcatgtttgatcccctggagcatgggctacagcctggccatggctgttgggaactgtctttttggaagagaaatacaagttcttaaccactccagcctttattctgttccacactttgtttttctttttagaggttccaattatagacactctaaaatacatatatataattctgtgtttttattgttagtgttgtaaatgctccttacatggtagcctttgcactattaacttttattttttggagactttttttcttcttagagtaaaagcagtataggaaagttcagaataaagaaagcggggaaaatccactgcttccactgcgcctgcactcggagcattgagatgagagccatgtctgagttgttcttcttcatctaatttatctttcctgtttgatataactgggaaaatacagtgttatgttctcatccagtgtaaccgtagaactgtttttttatgttgctcttgactttcatgctcattattattattttggtttagattgttaggagacggtcttactatgtgtagtcttggctgcctggaactctgtttagagcagcctggctttgaactcataggaatccacctgtgcctgcctcctgtgtgaccacacctggctggctgtattatttgaaaatgatgctataagattcctattgaatatatttcccctaatttactcaagtcttctgcaacagtattttgcagttgtaagaatgagaagttctatctttatatatgtcaacttctatttccccctatatttattcaaatgattacatttcaaattcaaaataaaaagaaatcttttaagtcagataaactaaaaaaagtcagtaaaatgagaaaatgcaaaatacggttcaaatatattagaaaataatacatgtacctctacaaaccgaaacaaaacaaaaaacagccaaccaaagaaacaaaataccattgtttattgttatttagtactattggtaataaatgatctcaaaggaaaagaagatgtatgtgacactgctgtctgggctgccaggctgagctcactccatggccttccctttgctgctgtgatatctaggatccttaagcaggacccctttgctcctcttcttgttcctggacatcttgtaaacctgggcgcagtgctttcaacactctcatctaactgatgaaaatatagatgagattttaagaactctgcatgtctaggttgtgagtgtagaatgtctgtgtgtgggtgagtcatgaaagttctgggaactgagacagtccagcttgtatctcattggaggactataacttgatgcatgagctgctgagtgctcacggtcccctctgtcttctccagccttgagaagttctgtgcagaaggcatcccactgctgggcgtgctggtccagtcacggcatctgagagcagtggtccatgccctagataagatcctgcctgtgttctacccttaccagtgctaccttctgaagaacgagcagtgagtatatcttgcagggagaccgccccagcgagcgtacaggacagaggatgggtgtcagctttctagagtcaattagaaggcaatggggcaatggtgtttcagcaggattttgtttgtgattttcctctgagtttgtagagaggggtacaagtattattttccaatccatttgaacatagtttgtattttattattttactgctccccccgcccatttaactgactacttttttcttaaggcttatttttacttttgatttcatgtaatttgtgtgtctgtgtgacagtatgggcacatacccagaagagggtatcagagctcccttggatctggttgtaggatgtctgatgtgtctgggaccgtacttgggtcctctgcaagagcagtcatgctcttaactgttgagccatctctccagccctcagtaatgttttttgtttgtttgttttattgcttttatttatttatttgcttagttttattttttgtatgtgtatttttaatttatttttattctttatgaggcagaaaacttatgcactctttagaatgtggttgaagagtgttagattaatgattctaattttatttgttataaaaggtatttcctacctcacttactttagaagttcttagaaagccgattgtatggaaaagaacgttgtttcttgtgaatcttgggatagtgctccttccatgcggcagccgtgtggcaatacccagcatactgttttatgtagcctacaggccgtgggcaaatgagatgagtgggaaaggggaagagatgacctgtccaggaggcaggggttgatcatctggggcttcacagagagccgagagaagggagggaggtccagtagacctgacaggcagtgtgtgcatagggataagggcagtgccagctttctaagcaagtgctttggagccagtatttctcagatttgctgctgctgagagtagctgaggtagctaaattacatatgcattcccacactcctggagatttgaccttagtagaaagaggtagggatactttttaaagattaaaattagcatcctgcacacttagggaagcttgggaactacgaacttggagacatttctgcttagaagcccgagacatggaggtgacagtgttattttaatcttccatcgccctttaacttgtctatttatatgacttggatctgttcattacagtgctatagagaagtttaatttcttttagcacacattaaatatgaaaattttatccttctaaaatccttgaaaatttatcagaatccctaaatagcactgtgttctaaaaatggaatcaatatgatgtttttctgtttcctcataagcacttatctgctggtaatgaaacgactctggaacatagctcagtgtcagagcacttgcctagcatgctcatggttctggagccatccctagacaccctctacccactgccccaaggctgctgtggcggtgtgtctgtatcccagcattttgggaggtctggagttcaagggcagtttcagcaacatataagttagaggctagctggggtccatgagaccctgtctcagacagcaagagaaaaacaaagcaagcaaacagaagcccatacagagctggtggcttctgcctgattagataaggtgtgtgaccctttgtgctcctgcaggtttttgtcgaaccttctcctcttcctacaattggacagcggtgttccccagggggtcacacagcaggtcacccacagggtggcccagcatctgacaggagccgtccatggagacaatgtgaaacttctcagcagcatgatccaggtcggggggcctcacaaatctctcaagacacttttgttctcccacagaacgtgtggtgttagctcttatggtgtgggtattccgatctcttggtacaggagggctgttagagttgggctttcgtgggagtggatagcattttgaatgtgctttaccagtgggagggagcatgggtgttaaccattcacatcacctgagttgcttctccctaggcacacatatgtgtaagcactcagccggatggagtgggtcctgtggctgtgttggagttctgggtccaggctctcataagccagcatctgtggtaccgagaacagcccattctcttcctcatggaccacttgtgtaagacagcgtttcacctgatgcaggaagattgtgtgcaaaaattgctctaccaacagcacaaggtaactgtaagacaattcgtttcagcctttggctaggtactagcggctaaaagggtcttgaaaatccataattcctggtaataatctgtgcccctccctcttaaaccaagttccatgttaacgttgtcttctctcagtagtcattgtctgatagaagagcacactcggagggcctgcagctcttagtgcatgtccctgtgtgccccggggactgctgcagctgacagtggtttccacagccttactcttagcatcctttctcagttactgtgtacacactgtcatggtgttcaagataatattttcatcccagcactcaggaggtagaggcaggcagatttctgagttcgaggccagcctgatctacaaagtgagttccaggacagccagggctacacagagaaaccctgtctcaacaaaacaaaacaaaacaaaacaaaaaagataatattttcatacatgtatatcacgtactttgctcctgactgggtcactgctgaattctaccagaacattaaagaagagctcactgcagtgccctccatactattccacagtcacaaggaggggtgctaccaaagtcattctatgagctgctgttaccctgacaccaaaaacacttaggggatgataaagaaaaccatggatgagttctctgatgaacacagaacaaagttctgagtagactgaattcatcagcaccatgaaatctgtgtttgctggaatcgtcaagtgtagaggtaactgctaatagccttgggtagagtcaaagtctctgtaagactctgttgctcgtcttctccctgctgtagaatgctttgggttaccactgtgaccggagtctgctctcttccttggtgaactggattgtggcagggaacatcacgccttccttcgtggagggcttgtccacgtccacacaggtatgaagcctcttgtgacctttgtacattttagttttgtcaccgtccttactgaggtcaggtcagggctgcgaggagaggttaagattgggtgtggggacggtggcccaggcttcagaccacttctgccatttgctagctctgtgccttgggctgctgcttctctcttcagtttcctcacagtcagatgaatataactgaagctgtatgtatagcactcagaacagaccttagtcagcgctcgctgtgctttggccttgctcctgtcagaggagacagcagcagcagcttggccattactgcataaggcctgtctgtttcgtctcttaagccagtagtagcatccttcagtctcttagccttagtctcttagtcctcctgggactgagctgacagcagttcctcactgctgcctagactgatgcccacccccacctctgcttttgtgcttcactgacactctgaggccgcctttcctgccgagctctctactaccaagtgcagttctcatcatttcccccctagatcagcagttctcaaactgtgggttgtgactcctttgaggggttaaataacccattcacagaagtcttctaagactatcaaaaaacagatattcatattacaattcataacagtaaccaaattacagttagaaagtagtaatgaaaataatgttatggctgggaatcaccacaacatgagttgtgtgcatctgtattaaagggttgcagcattaggaaggttgagaatcactgctgtagaagaatttagcatttttcattttcttgttttgtcttaattgtgtacatgtgacaagaacatagacatatattaagtacttaggaaactcaatatctgtggcttgagacctgcatgcatgcgtgtgtttttcagtgctatggatcaaatccagggacttacacatgctaggcaaatgctgtttcactgagccttaccttcagccctagcaaatacttaaactcgtgaacaggaaatactatcaattggaatgagtgacttcttttagtcccctttgtttggtgttataggtttggtttgcatggactgtgttgaacatggaatccatctttgaagaggactctcagctccgaagagttgttgaaagggaattggttataaatgcgtttagccctgaccaagctctaaaggtacagtagtagttttgcctgtgacgtaccgggtgtggcttacaccctagctgagccgttcactgtagcctgttaactcctctttgttttctactgtgaaggtttagtactgttcagcttctaaactcctcgaataactgaagggcgtgttggcttctcagagtccccaccctgtcacggaggagtatgtttctagtctgaatgtaggggttgctgttgcccttgtggcccagttgtatctggaaccccttgttaaaacttgttccaaattggattcctgatgcttgcttcagaggttttgagcctctgagcctgggctggaaccaggaaattcttttaaaaactcgtgatgctcagtctgtgaaataggccgggctaaggcttctggtgtcacaatgtcacgatggccttcaggagctgtcagagagacttggctttcaggtctcagagcctgtcaggggattcttcacttcctagaagccctattaaaatctagattttcgagactggtaaaatttgacaggtttacttttggtttctctatcatttgactgctttgttctatgaagttaaaattttatttaagtttttgctggcatatgctagtgaccctaagggctttatcatgacatttcacgtgtgcctagactgtaacttgatagcatccctcccattactcctcctcctcttcctatcctgcggatcccgtctacttcccactgctgcttcttcatcttctccttttcctcccatgacacagtgagtttaattaggtttatttacctcgctagtggctattcaactgaagggggaaaaaaacctaaaaaccccaagtttctttttctcccctccatctacaaggagggctgggccttaggaacctctcttccctccatgatagtgtgttgcacctaacaaggtgccaacatgtgcaggtgtaactgctgtgggttcaagaatgccacgtccatgtcatgacccgaaggcagtaaagtgtcttatatgcaaaggaatttcagaaatggaagagaatttagaacttttttccatttgtttgagacaggatctcaggtatcaggatttcgggctatcctctaatttacaatatagttaaagatgaccacgaaattgtgatcctcctgcctctgcctcttaatttaccacactactggaattgaacccagagcctctaagcaagtgctttcaactgagccctgtccccagtgcgttggatgactctgcacgtagattttgattctggggtgtttgaaatatcctcacagagaaaggcaggcctttctcttgctgccaaaggttaaaatgtcgggtagtaggcttagaaaatgtcttagtgtctttttcttactgaagtaaaagcagaacgtttaacttagatgaagtgacttcgactgcacttgtccggtgttgctaaggctctgctctcttgtagaaagcccaggtccagctgaagctgcccatcgtcccgtccctgcagcggctgttgatttatcgctgggcccaccaggctctggtcacaccttctgatcatccccttttgccactcatttggcagaagttcttcctcctgtatcttcatcgcccaggaccacaatatgggtatggtacccagtactgtagtaagctcctggcagctcactcccatctgtatgctgtggagtgtgaggaagtcattctcttctgatgtagctaggattctctgtggtcagtaattagacttgatcttaatgcagtttggggtatcttgtggcaatttctctttaccctcctccatccctaatatgtcaaggacagcaccggggaattgggcaaggttcagcaagagaccctctggaggtgttagggagagaagttgctccaaactggggcttcgtatgtggcctctctgaggcctactcgggagccagtgaagagtgatgatatatgcatgtcgccctggggctgtgcgtggttccactgaggagcaaggtccggcctgtccaagccgtgcactgataccaagcactgctcttcaggtcctacttaacgcccagctccaccccctttccttcactcctttgaaacgtaacgaaagatgctgacttctagttacctctattttctgttagatttcaaattcctcaaaaacaaaggctgtctttattctccatgtgtgctgatgtcctgccttggtagggtttcggtattttcaaggccactttcctgtggtagtttcccttctctctagggatacattccatggtgtcctgtggatgttggaagcctcagttggtactaaactctctacacataccttatatggtaaaattcagcttatacatttggcatagttggagataatcagcagtaactagtgatacctataagcaagcacagcagtgcactgttgtagtgcatgtgctgtctaactgtctcctgtgataacatccgtcctcgggctggcagcatggttccatgagctgtgcgagtcagcacctgaaagctctcttctggcctctatgctaatgtcatggcatgcatgcacacagacagacagacagacagacacatgtacggcttatttttagaattttctttttggtaattttgtaccatggttgactatgtataattagaactgtgaaatcagagccagttgagaggaactctgtttacaacatctctttggtttctcaacctctgaggtataacaaggcaacttgctaattgacagctgggttatgcctcttagagcattttctgctcaaagttataggtcctgcttacatttttttaaggttacctgtggatggttgtattggaagaaggttttttcaaagtccctcgcacgttaatttgttgaaagacatgaagagacgcctgacggaggtggctgacttccactatgctgccagcaaggccctccgtgttccagcagagggcagtgaagggacaccagaagggcaggctggcacccctggcttcctgacttccccagaactgcacagggaactagtgaggtaagatgggctgcctgctgctggttgtgcacagacactgcgctagagccgctagagctgctggctttgatacagagcttaggtgtgctctcagattgtcggggaacgtggtgttgacactgagtgacctggagactttgttgagtgtttgagtctgagtagtgatgccgagggctgacacccttcccattccccagtgtgaaaaaagaaggaagccaaagtagactggtcatagcaggcgtgtaacaccggagctttctaagtggctgtctacagagagtggtggccaaggaaggttctgtaatcctgacacccttaacgattcagaggcttattaatccaggtggacattcgcatgccctcagcgtttgggattttgtagggaggcaggcttggttagcacggtttctgcctgtgaatttaacttagtccaaatggttgtcctagagcaagaccacataaaacatggctgttaggtgttatcctcaattgcaagatatctcggtgagtgaagagtctcaggtctcaggcttgctttgaccctggcccctcagggtttgtctcagcccatatcctgagtgattaaagggctccttcatccctgccccatcacccgaccctttttaaaccagttttactagaaggttttctcttggaacattttaggtctttggtgctccctccctcttcctcttcagttccttgaaagtggtcatccattttcctgagtcaggagctagaagagaaaacaaaagtacacatacacacccatatgtatatgtatacatgtatatgtgtatatgtgtatatgtatatatgtgtatatatatgtgtatatatgtatatatgtgtatatgtgtatatgtgtatatgtgtatatgtgtatatgtgtatgtatatgtgtatatgtgtatatgtatatatattggaccttctctgtatctttcttctttgacatggtgtactgactatgaaggaggtaattttccatgttgttgaccagagctactgaaggctgtcttttggttgtctgtgtctgccaactatttctctatgctgttattcaaacaatgccttgaataccagtgatcttagctaatagctggctgtagtctttgaaaaagcaaaacagaaatagactgttaaaacatatttaaaaataatgacagtttgtaagcccagcttttaaaaaatattcctttttaatgagagcaaggtacacagatctacagttttatttatggtttccttgagacaagagtggccattggtgttacgctggcaagtgcctgcagttggatagaaactagctgttggtattttccaagcacgaaggctggccgtgttaggcttgaacagggttgcaaagctctgagctccgctctagggctgtggtagcagccctcctccttcatcggtagcaggactgtcggagccacattcaggtctttgcataaacaggttccaaatcctgtttgactgacgtgtgaggcttcactgtcagtttctaaggagaggcagcggctgctagacacgttcttcatggaagccttgctctactctcacgcgcttgtaccagagctcttagtaacagaagaaactccatttgtctgcatatcgtttcacattttatgtacttgtgtttttatcttttaggctctttaatgtatatgtattatggctagaagatgaaaattttcagaaaggagatacctatattccttctttaccaaagcactacgatgttcacaggctagcaaaagtgatgcagaatcagcaggtaaaactacgaaaaagccttaaaaaaacatttctttttttttgttattttcttttttttaattagatattttctttatttacatttcaaatgctctcccgaaagttccctgtaccctccccctgctctgctcccctacccacccactcccacttcttggccctggcgttcccctgtactggggcatataaagtttgcaataccaaggggcctctcttcccaatgatggccgactaggccatcttctgctacatatgcaactagagatatgagctccggggtactggttagttcatattgttgttccacctatagggttgcagaccccttcagctccttgggtgctttctctacctccttcatcgggggccctgtgttccacccaataattgactgtgagcatccacttctatatttgccaggcactggcatagcctcacaagagccagctatatcagggtcctaaaaaaagcatttctaaatccaatagtaaaactgcttactcctcggaatcgtttggcgggatattctcccttaagtgtcctgctgtaatggcctcctcacctgagccccatgcttgttctagggctttttgcaatctaaggaacatagcctttgtcctgctgtgctcttgcttatttgagctgtgatcaactaagcacttgagcacagggaatgaattccaggtcataggtcataggctcattggtgacagagagacttccttgtcagtgtctgcttcccattgtcctggagctccttgcttctggttcccctgtgttcttttaggtggtccagcagacaaaaatgtgtttaaatctttttcagccctaacttcttttttttgtttgttttttgttttttcaagacagggtttctctgtgtagccccggctgtcctggaactcactctgtagaccaggctggcctcaaactcagaaatccgcctgcctctgcctcccaagtgctgggattaaaggcgtgcgccaccactgcccggcttctttttttttttttttttttttttccagccctaacgtctagtctgagttttcctggagtttctgtagctagcctgggaggaggcagaggagcgggacagaagcccctctctctccagtgtcttctcatctaggagctgagttaggcagctgttgacttaggacctgtaaattccagttgtcttatgaatgccatcaaggctatttatttatttattaaggtgtttactttgtgtatgtgagtgttttgcctgcacgtaagtctgtgcagctaggaagtagcaggtgattgagagctgccatgtgggtgctgggaaccaaaccggggtccactgtaagagcagcgagtgcactgaacagctaagccatctctggatctgaagacttggtttgtgtttatttttacagtgactcagtccccacattccgagagcggcggatgagtctgttttaccgatgaaccttactctgtttttgtttcctttctcagtttgtccatagtgttctcacactctaagtcctgctgattttacatagcagcaaaaaatactttatggtgtagcttaatatatatttctgtccctcatatttcttataaatttacattaattttatctggcttaatttaatccagattaatgtatcattcctggattcatttattgttttgcgctgtagctcaggtgggccgtcactcactatataacccagagaccgtgaacttgcagccaatgctcttgctttaacctcctgggagctgagattacagctgtgagctgccatgtttagcttcagtatctttatttttaaaaaaacattttagagatttaatttaatttttttatttttttatttttatttttattttttatttttagtctagactataattgacctccttcatggtctttttatcacttcacaatgcatttgagacaaagcagaattgtgatgtcattgaataaaccaaagcagcatttgaaaaggttggaggctgggttgcctttgtagtatgttcactagctgtgatcgcagctctccagaagcttctaaggctatgagatggtacctcaaatgcagatacacagaacagcacacacaaagtcgtttctaccaccacatctacccatcaaaacaaaatgacagttcaaacgtgttcttaaggcatggcactgcttctttcatacatttccaaaccaaatgcagccgtagccgcagccagactcacaggtctttgaagatgcgagtgtgcacaaattcacctttcatgcaaaaatcccaaaacccagtctacaaacatgcccttcataaatcaccagagaggctcttagttgtagtactgcctgaattaaaatcgtcaggactcttttccttttacagaagtcattaattttattattttaattattttaaatttacatttatttttaagtgtatgtgtatgtgtgaggggtggtatggatccgtgtattcactgtccactgaggcagagactataatcacagctgttgtgagctgtctgacatgggtgctaggaactgagctcacatcctctgcatgaacagcacacattctaaactgctgagcaatctctgtagctcctgcatttattttaaaatcttactttaaacaattatttattttctttatgtgtcttataatgcatatagtatagtagcctagtagtgtgtatattaatatattacttaactagtatattagtacatattaatatgcatatagtgggcctgtttagcaaaattttttctagtcaggtatataggcaacaagttttgtaactactgctaagattgtggtcatttgcagttgagttcacactggtgttgggagcctcgtggaccacccaactgtaactgtgtctcactgagttaagttcatagctgtaagtgtgagcatgtgactcccctgctcatgttcaatgctttgtcctcccctaggacctgtggatggagtatgtgaatatggagcgcatacagcacgagttccaggagacagttgctctgtggacacaggccaagcttgagtcccatgccgcaccctgcagctcttcagcacagctggatttcacggaccccttgctgggtgagtcctgtgacgtcagcccctttgaaagaatgtttgaaccagttactgaaggttaaggtttccacaccttatctctataatgagaattgttctttcagagtttcctgtttgaaaaaattaataaaaattaaaaccaaatacatggtttaagttgctagggaaaaaaagatttttttctctagttatctgtcattggcccagacctaagcacacatctgtctgccgctgaaagtgaggcctccggctcgggacttatttctttttcaatgcaagtataactttaaatgtagtcaatttgggtttgcagttttaatattcagaagccgatttttttctttcttttttcttttctttctttctttttttattttctctgtatctggaacccttcccatggaatgggactgctttagattcttttttctttttctccttccttcctagcttgcttgcttgcttccctcgctcnnnnnnnnnnnnnnnnnnnnctccctccctccctccctccctccctccctcccttccttttttctttcattttgagacctggtctcactgtatacctggggctggccatagtttgctgtccagatcaggagggactcacagagatccacttgcctctggccctggagtgctgggattacaggtgtgctttcttaaaggctgcttgtttcttgcagttgatttttctagaatgactgtgcatttaaattataagttaatgtgtcaggctaggtcacaaagaccatttaacctacagagttgctgtatatgcccaattttaaaatgtggaaaattatatctgagtttatctttaacattaattatgaagttatttttacaatgtaagacatataacaaaattgtcaatcattattaacatattatgattatagtgtactaaaacattgaggaggtgatgaatggagaggcagagagagtctttgtttcagttgccccactcgacttgttagtgagataaaggaaggaaaagatcctctccgggcttgagttcacacctgttgaacggtttcatctaaggcaccgacattttctgaaattccaacatttctctccttgtttttctcccagaaatatttttgtgattgtaaattttgtatttcacatttgaaaaggtctttggagagaaacagaggaggatttaaaaactgccttcagcttaaccacatgccatacaggcagctgtaggggtcagttcttagagccactgaccagggtggatctagatacctgcaggggctgctgccaaaggcagccagagattagagaagttttctgggggaacaaagtttactttactggggctggctctgttgtggccagcagaaaaattgtgaactccttggggctggtgagaaagaaaaggaaagagaaaattctctttttcacacacacacacacacacacacacacacagagagagagagagagagagagagagagagagaaaggacgaaacaaaaggcagagtccaataatttcatacacacaaatatacatgcatgcatacagacctgcagtcagacgtatacacattcacacatagaatggatagaacaaagcatcagcgagcagactccaagtataccacacacacatacataaatacacacagttggtggatggaaggaacagtgttccaacccccattcgaacagactttacacacacacacacacacacacacacatatcccagcaaagttttttaagcagtattcaattacaatgtgatttcgttttaattttcttttagtgaatggttatgaaaaaacaatatgttttccactacctttacaagaattaacattatgtagtacaggtaaagaaaacaaattatcctaaaaaagacacccaccaatgtgcattcctaaccaagcaacttgttatagattaacaaagtgtaagcaagcaagggagttttctcagccagtttctcctacttggcaggtggcaatttgaggttacaaggaaaaggtaattattttattatttgtctttaaaagtaatcttgtaaaaatcttaaaagaatcacaaatctatacttttatataaaaatcagtcatatctaccttaaattcctattctaaacttcactgactaataatttcttctgttctgtctcatcatgcccatttccttctcctctatttctatgaggtttctcaggacagaggcactaaactccctcccttcctcggattgctcttattcattactcagataatccagctgcttaaatttgcctaggagacaccacatgcgaacattaagttcaaacttgcacatcatacaaggctgcctagtaatttaagatcacgaagcctggctcttaaaccactagattataaattctgtgtgtgttggggggagggggcaggagtgtgcttatctgcatgtgtgtgtatgttagtgctcatgcacacatgtggagtgggcaggagtgtgcttatctgcatgtgcgtgtgtgtgtgtgttagtgctcatgcacacatgtggagtgggcaggagtgtgcttatctgcatgtgcgcgcgcgcgcgtgtgtgtgtgtgtgtgtgtgtgttagtgctcatgcacacatgtggagtgggggcaggagtgtgcttatctgcatgtgtgtgtatgttagtgctcatgcacacatgtggagtgggcaggagtgtgcttatctgcatgtgcgtgtgtgtgtgtgttagtgctcatgcacacatgtggagtgggggcaggagtgggcttatctgcatgtgcgcgcgcgcgtgtgtgtgtgtgtgtgtgtgttagtgctcatgcacacatgtggaatgggggcaggagtgggcttatctgcatgtgtatgtttgtatatgttagtgctcaagcacacatgtggaagcagaggtcaaccttgagtgtaattctttatgcactttgccctttgaaacaagtctccggttgacctggagctcactgagtgggctaggatgtctgccctgcaagtcccagaggtccagaagcctctgtcttgccatccctggactacacatgtgagccactgtaagacagtggactatgccaggaaatttggtaaggccaagagggttcagaagccctggcacccacctgaggacagtagttgtttcacctactcccaaccagcttcctggcctagagcatgtgagctcaactccccacataaaggatgtaaacactggtcacttagcatagaacacaagagttctccatgctaatgagggatctagattatctagatgggctcccagggtttagccagtaagcttcccttcccttcccgcacattcctttctgcaaaaggtgtttaatctctggcccaccctgaggaagtggcatccatcttctacaaccaataaacaatatggacaaataagaactgtctctcatcaaggaccaccatggggggcactcgatttcctgtggtgactgaatgcctggaacttagggaaccccagctttgacctcagcctgcattgtttcccacccaggctggggtccccatcttaggctgtgttttcctaccctctgagaggtgtattggcccttggcacaagccgcccatcacctgatgatggcataaggtgaaatgcagcctagtgctttgtgtttagtctgcctgaacagagttcacacacccagtggtgagaggaaatgcagacccacaagctgctgggcatagtcctttctttttatctttgttcttggtattggactaataatgtttgcataaccagcacttggtaggctgatctatctcttcagctatgttcctgactaataggctacctcctagtagcctattattaggcttgtgggatttattcagaactcaaaagaaccacacatttaaccatccatttaagtgcctttagattaaggaactattctgaaagtctctaatattcttttcagaattaactgaccagggctttgtctacttagttattatcacccgttggtatccgtgactgagtaagtatggctttcctttcagctaaagcaagggttctgagtaacttagagaagcacgaggctccacatcctcctcttcttctgcaccccgtgaggcctcccgtgccactcattccctctgctgcgctgttgacacagaaggacagcacccagctcatgtgcacagacctgaatctgctgcagcagcaggccaggtaagacgtgagaccttgagaactgtactttctgcttgttgctttgtcagccgcgatgatgcggacgtgggctgccttcctcaccagcattctcgtcgctgcactcgtccaggtagtttactcggctacatgtgtgtttctgtatgtgggtgtgaacacaggaacccgagccccacaaaggccagaggtgttggattccctggagctggaattataggcagttatgtgccatctcaaatgggcgctgggacctgagcatgggacctatggaagtgcagttggaggctgtgatttaagcatgaaagcttgagctattcctgtcctagctcccaagtaatcgactaaagaccctttaagtttattaacccgctttaagcactggacctgggcacattgtcatctcttgtagcccttgaagctgtctacttcccagcttgcaggtgaagtctcactctggcttgcactgctccgtgtgtgtcctcatgacgagctccgtggtgacctgctcattatgactctcctggaccttctcctggtctttctctttttcctctctctcttcctgggactcctggctggaaaaccagtcttcctatctcctctgcctgtttataggctgatcagctcttcattaccaatcatgataattggggtgcattcttaacacaacattgacacaggagatattgacacacgggatggttcgatgatcatgacagtgctagtgtctggactgtaacccgagctctgggcacagaaatcggaaattagacatacagtgcccagaagcatcctccatcctgaggtgtgtgtgcttactgagccgtctctccagtccctgcgtcaagtcctttaatttcatgctatatggtactctcatacacagtcagtctcacatacttcctgtggggttttctgaggtcagtagttctggctaagacattttatgtttcctctcagagcactgtctgatcctgggaaggtggtgtcggaggaggcaacattcctgcgacagcgctttgctcttctccctgtggttaaaaaattgacataggtactcggtcacaggcaggagagtcatttgttgggagttcatggaacatacagaagagccaacggtttaggtttggttctcaactgcagtcttgaggagtgtacatggacaagactgttttattaacaaacaagcttagctctataaactccctgtgagtcatttatgttattgacagttttctctggctacgtttgattcaggcatttggcgcttgatgttgtacacgtacatgagtatttgtctgctaatatattactgtcatcctgtgtctcgcgtgtgcgtgactggtaatggggtattggactacaagttacagaaggttgtgagctgccatgtggatgctgggtattgatgtcgggtattgagcctaggtcctctagaaggccagcctcagctattgagagctgagcccctctctagccccagcctcctgattgctttaacataacatggggttacttttcaggagtgccactctgcgggagtcgcagcaggttgccttggatggcgagctgttggagaccatgcccaaacagtacgttaaccgggaagatcaggccaccctgcatctggagtgcagaggcagcagtggcaagaagtgccaaggagcagcagttgtaacggtccaggtgaggctcttctgtctcttcataacttagagaactttaattgagtcccttgtattggcatattgctgagaaagatccaaagaaggagaacatgtgacccgtgtcagaaacagttttagagttttatggagagttaaactacacagagagcaagctagattgtcctcaatttcccaaagctaacaaaaaggcgtatgtgtgtacagatgtagctccaggcacattctgtgacagatgtgtcctacaggagaatacttagtgaggagttccaaaaagaggcaagccatttggaaagccttggatgcttgagctgtgttgcctaagactttgctgatggtacttcggggccgttagaaggcagtggaatggagtggagttgttgtttaggtccagtgtagatgggttagtcttaggtgttctggggaatagtggtcagggttcacagcgggaggctgttgccagtgactacagggctgaggctgatggtagccacggggacaagtgagggaacagttgggcagagcttgttcatacatacatgaaaattctatcaatctgtttaaaaagttaaaatttcaactccctgtcactgttacaccagcagtgtaaagttgtttctgagatatttttagttcagaatgggaactgagcctaggctaacctgtaaagcacttaacttcacatcaagctctgtctaaacatttcacgcatcttatttgatcctcacaacaacgcagagagatgtgtattttattatcttcatttccacataggggtggacctcacccctgcagcattgtctgagctggtaaggggcattggagaaagagtgcttgctgcctgactactctggcataaaatacttcttgttagctttaagagatgagtcatttattcacttactgtgttttagaagtattcaccccttcctttttaaatccacattgaactgttctagtttttttctatattactttccatagaacactgcttcctctaaaatacctctccaaaataatcttagacttctgtattttccaatcccttgagatttattttagatttttttgttcatagttgtatgcatctaatgtaaaaggattgactcgtgagtcaggatagcttcaggctatgttctcaggttgtgttgaagtatgtcagactcctgaacactgctgtctctgaccaggtgcttctaaaagccagtttccctcagtgactttccccttagttaccagtgctgtaagaccaggtagaggtgtttaagagaggtcacgtgctaagttgggaagctgggagaaaagcctggtagcctgggcagagttagacctgggcagggagaggttgagatgcatctgctcatggtaagagggagatggtttattatgaagctcggggctttggtttctggttttttgtgttttgttttgttttgtcttgttgtttcatgatagagcttctgtgtctagctctggctagagaccagcctggcctcgggtacagagagcctcctgcctctacttcctgagtgctgagatgtaagggacaggcctcttagtctggcctgtgaaaagccagggtctgtcagtggatggtagcacccggcacagcagggtgtagcacagagccagcgctggcttgtctctttctcatagtattgtatgtatgaactccttaattgaaatttcttttataacctggtattttattaattttgagacaaaaaggtatctcttgtgaaaatctttcaaagtaactttctgccaaagggacgtcagaaagatgatagactgtgcacatacatcgtacttgcgccttcctctctcacaagaatgcagttgctaatgttacttaataaaggagggcaagagggctcactagagtaaagacaggtgagggtgacgggaggcattctgagggagcaggcacaatggtgactgtctataacccctgcacgccagaggctgaggccacacgagctgtgttaccagagaaaagagacacaagaaaggaaataggacagaggcatttgttttatgaatttgaaagagttgctgtctgtggccatagcttcattagaaatatcccggttctcgtaaagcaagtttgagttttctgctggtcactcatttgtccagtgctccgaccatagttcagttgagaaaacccagaagtgaagaattgtctccagtggcaaatttgcttgaaaatgcagatgtgccagtggaattatacatgcagagagcaaacaacttgtggtctgagacttgaagagaatttgacaggtatagaaccactcccaattgtctctgcatagtactttctggttggtctttttaggaactgaagataaaattattttttattgtgtacttattaacagctaagagcaaggaagagtgaaagggaaactcacaaccaaagagtttgggctcagtcatgggtgcacttcctagtcagtcatgggtgcacttcctagtcagtcatgggtgcacttcctagtcatggtgcacttcctagtcatgggtgcacttcctagtcatgggtgcacttcctagtcatggtgcacttcctagtcatgggtgcacttcctagtcatgggtgcacttcctagtcatggtgcacttcctagtcatgggtgcacttcctagtcatgggtgcacttcctagtcatgggtgcacttcctagtcatggtgcacttcctagtcatgggtgcacttcctagtcatggtgcacttcctagtcatgggtgcacttcctagtcatggtgcacttcctagtcatgggtgcacttcctagtcatgggtgcacttcctagtcatgggtgcacttcctagtcatggtgcacttcctagtcatgggtgcacttcctagtcatgggtgcacttcctagtcatggtgcacttcctagtcatgggtgcacttcctagtcatggtgcacttcctagtcatggtgcacttcctagtcatgggtgcacttcctagtcatgggtgcacttcctagtcatggtgcacttcctagtcatgggtgcacttcctagtcatggtgcacttcctagtcatgggtgcacttcctagttccacatctagacgtctgtctgcctacctaattttcaggtcccacatcaacctcatttttaccctccagacctgtccatcctacagttcctcctccctgctctgtgtagtccctcttccctgatctctgcagtccctcctccctgctctctgcagtccctcctccccgctctctgcagtccctcctccccgctctctgcagtccctcctccccactctctgtagtccctcctccccgctctctgcagtccctcctccccgctctctgcagtccctcctccccgctctctgcaatccctcctctgtcctgctctctaaagggaagtctagccttgtcatttctctcacatactgcagtctactcatgcttaccacctagttcctttccacacacattgctttggcctgtggagctgatttaaagttcctcccttctctttgtgtttgatgctgcttacccagtaacttaccattgttggtctgagctatcatgctagacttcctgccgacagcactctcatatggctccagtcttccaccatccttctgtctagtctcagttctgaccacacttccaggccttacacacatattagctctccaggtctactgcccttcatggcctgatttgattatcattatcattattattttattttatttttttacagaacaagggattccatttgaaaactcttgcccacttctcaagcagtctggttttagccacttagctttatccactctgtaagatacatgtggtcacactgttgctcacagccctgctgcttctgtccccacacatgcctttcttagccttcacactcacttctgcaacttgcatgagagatcttttctggtcagattaacaagccctacccctcttgtacttagtgtgttgtagtcacctgttgcttttcctctgctaggcagaattctgtgggaacagtttctttgctcatgtgtatatcatctatccatatcatgtaaggcactttctagtgcaggctgatgcctggaatagattggtggaagccattggcacacgcccgtcaggccatgtcagtgatgctgcatgtgtcatgacctctgtggctgtcagcaggttttgagtcacatgagctcaatgacatggcttcttagtgtctgtgttgccagtgcttcgcagtcgtcagcatgtgtgattgcagcatgtgtgattacagcatgtgtgattacagcatgtgtgattacagcatgtgtgattacagcatgtgtgattgcagcatgtgtgattgcagcatgtgtgattacagcatgtgtgattacagcatgtgtgattacagcatgtgtgattgcagcatgtgtgattacagcatgtgtgattgcagcatgtgtgattacagcatgtgtgattgcagcatgtgtgattacagcatgtgtgattgcagcatgtgtgattgcagcatgtgtgattacagcatgtgtgattgcagcatgtgtgattacagcatgtgtgattacagcatgtgtgattacagcatgtgtgattgcagcacgtgtgattgcagcatgtgtgattgcagcatgtgtgattacagcacgtgtgattacagcacgtgtgattgcagcacgtgtgattacagcatgtgtgattacagcatgtgtgattacagcacgtgtgattacagcacgtgtgattacagcacgtgtgattacagcacgtgtgattacagcatgtgtgattgcagcatgtgtgattacagcgtgtgtgattgcagcatgtgtgattacagcgtgtatgattacagcatgtgtgattacagcatgtgtgattacagcatgtgtgattgcagcatgtatgattacagcatgtgtgattacagcatgtgtgattacagcatgtgtgattgcagcatgtgtgattgcagcatgtgtgattgcagcatgtgtgattacagcatgtgtgattacagcatgtgtgattacagcatgtgtgattgcagcatgtgtgattacagcatgtatgattacagcatgtgtgattacagcatatgtgattacagccttcacggtgccttccctagcgtgttagggagctttgcagagagtattcggctatatgaggtggacattgaggctttccctactgagttgcactcgttctttgcttatggttatttttggcccattatgcattttaatgcttcaggtacagttcccattgatgctttctcttgaatgtctccctccttgaagagcagaagggatgttgcatgtatgctagcactgcttttcctagcctgccggaggcctaggtgtcctttgtgtactgtagagttctctgagacactttgcttacagtatctcacttcatttgtacagactgagagtgagttactaacagactttccaggtcctttccacagctgtgtccttcagttagaaatcgtcatgcatcatcacaagtcagttttcagtgttgtcattagtagtattactattgtggtgctgctgggaattggacccagaaccttatatatgtggggaaatgctctagcactgtctccgtcttcatcactgccctttttcaggcttgtgcttttcacagtcaggcctgctgcaggcctgttaactctgtttctgaagacaagcaatctctcattatagaatcaatgatcttaattgagcattttgttttagatcagtttctaaacattagttttatggaaaagtcattttacagtttaaatttttcaaatataattttaaatagtccatttacaaagattttgtattttcttgcttaataaaaatttcctggatatttccagctgtcagcaagtcttttaaattgtgtagtttatttggagtttacagaagtggaatgtgtttcttctgtggtgcgcaggcccggcagcctttcagcatcctgtgatcctccctgaggaagtggagtgatgtacaaatgggttcttttgttgttggttagtattgaagggcatatttgctagacccaggattgatttattctcaagtgaacaattttccactcctagaaataaaagcagacccaccgagggcctcgcacttctgtaaaaccgtgggaaaggacaggtttgtccaacttttctttgttttactaaagttactgaagtggagggcgcccaccatgctgctttgactccttttctccagccccttggtatcatgagctggggtccttcagttcttctcacgtctgtccttagtggtggaacgcgtgaagacttatgcaacattggtgagacttacataaccaagttatcgtgaaagggaaaataggtttgcttgaagatgtgctgtggggaacagacaggaccagtgctctttaagactttgaatgtagccttcgtgagggcttcatttcaacatgttgatgaagtagagtaacagagtttacacagggtatataatcattgccgtggcagctgcagactagttctgcgtaggtggatagacgagaaggtttaaatgccactgctccccgtgtgagtgagaaagctctgagagagaaggatttaacctgccatcactgctctgctctgctctctcaccatcctcagctgtgcttacagggtaggttcagccttaacactggcctgtccaccaggtccctccaggtcactgacctgacctgttgactgtattcttctgtcccagctcctgaaattcgtctaaaacctttccctttctgctcacctgtccctcctcaactccagcagccaggagaacactaggtgtgtttctcactttccttttgaccacgccctttctcttccctagcggagatttaataggagaaggtacagaagagactttgctgtcctggctgcctactgtagcacgcgctcggtggctgagtgctcagtgctggttcccgttgggccatcaggctggatggcagcatgcacagctttcagccagctcagtgcatgtccccgtggtgagaactggaagggctgagctagggtcggattctcttgcacatggttgccagtagaaattccagccatagtgataatcttttcattaacagtgaagaggcttttgaagatcagcctttacaagtctgtcaacctgagcatgactgtgcttaagggctgacaccaagaggatattcagaggtctcagtcttccttgtttcttgggtgttttcattcattctatgtgacatatgaaaatctagaggcaacaatcactttacagatggggtacttaacaatttttcttttccatcactgaagtaatgaaccctgtgggggcatacacatgtgaaatgtagaataaaagaatgcagcatgctcgggatgatggcttaatgggtacatcatttgctgtgcactcatggtgagccagatgcccaggacccgtgtcaatgcaaggcagatgccatagcctgccctgtttgccgtgcttcagaggcagtcacagggaatggctgcagctagctggctagcaggattagcccaattggtgtattttaggttcaagtgagagatcttatctcaactgatctaggaagacaccagccatcagactctgtgtctacatgcatttgcccttgtacctgtgtatgcttgtgcacacacaggtaaacatgactcttacatgctgtgaacatatatacataacgtgtaccatgtatatacacacatggcaaacaaagtaataatcgtttaaagaagagcacagcatattctgtgatgagatatgctatgcatctgcggtgaccttctggtctagtaactgttgccttggagttgggcccagggtgcccaatttggagcatttcctgaagatttttgctatcggcacttgtgacacagaattcttctagttaaaagccactgacaccaaccaggaagcaaccgcatatctatctttgtggtgcatcctgggcctaggatttcctatgcatctattcatatcctgaaaagaataccaaacatgcacagacaaaccacagtcagtcagaggaaggctgtgctagcaactgttgtggtagggaagacacaatgttttaaaaggatagacttttgatagattgttttcacgaagctccattaattcttatttttcacattgtcttaattagggttttactgctgtgaacaggcaccatgaccaaggcaactcttataaggacaacatttaattggggctggcttacaggttcagaggttcaatccattatcatcaaggtgggagcatggcagcatccaggcaggaatggtacaggaggagctgagagttctacatcttcatctgaaggctgctagcagaatactgactttcaggacgctagagtgatgtcttaaagctgacacgcacagtgacacacctactccagcaaggtcacatctaccccaacagggccacaccttctaatagtgccactccctgaggcaagcatatacacaccatcacacacatgtttcctaagaggcagaacgattatcaggaactaatcagttggctggttgttctttctttgcaggcaattgattgggttcatccccctcccctaccatattgctttagataaattgtgaaaataaaacagatgtcatcttctctgcaaactagcctcctttcccagtgccccttgcccgccaccaaccaagagattaagagaaaaagatgtgcaggacagagacatggcaacatcccgactgtagctccgagttctggggatctcaaggctgggcgtggagggtagccgacagtctacaggatcagggtcagtgtctgtgagtgggccgcagggaagtcaggcatgcagtaggtgggcaggatgtagctgatggtcagtgctggtcagtgagggggcagaggagtgaggagggcagtgtcaggatggggagaatggagccccgcagtgccacctttctgtgtgggtgtaggggacaccagaggacagaaggctgctgagccactggaggggaagggcacctggcactagggagaggtagacgagggtgatctgacaaagccacgggtggaaagcagagaacagggcaggagggacgagagacttgagtctgcaaggctgatgtgatcctcaaggactactcaggtgaggaaatgcccagctccctagattcttggggccagggtgaactctggagggccataagcagagtgcacttggagctgacgtgcccttgagcaaggctgcaccagactggttggtcaccctaatctgcatgagggctagtgtgtcctgtggccagtctggtggacagctcacttgtctgcttagtctgtctggctccaaggcctttgctggcctggtcctcagccccagcagagtcagctgaggatttacttttggtgtgctctctgtcgggggactctggctgcttgtctagcccaggctaaggcaacagcacccggtgcctcagcacttgggagctctgggagtcgttactgggctggtggccgtgctttgacaacctgctggctagggctggccttggctggatcctgtcaaagctgcaactgtccttgtctatcctgagtcagattcttatctctcaattcgatggcctatgtttgaaaactcttgtgtcttatttcttattgttgtgtgtgccttgatctccgagagtcaagcgtggaaggatgtcttggggaggccttctgcctgctgctcctgctctaggatcttgggaatgcagcggcgatacccttgggctggggggctgtgctgctttatcttgcattgcttggtgtggcaagaaggagtggcatctttgacattcttacgctgtggtagagaccttgtggatgctggtgtctgggtgtctgtcaggagtgtggtggctgaaaatgaaggtgcaggttgttaccgatcatttaggacatggcactactggcattataggcaaggttgacagggagggagctgtgttataggatgctgacggcggcagcttgtgcaggtccccgcagtgcacagccttggtgtgctgaaggatggtgatgatgtagcctgccacagttcccccaggtcactcatgggatctgtgttaaggtctctagtgctggtcttgcagcaaaccctagaaccaaatgaagcccagcatggtgtgcttggttgtaaacttgctgtatagtcagggatgacttgagctgatcctgggattataggtgtgcacccactatgcccagtttatacagtgctggaagttttgtctttcctaggcaaaccatggtattataatccctagcccttctcttaaagaacaccaactcccttgtgtgttaatcacacacacacacacacacacacacacacacacacacacacaccccaaccttaaccctttgttttctccatctagaacatagacaaagcaaattttcaggctacatgtgtgcctagcctaaagaggaagatacagatgctaatagcaaaacatctgtcattttaaaacaaaaatacacacaattataaagcaacaaaataagatacaatacaggaaagtggggtagtaagtggggcagtgggcactgctgtgagggtgtgagagtaggcgtaagagtgcaggcgtgaagcagctggtgaggagttgtgtgtaattctcagttcctgggacaaagtcaagcacttaaagggactgaacatggatgtgagagtcagccacaactgtcagagaatagccgagagtgccggggcggggtgatgatgatagaaatagttattacctttaagtgttatctagttccttgtatgcgcatgatatgaggacaacctcaagtgacatcccccgtgctcttttgagacaggatctctcactggctggtgcttaccaagttaagcctactgggaggactccggatctatgtgtgcagaccaccatgctgctcttgggtactagggtttgcacccaggtcctcacttcatggcaagcatgtcaccacccagggcatctcccagactaccagtggatccagtcctttaaagaggctccaagcctccctcgggaacaggctgttaattaattgcaatatgatgcctgtggttaactgtatccaggagagcatgttgatcctggaccgtgtgagactctgacctgtcacagccctctgtcccaacactctcctctctccagagggagaccaagagagaagagagagacagagagagaaaagaagaaaagaaagaaaaggaaaggcctcagcgagggaagatgttatatgctggttctgtgtttgatgggatttgaacaagtgaaacataagaaaaataggatttgttctgtcagatattcttaaccattgataagttattcattaccgtatcaagttataagcaactagatagacataagctttggtatttttgtaagcaaatgcatttaagccaggtgtggtggcacatgtctgaagtccaagcacttgggagatagaggcaagagaatcaggaattcaaggtctgcctgggctaaatagtgagttttaggccagcctgtgttatgcgagaccttatacgacacatacatgacaatagaaaaattatatttaatctcaatttgattctacataaaaaatgaattctttaataattcccctgttctaagtgatggggattgaatgtagagctgtgtgtattaggcaagtgctcatatcaccgagagctacatttttatccctcactttaggactgtcaagggctggttgtagtagatcatacctctaaccctagcacttgggaggctgaggcggcaggattgtcatgagttttcggctagcctgggctataagaccatttcaaaaaaacaaaaacaaagcaaacaataataggagaaagtctgctgattccttgaattgttgttagtttgaaggcatgaacaagaatgaagccgtaagccagcagatccatgttctgcagaaagaagtgaggcagctccaagcggaagctgctcagcccccggcactgaatgttgtggaggccgctgtgcatgcagaaaacctgatcacgtgagtcctgtggctgccatttcaaagctggctttgctgtggatggtaatcatgcatgttaccttcctcttccctgcctccctcctccagtcattagtatggaaatcagcaagctagggcctttgggtcccgtctggctagctttactggaggaaagccacctctgtctctcataaggctatgacttaggcgcttcaacagcagatgtgactttgtgatgcttgctttatggcccacaaacctaagtttgcaaaccgtggaactgtgagatgatcttgtgcattggaactcagtgatgggggtttccctggagtcaactcagattgtaaaataaagctcacaaccactgcttacagggatgaggtctctctaacttgcatgtgaccattgtgttttttctgagagctcttggcatatagtcgcctttcctaaagccagctggacaaagctgggaaggaagtgatcttaattgaacattactctactttgtggcaagccacagatcccttcagcagatggggtgggtgtgnnnnnnnnnnnnnnnnnnnnagcaatgaaagaatatcttaggaaaaaatgtagaggtatttgtttcatgtgtatgagtgtttttcctgcatgtttgtacttgtaccacttgtgtgcctggtgttcatctcaccctcaggcatattctagatttgaaaatatatatagagatcaacatacttgtcttttaaaatatacaaaagttaagtaactgaattccatacagcatatgaaaactttaataaatgccaaaatggtaattgttcttataataacagctgacttttattttctctagggaagtataaaagcattgctgtgtctctaaagtgaattcttaggtaattgagagatgcatatttaccacatgtaatattttaaggctctggagactcctacaggtactgcctgaggagtataggaagtcaaagagacgtttgagaatatggattctttactgcagacaaataattgtgcccatgttttcccacagggccttagtgaacacttataagttacagcctacacctggagttcagaaacttggcattagccttttctttactgttgtggaccatgtcagcgatgagacccagcgccatcctcctacaaggcagttcttcacttcatgcatcgagatcttgggacaggtaaggctgttagtcccggctgtcatgtgtggacagacagcgaatccccacaggatcttgactgcctacagtcagaagcctcttgagaactgttggcttccgtggatgtcggtagaatttttagcatagaatgttgcttcttccacaagagagaataagttattcatatttaaaaggctagggagacattagattttggcatagattgttggtattattaacaattacattgttaaagtttctttatcatttgcaaaatagtttccaattaatttttaaagtttgtcctcactctgactctgtatagttgataccattcccatgatattccttgtcgaatgaatcctagtggcatagcctgtaattctgctacttaggatcccaagttcaaggcctgcctaaggctacagaataagttcaagttcaacatggacaacttagtaagacactgcctcaaaaaagttattggtcaacaaacaaacccccaaaaaggggggtcacaggtcagtggtaaagtacttgcccagcatgtgtgacagacttaagttcagccccagtattgctgtttatttaaaacatttcaaagtctgtattgcatgtgtgtctgtgtctgtgtgtgtgtgtgtctgtgtgtgtgtgtgtgtgagtgtgtgtgtgtgcatgaaggctagagcttgatcactttctgacttgagacaagttctatcactgactctcaagttaggctggtcatcttgtgatttcatgtctccacccccagcctctgtcagtctcaggcgcacttgtgtagccgctacatttggcacttcctgtggatgctaggattagacacggggtctcaggcctgcgcagcctgcattcctttcccaagctgtttcccgagctcgctgcagctcaagttctttctaattatgtgccttttgatgtgcttattggtagtgtgtgtgtgtgtgtgtgtgtgtgtgtgcgcatatgtgagtatgtgagtgtgtgtgagtgtgtatatgtgtgtgtatgtaagtgtgtgtgtatatgtgagagtgagtgagtgagtgtgtgagtgtgtgtgtatatgtgagagtgtgtgtgtgagtgtgtgtgcatatgtgagtgagtgtgtgagtgtctgtgtgtgagtgtgtgtgctgattattttcctttgtagattttgggttttgattgaaagagttctttggatggattttagctagtgcttagaaaacaatatatttttctagttcagttttctttcattttatgattcttttgtctcactgaagttaaaattttaatatagccataccatgagccctgcctattgttacttttgttgtgatcaacattagcaaaaccttcctaaccctgtgctgcttagtcacttagattctagtgcattttagcctttgagccacattaatttattattttcattattactattattattattattgagacagggtctcactttttagttctgtataacaatgaattcactatgtagaccaggctgttctaaaactcacagagatcctcctgcctctgcttccctactgccaggattaaaggtacattatttgtgatatctttttattttatatttttgtttataaaaaaactatttcactttatttagtacccttgaagactgactgcttaagataagaggaaaggggaaattgagcgaccacccctcttttatctcaccaggtgtttgttagcggcactaagtccgagtgcaggaagctgctccagaccatcctgaagaacaggcggctctgctcgctgctggctcctttcttcacgcccaatgctgcgcccgccgagttcatccagctgtatgagagagtggtgacttgtctgcgcgaggacaacagcgacgtgatcttcatgctgctcaccaaggtgctcgctcatggtcgcctgggcagcgtcagaaacggctgccgcctcctgggccacagagccacggagattggtcatgagtcccgtacatactgcatgactttaccagcctcccctctaagggaaggacatggctgtactgtatagacagtctcattgcacatagtgtgactccccaaaggatcacatcccaggctttctttaaaagcttagttcagtcatgaaatattcctaataggagtttaataatccttttaaacttaattatcttgaatctgtaactatgtttgtctgatctgcgagttataatgtgtcagactcgtgttttgaataagcccagtctacgtgagcttcccttgtcccctttttaagtagcagactctgagagcacgcagtgacttaagtagtggagactgtcagctctgcttcagatctgcgtccatgatgccgatgaagcagtgggactcgggcacttcttagggctaagagactgacagcagtccatagcagaggcgaatatattttatagtacagaaaattgggagattccagcagtctgaagttttataagcttaggtaggtaactgtgtcagcagaatcatggctgctacataagctcttagtgctgcttgcttggctctgacactgtcacgggagggaccaggcctcagagggaccgtctgggaagaaagtgtagaattgtacaaacagagtggaattgtacatccaaggtgaattggtggtcagtggagggtttctgttcttgttttgttttgtttgcagtgctaggtgtcaaacctagggctgtgaacggtcaaggtgagtgttgtacttctgatctcggccttaccccaccccgaggaaaggttgacgctgaggaggtggaggctctgatggttttccctccgagctcagggagcgagtggtgacgatggcttcgtggtgcccgtcgctcctctccacgcacattgtagttgctgtgtagtggacaggtgctgctaggccgtctttggttttaaaatttgcacagacctctctgctgcatctaatttttgaacataaatgaaatggcttcttgtttctgtttctttttagtttgatattcagcagtggttaaacagcactaagccccctctgtctgaccgcaccaggctcctggagtccattcacttggcactcactgcctggggccttgaaccagaggaagatattctgatgccatttaatcttttctgcaagcactggactcacctcctactctaccagttccctgaccagtacagtgatgtcctcaggctgctggtgcagagtaagtgtcttcatgcggtcatgatggagaaggcctcagtgagcagtagatagcacagtcaccactccacgggcgccatctagacgtgttaagatgaggccagagggatggctcagcaggtagtgcttgccactcaagcctgatgaccagcgatcagttcctagaaaccatggtgaaaggagacacgcacgcacgcgtgtacacacacacacacacacacacacacacacacaccacactcacattaataaaatttctcaatcactgtaggagggtggagtcacccctgccctcaccttccagtccagcggcttcagtggcttcagcagcgctcactcccacttaagtcacttttgttgtctctttactttgatcttataactcggatccctgaaaatttggtttggaccatcattgtcatcatcgtcaccgtcactgtaaccaccaccaccactttgtaaagtacacatgttttttgattcaagttgtaaaagtgatttgggaaaaacagacctgctgtctctctttctccaggctctgccgagcagctgctgagtcccgagtgctggaaagccactttgagagccctgggctgttatgccccaagcagccagcagggggcggcgtctgtggagagctctgggcttcacagtgcctcccgtgttctcctgtcagacaagcaggtgtgtggcttttgctctgacagttgtgtgttcttttccatttccctcgctgtgaagttttaagcaattggaacacatttaaaagctggtgtttttgttttctgttttgtgtgtgtttatgtaagagctccacggttttctttcacttttgcttccactgtcccttgtctagactgcttttctcttgtgttcctgcatgtagttctatccatatctgaacagagcaacaccagcattccccctgtagaaaccttctgtcccacctaaggccatctaattcatccctgagaccacccagggtcccacagaacccttcaatcttaccagctttatctgtggtggtgtcacataagaacataactggagacaggtacggtggcgcacagcgctgcagtagtagatcaggaggctcaagccttttgagttggagaccagcttggcttgcctgtgagacctcaccacctaaaccaaagaagtaaataaaaacaacctcaaaaataaggaaaatgtgacaatttatttgaaatagaagttccattgctttagggttttcaacctactttttgtttttttctgtctttttgtagttctatcaaaaccctgtattccctttgcagtctgtcacggcactgtgctataaggcttgagggcctggcttaggggtgggtactttcctgctgttcgtggttctcaggttcatctccagcaacagaaggaagagagggagtggggaagagtgccactctccagcagacagtcagtgagcaggtttggtcggccatctcttctaggtaatggagacggtacagtggctttctgacttcttttataagttgcggctctccaagttggactttaaaagctttggattattctcaaagtggagtccttacatggctgatgtgaagacatttctgggataccttgtgaaaaggctgactgacttagaaatagcctccttgtctcaggacccaaccgccagcagcaaagaaggtagtgtgtgttgagtgtgtggagaagcgctgccttctgtagaaggggctggaggtagagcgtcaagagattcctctcaaatgtcaaggaaatgaaataggaacatgtggtacaggggtgagcccgtatactcaccatacctacaatagttcacagtgaatagaagatgcttgctgtagcttgtctgggccctgccttggtggggtgggggtgtggcgcaaagaggtgtgtatctgttgtccacccctcttcctgacatttagctagtcatcattatggtctgaatagaaagcatttatcttggaaaatgtacattatgtaattatctatgtgttataagaattaaactcaggtcattgtaacaaatgaagagagaagcatgcgtgctgcactaactgtacagtgtctgtaccagcagaggcagcacagaccgggaggagcaggtctgcacacatttagggtagagtgcaacagtgtaaccgatggccagagtcacagacagggaggagcaggtctgcacacatttagggtagagtgcaacagtgtaaccgatggccagagtcacagacagggaggagcaggtctgcacacatttagggtagagtgcaacagtgtaaccgatggccagagtcacagacagggaggagcaggtctgcacacatttagggtagagtgcaacagtgtaaccgatggccagagtcacagacagggaggagcaggtctgcacacatttagggtagagtgcaacagtgtaaccgatggccagagtcacagacagggaggagcaggtctgcacacatttagggtagagtgtaacagtgtaacccatggccagagtcacagacagggaggagcaggtcggcacacatttagggtagagtgtaacagtgtaaccgatggccagagtcacagacagggaggagcaggtctgcacacatttagggtagagtgtaacagtgtaacccatggccagagtcacagacagggaggagcaggtctgcacacatttagggtagagtgtaacagtgtaacccatggccagagtcacagacagggaggagcaggtctgcacacatttagggtagagtgcaacagtgtaaccgatggccagagtcacagacagggaggagcaggtctgcacacatttagggtagagtgtaacagtgtaaccgatggccagagtcacagacagggaggagcaggtctgcacacatttagggtagagtgcaacagtgtaaccgatggccagagtcacagacagggaggagcaggtctgcacacatttagggtagagtgtaacagtgtaaccgatggccagagtgagctccttacgcctgtcccgcttgtgctgtttcagtgctgaggtccctgcacgcgcagatcatccagctctttaagccctggatcctggttttagaggacgcggaaaggtaaagggttctgtgcactcagatgactttttgaagtctatttacttaaagtcctaatgatacttaatataggtcgtgatgatttcacagattgaattttaatgtagtgacatataaattgataaataaagtcaagacattttaatttatgtaattcatttgggtaattagtgttgttatcttaatattcattttggagcaaagtgaaacactaatttccagttttccacagtaaggaagttgaatgtgtttgtatacttaaaaaaaatgttctttttttttttttttctctataaagtagctttataaatattggtctcagcattttctgtgaacttagctatttttggaattaagtaatatatcaaattaatgggttgggaatgaatctgtagtcatgtaactctgcagttaaataaaagcattgcttcacaagcgtgtagaatatatagagccataaagacgctatcagcggtgctgcgggcaactgctctataaacttatcaaataagctagatgaacctaggtctatagaaatgacagcagggcaaatgccatgttttataaagtgtcctttgaaacattaatgtcttactcaagtctcctagctggttcatgattgcccaagtggggcctgacttcaggtcattgtgtccaggttctgtgttacccaggagcacacgagagaaacctgggctgtggagctttgcttttcctggaagacggtctttgaatacaacgttagcttcagagctgtatagggactggcttcgtaataggtttgacagtttgttaatttctacaaattatggagcttattgatattgaactttctagatgcgaggcagggttttatataaaggagttctttgttagggctagatggctcagtagttaagaatgctcgcttctcttgcagaaaactggagttcagttcttaacacctatgtcaggtggctcagagacacctgtaactccagctccagggagtctgatgtcctctttttggtcaaatgtgtgtgcatgtacaagcatggaggcgcacatacaaacacaggaaaaaagttctttggttacctcttgtggtaaatttaagtcatttgtttgttaacatgaattttatttcatttttgttcatgatctgagtagaggtaaattattgttggcttggcaaaatggcacagtgtgttcagaaaggtgcttgcctctgagcttgaagccctaagtttagtcccccgagctcacatgtagaaagagagagcctacaagctgttctgtgtcctccatgagcacacttgtaggtgttggtggtgctggcccagagggagaggagggagaagcagctggcggctgctgttgcgcttggagctttgaagggcaccaagtgtactttggactccatagctagcaccttggacaactactggtctgagacctaacgctgccctgtgcagtttcatttctgagcatgtttttcttttcctctacagtagccaccagcgacattacccgtggctggagagtgacactgcggtggcctccagcatcgtgcagctcttctctgactgtgtcggctcattgcacacgagttttaaaggtaggaaggtgtcatgggtgcctgcttcctgtgcttcctcttcactgtcactgggagacaaagaagcagacaggagacaggcctctgctccagtcttttacgagaggtttccgagttccacagatagtccattgactattgcatactaccagctatactctagaacatcctcactggtttccataacaacaggactaattggtactctaacccagtaagacatggaggttcttttccttgctgtttcccacttaccttcctattcccttcttcatgtgcccacatgcttacaccttcgtgtagatatgtggaggtctgtgttgactatctgcctctgtcattttctactttttgtctgtaagacagggaccctgactgaagttgtctgtgttggttggactgtctggctagccagctgcacaggcggctgggagcagctctgggtcgcaggcacacactgccctcacctccctttctgtgtgttgtgaatctcagctcaggttctgtgcttgcacagcagcctcactgactgagctgccttctcagctcccatctttttactgcgaggaatcctagggctggagagatggctcaggggttcagacactgctgctcttcagaggacctgggctcaaactgcagcactcccattatggctcccagccatctgttgagtttagttccagggaatctaacacctctttcttacctctgtggcggccactgcacacatgcagtgcatagacatgctagacaaacacctagccacataaaatacaaatgaattaaaaagccagtgtgaagtgaattcatcatgatttaattttattttgtgtgtgtgtgtgtgtgtgtgtgtgtgtgtgtgtgtgtgtgtgtgtgtgagggggggggttggttgattgatgtgtctggaggagaacttgtggaaggtggaagttggctcttcctcccaccctgtggctccaggaacccacctctggctgccatgctcacctttagcacctttagctgctgagccaccttgcctgctccccgtcctggctaattttgcatttctctgatagtcggtgatactgagcattttttatgcacttgtgggtcattttctgttttgtggttttttttttgaaatgttggaatattttctttggaggagttctttcaagatactaaatgaagaaagaagcactaatggggtgagattggagacctgtgagggcagcatgctgtagacatggacttgggttaaaagccgtttagaagttttgaagaaaatactaatcactttgagaatcttagacttttaagctcatgtttgagaatcttagacttttaagctcatgtttgtgttttgtgttagcatttctttttcttccttctccctttttttgagctgtattttcttttaacattgtagacaggctgttgccaggcgatgagggagccctgcggttgcacctgctgcactactgtgaaacatgcacagcacccaagatgccggagttcattctctatgccttccacagtgcataccagagactggagtggaaggacttgcaccctgaccagaggctcatggaggccttctttaaggttcgacccttgatggtatctcctcttcagtgtgggcacatttctgtgtcacattctggtacacattgtggcaagcagcagcctgtgggcattctgttgctgtgttgatggatgattgagaacttctgttaagctgattttaaaacccagaggaaggactttggctctgctaggttgttatcatctagctttagaaataactttgtgtgagcccctgggttaccaaccgaagcttgctcaatcctgggtagtgattagttttctagggtaatattgttaaaactaatagtgagtgtcatatgacagaaaatgtgaatctgtctgtaagcaaacttcaagttgatctcagcagttgtgcaactgaataattagattgtaagagataaagtcattgtggcaatcaatgacacatcatgatcaaagaaggacctagaataatctgaaggacgggccaagcaatgtgcacgtgagcctttgccacagacggccacagttcctggggcctctggtgagttcagcagcgggcagaggtggtgcctcccttcctcctgggaacccgaggggaagtggcttgcacggtcactccaccccatctgctcattactcgtcagttggtttgtgttttctccttaatgtcatacttattaccgttgagtcatttcagggctttagttgatacagatctgtaattatttatgatgatcactaagacacaataatttacaatgattagtaaaatgtactggagccttccagcatttcttgtgaagccctacctagtactgctcttggcagccactcttctgcagccgagtgccaaggaagctggtcctgttgagtagctgaggcacaggtcctgagtatatcatgaacatgtgagagaaccttggcttaatggcctgtaaggcagcatttaactgaggggatgctgtggaaggccaattaaactgtgggtagtctgtcaaggaatgatgtagattctgtctctaagagtttactctaaggattagatagctttgacctgcccagaagctgggagtctctaaattgcaaggctgatggcaaggctagagaacagattataaaaggataaagaattgtcttccaagagggagcagatgtgagtcaccaccagactctactctcattgttttataagtagaatggagcttttaatattaatcctcaaagagaaatttatggcgctatatttattaagataaacaaatgagaaatactgaagtaggccataaaataaggctttccaattgattaggtacttatagtacaccccctgcttcagtccatacctgggaagtcagtggcttgggtgtgccagccaagcaggggttctgagattggagaactgctgactagcagagctctgcttgccctgttccagttcacctgagatcccaacagtcgcaggtccatgggctcggtgtcaggggcttcctccgggtgggggttgggtcagaaggtcactcttctgtttagagttctagagcaggcagtgcagtaccaatgtgcaagctcaggaatgcacgtgtgtgcttgccctgagaggaagtgctgaccttaaattcagtttacataagagagattatcagcgaatatttaccatctgaggaaaaatatgtataaaaatgtgtaaaaatgggaaatacttcccataataatgtcattatttccattttcaagatctattaaacaagtaatgttgtttgttcacttcaggtggaacgtggaagccccaagagttgtttcttgtttttggggtctgtactttgcagagtcaactgggttagtgtgctgtctgacgcctggaatcccagcccccttccggaaacccagagcatggctgtctgcctccttttcatgatggttttactagcaaaggaggctcagctcgttgacgagccagtaagtctgggggtctgggatgagctttggcttcttagcatgtcgttgtctcctgatgatcttttcagatgtttccctaactcggcacataagctggaccctcacctgcttgctcgctttcctggatagctcagtctagttctaaataatcaagggagcctcactgaattagaattatgtgttaatttttagttcagactgctgcgtttttcttggagtcggtgttgctgtgtactacagagctcctctgagttcttgtcgatcttacctgtgacctttgctgtgaccttggctgtcgccttcccttggtgccaacttgagaacctccttccttggttccttttctgttctcaccatagctggctgttctccccacagaatcactagagacatatatttgtagggaaatgaatttaaaacaacttgtcttccattctcaggattcacctttactgagtctccttggacagacaagctcactctcatggcatcttgtggaccttgtgtcataccagagtgtgttgggttatttcagcagtcattacccaccatccgtcgtcctggcaaatgactgttcctcggaactgatagtgaagctgttaaaagtgtctgcagggctttctgctcatgctgacggccggaagcacgtggtaagttagaaatgtcgtttaaaagttgggacattatttaggctcagaagtcagatatgtgcaaggatggttagccatgactccgtgactccctccgcagaggaagctggggtgctgctgtgtgctcacagcctcctgggtcctttgtccaacttctcatttaagtgcaaggacccaggctgaccagaggtcaggggggtcggaaacagcaggtggcgagctttaaaatcacagtgtcttagcctgcagagtggcatagccacagacacatcttttggggcatctagtagagtcctctgtggcttcctgagctgtctgtcctctactgcccaagtgccatgctgtggaccttgggaatatccagctaacatttcctgctcagattcatttgaccgattctgccaccctccttttttttttttttttttttttttgttaggacatagttccaaaatgccaggctttcactcatcagatggttcagtttctcagtgccttggaacagactggaaaaatcaccttcccagcactggagcgggaaatatctaagctgttggatgacatcattatctttaacccacccggtaagtgaccagtggaaaccatagactcatgtagacaatgattccttctctgtcttagactctgtgagctgaggaggacagtcaaggcctcatattcctgatccagaccagcagtgatccagacgtcagcgatttggacagcagggcagcccctgggggaggcggcagggttaaaactggggagaggttgactctggcagatgcacattgaagtgacctgggctgaagtgaaagctgcataaacacaataaaagatgtaggtgacaggagatctgcgggtcagctgttatgtaggaattcagagtcacctgctggcttgttaagacctttaatatggagcgctttgtcactagccagtgagtagggtagacagcctgacagttatgtctactgaaagtaaccaagaatgctcaataaaatatataaatgtttgtgtgtatgtatgtgtgtttgtgtgtgtgtgtgtataattaatttttggtagaatggtaaaatgataaggaagtttaaggctggaaatgaagagtgagagagacctgatgaaggtggacagggcacccaggaggggctaaagcagcagtccccaccctgtggggcagcccctttggggatcatataaccttctcacagaggtcacatatcagacatcatgcatatcagatatttacagtatgagtgataacagtagcaaaatgacagttatgaggtggcaatgaaataattttacagttggggtcagcacaccatgaggaagtgtgttatggggccgcagcattagaagattgagagacccaggacctgtctgacatggaagcctaaggagagcccgtgtaagcacatggaagctcaaggcaccctcctgtgtgagaatgggcggtgtgagctcatcctattgttcttgaagagttcatgtgagaaaaccaaaaaagtcagtcagtgctgtgggagctagggttggtcacaggtaaccatgaaggctgaggactagtgatgccctatctaggaagggtgtgctggagagacctggaagagtaatggagtcgagtctggcgagggcgtgctgcagagttggcactaataatcatgtgtggctggtgggaggttatctgctagccttgatcatgagtaggaaggctgagacaggcttggatctgtctgtaagaaggttcatcataaatcaaaattgcttctgccattcatctgaaactaaggtgaggcttttattatcaagagtatttatgctcagaaatgcatgaaaaacgtgtgcagtggttatcactctcaagtgtgtttctttgtttttgttttaaagttttgacttgagatagttttttccagtaacatcaggttagggtccattttacactgtacatagtgaatctgcgtcagtgggcaggacttccagagctcttagcgttctcacagacatgaacaccaagtcctgtcatgaggaataagcaagcttcagttctagtctcttaccttattcaagatagctaaaaataattagccaaaagcaatgcttgttcagtcagtgagacacattttctgttttgaaagtgatgtcctccactcctgtgacctctggccagtgttcttgtaaaatgacatgaaaacttgctgttttctcctgcgtgcgtctgtttcctcctctttgtctgtctactgtgggtggttacctttctctggtagctcacgtagagaagtcaggtatttagtgctgttccttcctactgtgggatttgatcttttcgcttcggtgcagttagtgttttgattaatgtgtcatgggcggctcttttctggttccacttggtgttctgtaggcttcgtgtaccttgataagaaatctctttctttagattagggaaattttgttctataattttgataatattttcctagccttttacctcagttggttccccccaccccgcccccttcttcctctatacttaattagtcacaggtttggtattttcatagtggcctagatttcctggattttctttctttctcttttccttttttcctttttttaggtttaacattttctttgactgagctatccatttcttcaatgttttcttcaagacctgcaattctctcttccatgttgtttaacctgttgcggaggtttccctctgagctttgtgtgaattcttcagcctcagctttccacttcctgttagttatagtctggggtctcctggtgattcggtttttttgttaagttctgctgtcatgctgtgaattgttttcattattccagtcaactgtttatgttttcagtcttcactaagaaattgatcatgtctctaaggctcttttggagtttttgtcctgtgtgtcagctacattgctttgttcaggctctgttgcaataggactgttggcttctggaggatagatcttgtcttggctcttcatgtttgtgttttgtgctgggatctgggtgttggaagttaagatgcttgcggtgtttctcgctgtggctgtctgctactctccgtgctggccatgtgctttgttctttgcttaccattgcccactcgggatctcagccaagtgtggtgactgtggggtccctggtagagagagttcctgcgagtccgtgggtgtgatacagtggagctagtctagaagagaaggaagcaggaaagccggaaatcgctggagggatcagccagggtctgcagagaatccccaggagaaggagctgaggtggaaggaggggctcctgtcaggctgcagcagcctaagaatgagtctggagaaacagactagaggacaggaagggtgacagggagaggagcttccctgagccaccgcccagtgtggccactgggggcctcatggtgagagcacttctgtgggctggcaggtatcagaaaggaatggagaggggctgctggaagaaacccccatgtctcctcactaaggtgtctttctcccacttcccactcagggcacttgtagaagtttctgatttccttcttacagttgtttatgtgttacactccatccataaaatccaggcgtcaccaggcccttcctgctagtcctttgcagtcagacactaggactgtgaagaccctgggagcagccgagataagaactgttgttctcatgaccactttcctgcccctgtcccacaggtctgagtgtgtgtgtctttgcctttagacatggacagccagacccgccacatggccctcagcagcttctttgtggaagtcctgatgatgatgaacaatgcggctgttccaacagcagagttccttgctgtcagtattcggacctggattggccaaagagtgcatggcttgatagtgctgcccctcttaacagcagcctgccaaagcctggcgtctgtccgccacatggcggagatcaccgaagcctgcatcatggcctacttcaaggaaagtaagaggacaccatcttctgctctcattacaccggccgcttccagggacacacacacaccttacacacattcatacatacacacacatttatatatactatatatgtgatagaagtagattgttttctataaaaagctagtcaatatcacaacatgtggcccatgtcttttgggttcaattatatgtttcaagagagaaaatttctaattttttttttacattttcagagtatcagaccagccatattatgatagcaaggcaagttttaaaaaaaaatgctgtaaatcagaattcatataataatggtagtaatttctttttttttttttcttaccacttttggtgaaaggaattttcatagagatctttttatttctccttgccatgctttttagtaagattgatttattcacattttctatgtattagtgtcttacctgcatgtctttatgtgtaacacattggtgcctggtgccaaatcggccagaaggggcactggatggcttagagctgggattacagataattgtgagctgccctgtgggtactgggaagtcaaccctgctcctcaggaagaacagccacccctgagcatctcggcaggcctcctgccgtacttttaaagctgtcataaaagggacactttcccctggtccccctcctttcatcgttcctatttcctgcctccagactctggagaaggcggttaagaattgttcagaacagccctttttaagtctgatatttagatgtgtatcagagtgaggtttcaggacgtgcccataactggctgtctgcccgccctgcctcctgtggaggtgctctacgtcaccgtcacctaccttcactcctcccagcactcaggatgcaaatatatttgtgtcactaaaaaccaagatggtttccaccagaatgtgagctgtgctttagtaaggagaaatgcctgtgagagattggatttatttgttagaaaagtctaagcattgattcaagtgaaaactccttggtgctctgtagatgctaatggtcaccatataatgagaaaggtggttcagagatacacagtcctgagttccaattttttgtgacccatctctaatagagtcgcatgtggctttctggttgaagcttcacctcggactttcctggcctctatgcactctgaggaacaatgtcctccatgaggctaaagtgaaaacagtcataggcttcttgtggacatgagtgtatctgacacttcctcttggcgttctttccgtaggctccctcgatcagaacttaggatggggccccgttctggtgtcccttcaagttccccagctcaccgcgcgagactttctggaggagtgcttagccctcggtagttgtttgactctctatgtctacctgcttcagtgtctgaacagtgagcagacggtgaagaacgacatgaaaatgctcctcgtcgtcagcggctggctggagcaggtgtacccgaggtgtgtgtgcccatggctgcttcctaaccctacctgcttaacgcgagcttccgggaggcccagagcccagagcccaggggctaaaagtcagacggcctccaggggcagtagcgtgtgcttgggaaggactcagagcttgctgagctagggttttttttttttttgagagaatatatatatatatatttatctcctcacacaagtatcttgaagaaccagccttcaatgttcttatcagtaacgggtcaggtgacagagaacttgtagcccttgtctggcgtgcaaatgttccatcaatggcggctcttttttttgtttttgcttcttgttttttttttttttttcgagacagggtttctctgtgtagccctggctgtcctggagctcactctgtagaccaggctggcctcgaactcaaaaatctgcctgcctctgcctcccgagtgctgggattaaaggcgtgcgccaccacgcccagcttcaatggctgctcttatagcactgttgcttcactaatgttttgctaacatattatgcttgggttcatttttttaaaaaaattgtaatttcttaaattttgtttttatttattttgtgtgtatgtatgtgtgcgtgtctgtgtgtgcatacttgtgggtccatgtgagccatggtatgtctgtgtagcagcaggacaatttgtctgttctctgcttccaccgtgtggattctgaggctcaagttgtcaggcaagcatccctttgcctggcgtatgatttagagttatgaatgtctcccttcttcttctttttttttttttttttttttttttgagacagggtttttctgtgtagccctggctggcctcgaactcagaaatccgcctgcctctgcctcccaagtgctgggattaaaggcgtgcgccaccatgcccaaactcgaatgtgagtttttgttaaatgagtgggaaaattcttacatttcatttgctctgacccccccccccccagctctgcacaggaagaggcaaagctgtttctgtggtggcatcaaatcctgcagctgtctctgattcagttggagcagaacgactccgtcctgacagagtccgtcatccggatcctgctcatgctgcagagcaggcagagccttatggccgaggagaggctcagctctgggattctgggggcaatcgggttgggccggagatcacccttgtccaacaggtaaggaggctcctgctctgtcctctgtgggcctcagacagcagctgctgctgatagaggtgcagtgcaggcatgtagtaggacatggggggtgggtgggcttcaaagcgctcaccttagtagtctctcacctctgaccttttgttaacacccgaggttccgagtggctgcccgaagcatggctgccttcctgttggttcaggtccctgcagaagaccagattcgtctgaaacccagctctgagttacatctggctccaaaagctcagcaggtcagtgacaaagccttcaagtcgcggatttcctggtgcacctccttagaagggggtggcagctcccacctgcaccctccaggcctgcggcgctgcagtagctctgggctggttcccttggtgtgttcagctcagatcttaaactgagttttctaggtacaaggctagagcaatgaagaggcagggccagggcaagctgctctagggttcggtgctggaggatgtgacaagtgagcttcctgataccaggactggcactgcacagcacatggcccacttgacgtgagtgacagttggctgattgctgtggaaccaaggcagtagtccctgttccacaagcctgaagagtgaccgctgcagagtaaccagccaatggtagctaggagaagttagagtacacactgaacacatggctgcctacaggtccctggtctggttcctgtaacctgtgttcacctcactcactacctgactgacagggtggagtgctgtcctggagggattgctcatgctgggagggaatgctcttttaacattcgccagttaagtttactcacttcattcccctaacagccccagagcagagtgctgatgaggaaactgggagagggagggaggnnnnnnnnnnnnnnnnnnnnagggggaaggggaagagaaaagagagagggaggagcgggaagggaagagggagagggagagagagggagagagagacccggggggtgggttgggggaagaaggggacgggactctaggtaatgtgtccagttcacactgcaggaggtattagtgctagacatggccggcctgtctccaggctgcccgcctccatttcccgctctgccggatgtctgtatatggcaagagcccagggcgtgtgaggatcaaaagctaggtgtggtggcctacacctctgatcccagtactctggagcagaggcaggaggatctctgagttcgaggccagcctggttgccatagtgtttcaggacaaccagggctacatagagagaccctgcctcaaaccactgttgacgttcctgatgtcacctgaggcctcaaggctgggcagctgagcccgagtcagcgaggtttatatatggtgtagttgagaagacctcagctgctctgtggtcctctgtggacctggaacgtcagggctctgctgtgcttgtggcctgaggtcacacggcctcttctattagagctgagatgctgcttccagacataatgctgcttcctgacacgcccctgcggacttgctgccttaggtgactaatctcgggccagctgttacagtagaacatttagggactaaatgtatttttaaaaaaaacaaaaaacaaaaaaaaccccaatagcccaaacccccaaacaaacaacccaaaaaacagaaatgggggaaatatcctattttaagaagttggtttttaggccgacttggtaatttatttctcagcttctagcttatttactttactaaagaaaaccatctccctctttgtgttctgaaccaagcacatccatatgtgtgcatactgctagaggttctcagagctggggggagaggagggagagattgtcttctgactcccgcaggtgactgcgtgggcacctggcagacacagcccacagctccttggatcactatgcactgtttctctctgttctacagtgagagaagggagagaaggaagctatacagttagagagtgctttctatttttctgttgacgagggttgtgggaccatgtctcccttgggtctgctctgtctgtggggaccttggcttgtgagtgttgctgcccaacttggccaccttatcatttgctcccagcagtacttagcagctgctgtgtttgggattccactctgtttcctgtgatggtgtgtaacttaagaacaacccagtggcaagctgtgctctaccctagtgaggtgcagctggtgcctgcggttttctgttgggctctgaggagagaggggattggtatctggtggggaagagcccactgacgggcccagggaggataggaggtaatactagcctggcatggaaaggctgggaataacagcacatgagagagaaagctcgggctggagagatggctcagcggttaagagcactgactgctcttccgaaggtcctgagttcaaatcccagaaaccacatggtggcttacaaccatctgtaatgagatctgacgccctcttctggagtgtctggagacagctacagtgtacttacatataaaaaaaaagagagagagagaaggctccggaggtcagagagggtgcgtgcagcctcttccaccacctcctggttgtgtcacccaaagcctgcctccaagaccgctcctaaggaacggcatagtgatggcaagtgctgccgtgtggctgtcaggtggcacgcattctcagagtaagtcagctgtcatgtgtgtcttctaggtgctgacagctctggagtccatgacgctcagtaagcagtatgtggagtaccaggaccagatactgcatgctcttcagtttataaggcatcctggccactgccttcagaatgggaaaagcttcctggcccttcttgtcaaccgcctctatccagaagtgcattacctggacaacatccggtagtgaggccgaagccctcggagcaccgtgtcggccctgagtttacattagccgtgctgttgtgcatgtatctttcctcagtttcgccacagagctcagttctgcctggaatcgactgaggtgcagttgggaggcatcagctcgtcctggttgcacttacctcttctgtccagtggccatcttagtgtgaatgctcttccacaagtcaactgagttcccgagtacagaccactcacatttggggaatgtgcctgtcagctccctaagaacaacagatagagtttttggtatgtctgcacctctgtctccctgccttgtttaaaggtcaagactcctaatgccagatctgaccactttgggaggcgtgaagagccctcttttggaactccattgtattcttccgatgtaaaaattctgtatttctgaaatgtagggaaacacaccagctttaaagtgttatgttacagctctttgagtggagagactacactggattaattcaggagtggtagctgggcagtggtggcacacacctttaatcccagtacttgggaggcagaagcaggcagatttctgagttcgaggacagcctggtctacaaagtgagttccaggacagccagggctacagagaaaccctgtctcaaaaaaagccaaataatttattaattaagaaattcgggagtggtggcccacacctgtcctctgagcacatcggctgactgaaacaggaggatcacaaggttgaggcagcgtgaggtgtgtatcaagaacatctcagcaaacagagcaaaggagctgaattaaaatgagtcctgtgcagacatgtcacttaaccctgaccacagtggccagcacagatggtgacacatcctctggaagtgagcttgtctgaagtgatgtgacagtgtgccctatgccagctgtgttgtgcacaggtgtgtcgtctttgggagcacagaagccctgaccacagccgccagggcactggaaccctttgggtctcctcagtcacaacgttttattagccctgtctatgtggaattcccagctcttgttataagtcagggcttctgcaggccctactgtcagggacaccggggactttgtacttcttccttaggtaaatcagatggcgctcagggactcgctggagcatatgtccagagagaagggccaggtcacggcaatctgagaagtttgactttttgtgagtagctccgtgccttctgtcattgctgagtccccgttacctgtctggcacagtgctctgctccctttagatctcctgctcatgtcgctccctgtagagttcctaatttgacttctgtcagaatagtcctacttctcaaaaatgcccccaaatgggttttgcaggttcagcttaaaatacgtcttttttatgggtttaggtctagaaatatctgtgtaaaatctatgagtggccaccaagagccttgactaaagatgggatatacagctagtgggtcccttccctgcatttggaagcttgcaggaacttcttattggacagaacaagtctgcctggtagacatgtcttagaacactgataaaggacgatcctattcagtggcacaaagtatcattgtccaggaatctgtctcagccatctttatttctgcttctctctgctttccaggtctgtcatcccctctccaatagaagaaaactttagaagctgtagacagttgaaccagtggttctgtggtcaggaaacactgtttttgtgtgctttctccaaggagaaccaagttaccaatatcctagaatgtgaaatgtttgagtcatagtgtgtacagtttagagaatcaattaattttgaaagtttataatatttgtaaattttatctgtaaaaagtataaacaataaaatcaacctttgattgtaactgatgaatccga

SEQ ID NO: 183 - DNA, 8243 bp, Mus musculus
tgtcagaactttctgggccatcacggttgaagaaattaggacagaaccggaaaacttgagaagtaacccagcttgctaggctcacagatcaaagtgttgaataacccttcaggggtctttcattttatgcagtcccttgccctgctgatgtctcctgtcaaaaaccgagcggagtttatgtgccacatgaagcccagtgagtggaagccatcatcttcagggccagcatctgggaactggacacttgtagatgaagcgggggaagaggatgaagaccctgagaccagttggattctccttaatgaagacgacttggtcacccttttgtcccagtttccctttcaggagctctttcagcatcttcttgggtttaaagccaaaggtgattatttacctgaaacaacaaggccccaagagatgatgaaaatttttgcctttgccaactcattagtggagcttctggctgtgggactagacacctttaacagagcccgctacaggcagtttgtgaagcgcattggatacctgatcaggatgacccttggctatgtcagtgaccactgggctcagtatgtgagccacagcacaggcgcggggctaacaccgcagccctactccatggagaaactgcaggtggaatttgatgagctgtttctcagggctgtcctccatgtcctgaaagccaaaagacttggcatttggctgttcatgtctgagatgcccttcggcacgctgtcggtccagatgctctggaagctcttgtacctcatgcaccaggtggagagtggggacctgcagcaactctgtgcctccctgcagccggccgagtgcaagaggcgactccaagacccagaacattttgcgagctttgagaagtgtctttcttccatcaacagctcagaggagatctgtctcctcacggcctttgctcagatggctcgagccagaagaaccaatgtggatgaagacttcataaaaatcattgtcctggagatctatgaggtatcttatgtcacactgtctaccagagagactttctcaaaggttggtcgagagcttctgggagccattgcagctgttcaccctgagattatctctgtccttttggacagagtgcaggagaccattgaccaagttggaatggtttctttatacttgtttaaagaactgcctttgtatctttggcgaccttctgccccagagatagctgtgattcgggactggttattgaataataatctgacagcagtgaagaacaagttggcctgtgtgatcctagaaggactgaattggggatttactgaacagggtacccttcatttggatcaagcattgcacacggaagtggccttactggttctcgaggcttatcagaaatacctggcacagaaaccttatactgggcttatttctgaaagtatgaaacaggtttcctatttggccagtattgttcgatatggagagactcctgagacctcatttaaccagtgggcctggaatttaatcttgaggttaaaattgcacaaaaatgattttggaagacagaactttccagtcattcccttctgcagcacagtacctgacatgacagaatcgtccatgtttcaccctctcttgaaggctgtgaaatcaggcttgcccattggctgctatctcgctttagctgtgacagctgttggccacagccttgagaagttctgtgcagaaggcatcccactgctgggcgtgctggtccagtcacggcatctgagagcagtggtccatgccctagataagatcctgcctgtgttctacccttaccagtgctaccttctgaagaacgagcagtttttgtcgaaccttctcctcttcctacaattggacagcggtgttccccagggggtcacacagcaggtcacccacagggtggcccagcatctgacaggagccgtccatggagacaatgtgaaacttctcagcagcatgatccaggcacacatatgtgtaagcactcagccggatggagtgggtcctgtggctgtgttggagttctgggtccaggctctcataagccagcatctgtggtaccgagaacagcccattctcttcctcatggaccacttgtgtaagacagcgtttcacctgatgcaggaagattgtgtgcaaaaattgctctaccaacagcacaagaatgctttgggttaccactgtgaccggagtctgctctcttccttggtgaactggattgtggcagggaacatcacgccttccttcgtggagggcttgtccacgtccacacaggtttggtttgcatggactgtgttgaacatggaatccatctttgaagaggactctcagctccgaagagttgttgaaagggaattggttataaatgcgtttagccctgaccaagctctaaagaaagcccaggtccagctgaagctgcccatcgtcccgtccctgcagcggctgttgatttatcgctgggcccaccaggctctggtcacaccttctgatcatccccttttgccactcatttggcagaagttcttcctcctgtatcttcatcgcccaggaccacaatatgggttacctgtggatggttgtattggaagaaggttttttcaaagtccctcgcacgttaatttgttgaaagacatgaagagacgcctgacggaggtggctgacttccactatgctgccagcaaggccctccgtgttccagcagagggcagtgaagggacaccagaagggcaggctggcacccctggcttcctgacttccccagaactgcacagggaactagtgaggctctttaatgtatatgtattatggctagaagatgaaaattttcagaaaggagatacctatattccttctttaccaaagcactacgatgttcacaggctagcaaaagtgatgcagaatcagcaggacctgtggatggagtatgtgaatatggagcgcatacagcacgagttccaggagacagttgctctgtggacacaggccaagcttgagtcccatgccgcaccctgcagctcttcagcacagctggatttcacggaccccttgctggctaaagcaagggttctgagtaacttagagaagcacgaggctccacatcctcctcttcttctgcaccccgtgaggcctcccgtgccactcattccctctgctgcgctgttgacacagaaggacagcacccagctcatgtgcacagacctgaatctgctgcagcagcaggccaggagtgccactctgcgggagtcgcagcaggttgccttggatggcgagctgttggagaccatgcccaaacagtacgttaaccgggaagatcaggccaccctgcatctggagtgcagaggcagcagtggcaagaagtgccaaggagcagcagttgtaacggtccagtttgaaggcatgaacaagaatgaagccgtaagccagcagatccatgttctgcagaaagaagtgaggcagctccaagcggaagctgctcagcccccggcactgaatgttgtggaggccgctgtgcatgcagaaaacctgatcacggccttagtgaacacttataagttacagcctacacctggagttcagaaacttggcattagccttttctttactgttgtggaccatgtcagcgatgagacccagcgccatcctcctacaaggcagttcttcacttcatgcatcgagatcttgggacaggtgtttgttagcggcactaagtccgagtgcaggaagctgctccagaccatcctgaagaacaggcggctctgctcgctgctggctcctttcttcacgcccaatgctgcgcccgccgagttcatccagctgtatgagagagtggtgacttgtctgcgcgaggacaacagcgacgtgatcttcatgctgctcaccaagtttgatattcagcagtggttaaacagcactaagccccctctgtctgaccgcaccaggctcctggagtccattcacttggcactcactgcctggggccttgaaccagaggaagatattctgatgccatttaatcttttctgcaagcactggactcacctcctactctaccagttccctgaccagtacagtgatgtcctcaggctgctggtgcagagctctgccgagcagctgctgagtcccgagtgctggaaagccactttgagagccctgggctgttatgccccaagcagccagcagggggcggcgtctgtggagagctctgggcttcacagtgcctcccgtgttctcctgtcagacaagcaggtaatggagacggtacagtggctttctgacttcttttataagttgcggctctccaagttggactttaaaagctttggattattctcaaagtggagtccttacatggctgatgtgaagacatttctgggataccttgtgaaaaggctgactgacttagaaatagcctccttgtctcaggacccaaccgccagcagcaaagaagtgctgaggtccctgcacgcgcagatcatccagctctttaagccctggatcctggttttagaggacgcggaaagtagccaccagcgacattacccgtggctggagagtgacactgcggtggcctccagcatcgtgcagctcttctctgactgtgtcggctcattgcacacgagttttaaagacaggctgttgccaggcgatgagggagccctgcggttgcacctgctgcactactgtgaaacatgcacagcacccaagatgccggagttcattctctatgccttccacagtgcataccagagactggagtggaaggacttgcaccctgaccagaggctcatggaggccttctttaaggtggaacgtggaagccccaagagttgtttcttgtttttggggtctgtactttgcagagtcaactgggttagtgtgctgtctgacgcctggaatcccagcccccttccggaaacccagagcatggctgtctgcctccttttcatgatggttttactagcaaaggaggctcagctcgttgacgagccagattcacctttactgagtctccttggacagacaagctcactctcatggcatcttgtggaccttgtgtcataccagagtgtgttgggttatttcagcagtcattacccaccatccgtcgtcctggcaaatgactgttcctcggaactgatagtgaagctgttaaaagtgtctgcagggctttctgctcatgctgacggccggaagcacgtggacatagttccaaaatgccaggctttcactcatcagatggttcagtttctcagtgccttggaacagactggaaaaatcaccttcccagcactggagcgggaaatatctaagctgttggatgacatcattatctttaacccacccgacatggacagccagacccgccacatggccctcagcagcttctttgtggaagtcctgatgatgatgaacaatgcggctgttccaacagcagagttccttgctgtcagtattcggacctggattggccaaagagtgcatggcttgatagtgctgcccctcttaacagcagcctgccaaagcctggcgtctgtccgccacatggcggagatcaccgaagcctgcatcatggcctacttcaaggaaagctccctcgatcagaacttaggatggggccccgttctggtgtcccttcaagttccccagctcaccgcgcgagactttctggaggagtgcttagccctcggtagttgtttgactctctatgtctacctgcttcagtgtctgaacagtgagcagacggtgaagaacgacatgaaaatgctcctcgtcgtcagcggctggctggagcaggtgtacccgagctctgcacaggaagaggcaaagctgtttctgtggtggcatcaaatcctgcagctgtctctgattcagttggagcagaacgactccgtcctgacagagtccgtcatccggatcctgctcatgctgcagagcaggcagagccttatggccgaggagaggctcagctctgggattctgggggcaatcgggttgggccggagatcacccttgtccaacaggttccgagtggctgcccgaagcatggctgccttcctgttggttcaggtccctgcagaagaccagattcgtctgaaacccagctctgagttacatctggctccaaaagctcagcaggtgctgacagctctggagtccatgacgctcagtaagcagtatgtggagtaccaggaccagatactgcatgctcttcagtttataaggcatcctggccactgccttcagaatgggaaaagcttcctggcccttcttgtcaaccgcctctatccagaagtgcattacctggacaacatccggtagtgaggccgaagccctcggagcaccgtgtcggccctgagtttacattagccgtgctgttgtgcatgtatctttcctcagtttcgccacagagctcagttctgcctggaatcgactgaggtgcagttgggaggcatcagctcgtcctggttgcacttacctcttctgtccagtggccatcttagtgtgaatgctcttccacaagtcaactgagttcccgagtacagaccactcacatttggggaatgtgcctgtcagctccctaagaacaacagatagagtttttggtatgtctgcacctctgtctccctgccttgtttaaaggtcaagactcctaatgccagatctgaccactttgggaggcgtgaagagccctcttttggaactccattgtattcttccgatgtaaaaattctgtatttctgaaatgtagggaaacacaccagctttaaagtgttatgttacagctctttgagtggagagactacactggattaattcaggagtggtagctgggcagtggtggcacacacctttaatcccagtacttgggaggcagaagcaggcagatttctgagttcgaggacagcctggtctacaaagtgagttccaggacagccagggctacagagaaaccctgtctcaaaaaaagccaaataatttattaattaagaaattcgggagtggtggcccacacctgtcctctgagcacatcggctgactgaaacaggaggatcacaaggttgaggcagcgtgaggtgtgtatcaagaacatctcagcaaacagagcaaaggagctgaattaaaatgagtcctgtgcagacatgtcacttaaccctgaccacagtggccagcacagatggtgacacatcctctggaagtgagcttgtctgaagtgatgtgacagtgtgccctatgccagctgtgttgtgcacaggtgtgtcgtctttgggagcacagaagccctgaccacagccgccagggcactggaaccctttgggtctcctcagtcacaacgttttattagccctgtctatgtggaattcccagctcttgttataagtcagggcttctgcaggccctactgtcagggacaccggggactttgtacttcttccttaggtaaatcagatggcgctcagggactcgctggagcatatgtccagagagaagggccaggtcacggcaatctgagaagtttgactttttgtgagtagctccgtgccttctgtcattgctgagtccccgttacctgtctggcacagtgctctgctccctttagatctcctgctcatgtcgctccctgtagagttcctaatttgacttctgtcagaatagtcctacttctcaaaaatgcccccaaatgggttttgcaggttcagcttaaaatacgtcttttttatgggtttaggtctagaaatatctgtgtaaaatctatgagtggccaccaagagccttgactaaagatgggatatacagctagtgggtcccttccctgcatttggaagcttgcaggaacttcttattggacagaacaagtctgcctggtagacatgtcttagaacactgataaaggacgatcctattcagtggcacaaagtatcattgtccaggaatctgtctcagccatctttatttctgcttctctctgctttccaggtctgtcatcccctctccaatagaagaaaactttagaagctgtagacagttgaaccagtggttctgtggtcaggaaacactgtttttgtgtgctttctccaaggagaaccaagttaccaatatcctagaatgtgaaatgtttgagtcatagtgtgtacagtttagagaatcaattaattttgaaagtttataatatttgtaaattttatctgtaaaaagtataaacaataaaatcaacctttgattgtaactgatgaatccga

SEQ ID NO: 184 - protein, 2047 aa, Mus musculus
MQSLALLMSPVKNRAEFMCHMKPSEWKPSSSGPASGNWTLVDEAGEEDEDPETSWILLNEDDLVTLLSQFPFQELFQHLLGFKAKGDYLPETWQEMMKIFAFANSLVELLAVGLDTFNRARYRQFVKRIGYLIRMTLGYVSDHWAQYVSHSTGAGLTPQPYSMEKLQVEFDELFLRAVLHVLKAKRLGIWLFMSEMPFGTLSVQMLWKLLYLMHQVESGDLQQLCASLQPAECKRRLQDPEHFASFEKCLSSINSSEEICLLTAFAQMARARRTNVDEDFIKIIVLEIYEVSYVTLSTRETFSKVGRELLGAIAAVHPEIISVLLDRVQETIDQVGMVSLYLFKELPLYLWRPSAPEIAVIRDWLLNNNLTAVKNKLACVIQWGFTEQGTLHLDQALHTEVLVLEAYQKYLAQKPYTGLISESMKQVSYLASIVRYGETPETSFNQWAWNLILRLKLHKNDFGRQNFPVIPFCSTVPDMTESSMFHPLLKAVKSGLPIGCYLAVTAVGHSLEKFCAEGIPLLGVLVQSRHLRAVVHALDKILPVFYPYQCYLLKNEQFLSNLLLFLQLDSGVPQGVTQQVTVAQHLTGAVHGDNVKLLSSMIQAHICVSTQPDGVGPVAVLEFWVQALISQHLWYREQPILFLMDHLCKTAFHLMQEDCVQKLLYQQHKNALGYHCDRSLLSSLVNWIVAGNITPSFVEGLSTSTQVWFAWTVLNMESIFEEDSQLRRVVERELVINAFSPDQALKKAQVQLKLPIVPSLQRLLIYRWAHQALVTPSDHPLLPLIWQKFFLLYLHRPGPQYGLPVDGCIGRRFFQSPSHVNLLKDMKRRLTEVADFHYAASKALRVPAEGSEGTPEGQAGTPGFLTSPELHRELVRLFNVYVLWLEDENFQKGDTYIPSLPKHYDVHRLAKVMQNQQDLWMEYVNMERIQHEFQETVWTQAKLESHAAPCSSSAQLDFTDPLLAKARVLSNLEKHEAPHPPLLLHPVRPPVPLIPSAALLTQKDSTQLMCTDLNLLQQQARSATLRESQQVDGELLETMPKQYVNREDQATLHLECRGSSGKKCQGAAVVTVQFEGMNKNEAVSQQIHVLQKEVRQLQAEAAQPPALNVVEAAVHAENLITALVNTYKLQPTPGVQKLGISLFFTVVDHVSDETQRHPPTRQFFTSCIEILGQVFVSGTKSECRKLLQTILKNRRLCSLLAPFFTPNAAPAEFIQLYERVVTCLREDNSDVIFMLLTKFDIQQWLNSTKPPLSDRTRLLESIHLALTAWGLEPEEDILMPFNLFCKHWTHLLLYQFPDQYSDVLRLLVQSSAEQLLSPECWKATLRALGCYAPSSQQGAASVESSGLHSASRVLLSDKQVMVQWLSDFFYKLRLSKLDFKSFGLFSKWSPYMADVKTFLGYLVKRLTDLEIASLSQDPTASSKEVLRSLHAQIIQLFKPWILVLEDAESSHQRHYPWLESDTAVASSIVQLFSDCVGSLHTSFKDRLLPGDEGALRLHLLHYCETCTAPKMPEFILYAFHSAYQRLEWKDLHPDQRLMEAFFKVERGSPKSCFLFLGSVLCRVNWVSVLSDAWNPSPLPETQSMAVCLLFMMVLLAKEAQLVDEPDSPLLSLLGQTSSLSWHLVDLVSYQSVLGYFSSHYPPSVVLANDCSSELIVKLLKVSAGLSAHADGRKHVDIVPKCQAFTHQMVQFLSALEQTGKITFPALEREISKLLDDIIIFNPPDMDSQTRHMALSSFFVEVLMMMNNAAVPTAEFLAVSIRTWIGQRVHGLIVLPLLTAACQSLASVRHMAEITEACIMAYFKESSLDQNLGWGPVLVSLQVPQLTARDFLEECLALGSCLTLYVYLLQCLNSEQTVKNDMKMLLVVSGWLEQVYPSSAQEEAKLFLWWHQILQLSLIQLEQNDSVLTESVIRILLMLQSRQSLMAEERLSSGILGAIGLGRRSPLSNRFRVAARSMAAFLLVQVPAEDQIRLKPSSELHLAPKAQQVLTALESMTLSKQYVEYQDQILHALQFIRHPGHCLQNGKSFLALLVNRLYPEVHYLDNIR

SEQ ID NO: 185 - DNA, 4614 bp, Mus musculus
gagtttgacagaaacagaccgcgacgtcgcggaggtagggtgtatggccgaggctgtgaagccccgccgggccaaggccaaggccagccgcaccaaaggcaaggaaaagaagaagcatgaagcccttcagacttgtgatgcaggtcccctgccagagacctgtcgcgagcaggagagcccgtgtccagcttctgaactcaaaggagatgacctgaagtcgtctgctgacccccagctccacagtgatgtgtgtggatggaatgaaagtgagatgtttgatataccactcacctccttgactataggggatgaaggtcccccggtacaggacacagaggacctaaaagaaaggggagaggtcacagccggtgatggagatgatgaaatggagttgaaggtggaccctggggacaacgttatagctaaaggtgaaccttgtaagaacttcccggaagtagaggaccacacactcatccagtgtgggcctccagagagcacactgcagcctgactttccctgcactcagcaggcagtggagggctcacatgccagagaacatccgactaggaagcaagatgaagccgccctcggctgttcaaaggtgtttcagaatgttagcttgcacagttcttatgaagccaaagaagtttctcagccaccgagagtgaagaaactatatcctgagttgccagctgaaattgctgaagtaccagctctggtggcagtgaagccattgctccgtagtgagcgactctacccagaactcccgtctcaaccagaagtgacacccttcactaaagaacagctcaaactcttggagcctggctcatggctggaaaatgttgcatcatatgtagaagaattcgataacattgctcatcaggacagacacgagttttatgagctgcttttgaattactcacggtgcaggaagcagttgctgttggctgaagctgagctgctcactctgatgtctgactgccacagtgccaaaagtcgactgtggcactttaaggatgagcagatggccgtacagggcatctgtgcagatcaagtgaaagtctacgggcatcaccactaccagcgagtagagatgaatgaaaatgtcctgggcgagctgaagaagctgtttgatgccaaatctgagcacctccaccagaccctgaccctccactcgtacacttctgtgctctcgaggttgcaagtggagtcctacatcttcacactgctcaatagctcagctgctctgagatctttagcagtttatcaggcagaccaagttcctaaactgacagaaagcatcccctctgatgtgtgtcagctgaaggagtgcattagtgtcttgttcatgttcaccaggagagtgagtgaggatgcccagttccatgaggacatcctgctctggctgcagaagctggtgtccgtgttacaacgagtcggctgtcctggggatcacttctttctcctgaaccacgttctccgctgcccagctggcattcgtaaatgggctgttccttttatacagatcaaagtgttgaataacccttcaggggtctttcattttatgcagtcccttgccctgctgatgtctcctgtcaaaaaccgagcggagtttatgtgccacatgaagcccagtgagtggaagccatcatcttcagggccagcatctgggaactggacacttgtagatgaagcgggggaagaggatgaagaccctgagaccagttggattctccttaatgaagacgacttggtcacccttttgtcccagtttccctttcaggagctctttcagcatcttcttgggtttaaagccaaaggtgattatttacctgaaacaacaaggccccaagagatgatgaaaatttttgcctttgccaactcattagtggagcttctggctgtgggactagacacctttaacagagcccgctacaggcagtttgtgaagcgcattggatacctgatcaggatgacccttggctatgtcagtgaccactgggctcagtatgtgagccacagcacaggcgcggggctaacaccgcagccctactccatggagaaactgcaggtggaatttgatgagctgtttctcagggctgtcctccatgtcctgaaagccaaaagacttggcatttggctgttcatgtctgagatgcccttcggcacgctgtcggtccagatgctctggaagctcttgtacctcatgcaccaggtggagagtggggacctgcagcaactctgtgcctccctgcagccggccgagtgcaagaggcgactccaagacccagaacattttgcgagctttgagaagtgtctttcttccatcaacagctcagaggagatctgtctcctcacggcctttgctcagatggctcgagccagaagaaccaatgtggatgaagacttcataaaaatcattgtcctggagatctatgaggtatcttatgtcacactgtctaccagagagactttctcaaaggttggtcgagagcttctgggagccattgcagctgttcaccctgagattatctctgtccttttggacagagtgcaggagaccattgaccaagttggaatggtttctttatacttgtttaaagaactgcctttgtatctttggcgaccttctgccccagagatagctgtgattcgggactggttattgaataataatctgacagcagtgaagaacaagttggcctgtgtgatcctagaaggactgaattggggatttactgaacagggtacccttcatttggatcaagcattgcacacggaagtggccttactggttctcgaggcttatcagaaatacctggcacagaaaccttatactgggcttatttctgaaagtatgaaacaggtttcctatttggccagtattgttcgatatggagagactcctgagacctcatttaaccagtgggcctggaatttaatcttgaggttaaaattgcacaaaaatgattttggaagacagaactttccagtcattcccttctgcagcacagtacctgacatgacagaatcgtccatgtttcaccctctcttgaaggctgtgaaatcaggcttgcccattggctgctatctcgctttagctgtgacagctgttggccacagccttgagaagttctgtgcagaaggcatcccactgctgggcgtgctggtccagtcacggcatctgagagcagtggtccatgccctagataagatcctgcctgtgttctacccttaccagtgctaccttctgaagaacgagcagtttttgtcgaaccttctcctcttcctacaattggacagcggtgttccccagggggtcacacagcaggtcacccacagggtggcccagcatctgacaggagccgtccatggagacaatgtgaaacttctcagcagcatgatccaggcacacatatgtgtaagcactcagccggatggagtgggtcctgtggctgtgttggagttctgggtccaggctctcataagccagcatctgtggtaccgagaacagcccattctcttcctcatggaccacttgtgtaagacagcgtttcacctgatgcaggaagattgtgtgcaaaaattgctctaccaacagcacaagaatgctttgggttaccactgtgaccggagtctgctctcttccttggtgaactggattgtggcagggaacatcacgccttccttcgtggagggcttgtccacgtccacacaggtttggtttgcatggactgtgttgaacatggaatccatctttgaagaggactctcagctccgaagagttgttgaaagggaattggttataaatgcgtttagccctgaccaagctctaaagaaagcccaggtccagctgaagctgcccatcgtcccgtccctgcagcggctgttgatttatcgctgggcccaccaggctctggtcacaccttctgatcatccccttttgccactcatttggcagaagttcttcctcctgtatcttcatcgcccaggaccacaatatgggttacctgtggatggttgtattggaagaaggttttttcaaagtccctcgcacgttaatttgttgaaagacatgaagagacgcctgacggaggtggctgacttccactatgctgccagcaaggccctccgtgttccagcagagggcagtgaagggacaccagaagggcaggctggcacccctggcttcctgacttccccagaactgcacagggaactagtgaggctctttaatgtatatgtattatggctagaagatgaaaattttcagaaaggagatacctatattccttctttaccaaagcactacgatgttcacaggctagcaaaagtgatgcagaatcagcaggacctgtggatggagtatgtgaatatggagcgcatacagcacgagttccaggagacagttgctctgtggacacaggccaagcttgagtcccatgccgcaccctgcagctcttcagcacagctggatttcacggaccccttgctgggtgagtcctgtgacgtcagcccctttgaaagaatgtttgaaccagttactgaaggttaaggtttccacaccttatctctataatgagaattgttctttcagagtttcctgtttgaaaa

SEQ ID NO: 186 - protein, 1487 aa, Mus musculus
MAEAVKPRRAKAKASRTKGKEKKKHEALQTCDAGPLPETCREQESPCPASELKGDDLKSSADPQLHSDVCGWNESEMFDIPLTSLTIGDEGPPVQDTEDLKERGEVTAGDGDDEMELKVDPGDNVIAKGEPCKNFPEVEDHTLIQCGPPESTLQPDFPCTQQAVEGSHAREHPTRKQDEAALGCSKVFQNVSLHSSYEAKEVSQPPRVKKLYPELPAEIAEVPALVAVKPLLRSLYPELPSQPEVTPFTKEQLKLLEPGSWLENVASYVEEFDNIAHQDRHEFYELLLNYSRCRKQLLLAEAELLTLMSDCHSAKSRLWHFKDEQMAVQGICADQVKVYGHHHYQRVEMNENVLGELKKLFDAKSEHLHQTLTLHSYTSVLSRLQVESYIFTLLNSSAALRSLAVYQADQVPKLTESIPSDVCQLKECISVLFMFTRRVSEDAQFHEDILLWLQKLVSVLQRVGCPGDHFFLLNHVLRCPAGIRKWAVPFIQIKVLNNPSGVFHFMQSLALLMSPVKNRAEFMCHMKPSEWKPSSSGPASGNWTLVDEAGEEDEDPETSWILLNEDDLVTLLSQFPFQELFQHLLGFKAKGDYLPETWQEMMKIFAFANSLVELLAVGLDTFNRARYRQFVKRIGYLIRMTLGYVSDHWAQYVSHSTGAGLTPQPYSMEKLQVEFDELFLRAVLHVLKAKRLGIWLFMSEMPFGTLSVQMLWKLLYLMHQVESGDLQQLCASLQPAECKRRLQDPEHFASFEKCLSSINSSEEICLLTAFAQMARARRTNVDEDFIKIIVLEIYEVSYVTLSTRETFSKVGRELLGAIAAVHPEIISVLLDRVQETIDQVGMVSLYLFKELPLYLWRPSAPEIAVIRDWLLNNNLTAVKNKLACVIQWGFTEQGTLHLDQALHTEVLVLEAYQKYLAQKPYTGLISESMKQVSYLASIVRYGETPETSFNQWAWNLILRLKLHKNDFGRQNFPVIPFCSTVPDMTESSMFHPLLKAVKSGLPIGCYLAVTAVGHSLEKFCAEGIPLLGVLVQSRHLRAVVHALDKILPVFYPYQCYLLKNEQFLSNLLLFLQLDSGVPQGVTQQVTVAQHLTGAVHGDNVKLLSSMIQAHICVSTQPDGVGPVAVLEFWVQALISQHLWYREQPILFLMDHLCKTAFHLMQEDCVQKLLYQQHKNALGYHCDRSLLSSLVNWIVAGNITPSFVEGLSTSTQVWFAWTVLNMESIFEEDSQLRRVVERELVINAFSPDQALKKAQVQLKLPIVPSLQRLLIYRWAHQALVTPSDHPLLPLIWQKFFLLYLHRPGPQYGLPVDGCIGRRFFQSPSHVNLLKDMKRRLTEVADFHYAASKALRVPAEGSEGTPEGQAGTPGFLTSPELHRELVRLFNVYVLWLEDENFQKGDTYIPSLPKHYDVHRLAKVMQNQQDLWMEYVNMERIQHEFQETVWTQAKLESHAAPCSSSAQLDFTDPLLGESCDVSPFERMFEPVTEG

SEQ ID NO: 187 - DNA, 9681 bp, Mus musculus
gagtttgacagaaacagaccgcgacgtcgcggaggtagggtgtatggccgaggctgtgaagccccgccgggccaaggccaaggccagccgcaccaaaggcaaggaaaagaagaagcatgaagcccttcagacttgtgatgcaggtcccctgccagagacctgtcgcgagcaggagagcccgtgtccagcttctgaactcaaaggagatgacctgaagtcgtctgctgacccccagctccacagtgatgtgtgtggatggaatgaaagtgagatgtttgatataccactcacctccttgactataggggatgaaggtcccccggtacaggacacagaggacctaaaagaaaggggagaggtcacagccggtgatggagatgatgaaatggagttgaaggtggaccctggggacaacgttatagctaaaggtgaaccttgtaagaacttcccggaagtagaggaccacacactcatccagtgtgggcctccagagagcacactgcagcctgactttccctgcactcagcaggcagtggagggctcacatgccagagaacatccgactaggaagcaagatgaagccgccctcggctgttcaaaggtgtttcagaatgttagcttgcacagttcttatgaagccaaagaagtttctcagccaccgagagtgaagaaactatatcctgagttgccagctgaaattgctgaagtaccagctctggtggcagtgaagccattgctccgtagtgagcgactctacccagaactcccgtctcaaccagaagtgacacccttcactaaagaacagctcaaactcttggagcctggctcatggctggaaaatgttgcatcatatgtagaagaattcgataacattgctcatcaggacagacacgagttttatgagctgcttttgaattactcacggtgcaggaagcagttgctgttggctgaagctgagctgctcactctgatgtctgactgccacagtgccaaaagtcgactgtggcactttaaggatgagcagatggccgtacagggcatctgtgcagatcaagtgaaagtctacgggcatcaccactaccagcgagtagagatgaatgaaaatgtcctgggcgagctgaagaagctgtttgatgccaaatctgagcacctccaccagaccctgaccctccactcgtacacttctgtgctctcgaggttgcaagtggagtcctacatcttcacactgctcaatagctcagctgctctgagatctttagcagtttatcaggcagaccaagttcctaaactgacagaaagcatcccctctgatgtgtgtcagctgaaggagtgcattagtgtcttgttcatgttcaccaggagagtgagtgaggatgcccagttccatgaggacatcctgctctggctgcagaagctggtgtccgtgttacaacgagtcggctgtcctggggatcacttctttctcctgaaccacgttctccgctgcccagctggcattcgtaaatgggctgttccttttatacagatcaaagtgttgaataacccttcaggggtctttcattttatgcagtcccttgccctgctgatgtctcctgtcaaaaaccgagcggagtttatgtgccacatgaagcccagtgagtggaagccatcatcttcagggccagcatctgggaactggacacttgtagatgaagcgggggaagaggatgaagaccctgagaccagttggattctccttaatgaagacgacttggtcacccttttgtcccagtttccctttcaggagctctttcagcatcttcttgggtttaaagccaaaggtgattatttacctgaaacaacaaggccccaagagatgatgaaaatttttgcctttgccaactcattagtggagcttctggctgtgggactagacacctttaacagagcccgctacaggcagtttgtgaagcgcattggatacctgatcaggatgacccttggctatgtcagtgaccactgggctcagtatgtgagccacagcacaggcgcggggctaacaccgcagccctactccatggagaaactgcaggtggaatttgatgagctgtttctcagggctgtcctccatgtcctgaaagccaaaagacttggcatttggctgttcatgtctgagatgcccttcggcacgctgtcggtccagatgctctggaagctcttgtacctcatgcaccaggtggagagtggggacctgcagcaactctgtgcctccctgcagccggccgagtgcaagaggcgactccaagacccagaacattttgcgagctttgagaagtgtctttcttccatcaacagctcagaggagatctgtctcctcacggcctttgctcagatggctcgagccagaagaaccaatgtggatgaagacttcataaaaatcattgtcctggagatctatgaggtatcttatgtcacactgtctaccagagagactttctcaaaggttggtcgagagcttctgggagccattgcagctgttcaccctgagattatctctgtccttttggacagagtgcaggagaccattgaccaagttggaatggtttctttatacttgtttaaagaactgcctttgtatctttggcgaccttctgccccagagatagctgtgattcgggactggttattgaataataatctgacagcagtgaagaacaagttggcctgtgtgatcctagaaggactgaattggggatttactgaacagggtacccttcatttggatcaagcattgcacacggaagtggccttactggttctcgaggcttatcagaaatacctggcacagaaaccttatactgggcttatttctgaaagtatgaaacaggtttcctatttggccagtattgttcgatatggagagactcctgagacctcatttaaccagtgggcctggaatttaatcttgaggttaaaattgcacaaaaatgattttggaagacagaactttccagtcattcccttctgcagcacagtacctgacatgacagaatcgtccatgtttcaccctctcttgaaggctgtgaaatcaggcttgcccattggctgctatctcgctttagctgtgacagctgttggccacagccttgagaagttctgtgcagaaggcatcccactgctgggcgtgctggtccagtcacggcatctgagagcagtggtccatgccctagataagatcctgcctgtgttctacccttaccagtgctaccttctgaagaacgagcagtttttgtcgaaccttctcctcttcctacaattggacagcggtgttccccagggggtcacacagcaggtcacccacagggtggcccagcatctgacaggagccgtccatggagacaatgtgaaacttctcagcagcatgatccaggcacacatatgtgtaagcactcagccggatggagtgggtcctgtggctgtgttggagttctgggtccaggctctcataagccagcatctgtggtaccgagaacagcccattctcttcctcatggaccacttgtgtaagacagcgtttcacctgatgcaggaagattgtgtgcaaaaattgctctaccaacagcacaagaatgctttgggttaccactgtgaccggagtctgctctcttccttggtgaactggattgtggcagggaacatcacgccttccttcgtggagggcttgtccacgtccacacaggtttggtttgcatggactgtgttgaacatggaatccatctttgaagaggactctcagctccgaagagttgttgaaagggaattggttataaatgcgtttagccctgaccaagctctaaagaaagcccaggtccagctgaagctgcccatcgtcccgtccctgcagcggctgttgatttatcgctgggcccaccaggctctggtcacaccttctgatcatccccttttgccactcatttggcagaagttcttcctcctgtatcttcatcgcccaggaccacaatatgggttacctgtggatggttgtattggaagaaggttttttcaaagtccctcgcacgttaatttgttgaaagacatgaagagacgcctgacggaggtggctgacttccactatgctgccagcaaggccctccgtgttccagcagagggcagtgaagggacaccagaagggcaggctggcacccctggcttcctgacttccccagaactgcacagggaactagtgaggctctttaatgtatatgtattatggctagaagatgaaaattttcagaaaggagatacctatattccttctttaccaaagcactacgatgttcacaggctagcaaaagtgatgcagaatcagcaggacctgtggatggagtatgtgaatatggagcgcatacagcacgagttccaggagacagttgctctgtggacacaggccaagcttgagtcccatgccgcaccctgcagctcttcagcacagctggatttcacggaccccttgctggctaaagcaagggttctgagtaacttagagaagcacgaggctccacatcctcctcttcttctgcaccccgtgaggcctcccgtgccactcattccctctgctgcgctgttgacacagaaggacagcacccagctcatgtgcacagacctgaatctgctgcagcagcaggccaggagtgccactctgcgggagtcgcagcaggttgccttggatggcgagctgttggagaccatgcccaaacagtacgttaaccgggaagatcaggccaccctgcatctggagtgcagaggcagcagtggcaagaagtgccaaggagcagcagttgtaacggtccagtttgaaggcatgaacaagaatgaagccgtaagccagcagatccatgttctgcagaaagaagtgaggcagctccaagcggaagctgctcagcccccggcactgaatgttgtggaggccgctgtgcatgcagaaaacctgatcacggccttagtgaacacttataagttacagcctacacctggagttcagaaacttggcattagccttttctttactgttgtggaccatgtcagcgatgagacccagcgccatcctcctacaaggcagttcttcacttcatgcatcgagatcttgggacaggtgtttgttagcggcactaagtccgagtgcaggaagctgctccagaccatcctgaagaacaggcggctctgctcgctgctggctcctttcttcacgcccaatgctgcgcccgccgagttcatccagctgtatgagagagtggtgacttgtctgcgcgaggacaacagcgacgtgatcttcatgctgctcaccaagtttgatattcagcagtggttaaacagcactaagccccctctgtctgaccgcaccaggctcctggagtccattcacttggcactcactgcctggggccttgaaccagaggaagatattctgatgccatttaatcttttctgcaagcactggactcacctcctactctaccagttccctgaccagtacagtgatgtcctcaggctgctggtgcagagctctgccgagcagctgctgagtcccgagtgctggaaagccactttgagagccctgggctgttatgccccaagcagccagcagggggcggcgtctgtggagagctctgggcttcacagtgcctcccgtgttctcctgtcagacaagcaggtaatggagacggtacagtggctttctgacttcttttataagttgcggctctccaagttggactttaaaagctttggattattctcaaagtggagtccttacatggctgatgtgaagacatttctgggataccttgtgaaaaggctgactgacttagaaatagcctccttgtctcaggacccaaccgccagcagcaaagaagtgctgaggtccctgcacgcgcagatcatccagctctttaagccctggatcctggttttagaggacgcggaaagtagccaccagcgacattacccgtggctggagagtgacactgcggtggcctccagcatcgtgcagctcttctctgactgtgtcggctcattgcacacgagttttaaagacaggctgttgccaggcgatgagggagccctgcggttgcacctgctgcactactgtgaaacatgcacagcacccaagatgccggagttcattctctatgccttccacagtgcataccagagactggagtggaaggacttgcaccctgaccagaggctcatggaggccttctttaaggtggaacgtggaagccccaagagttgtttcttgtttttggggtctgtactttgcagagtcaactgggttagtgtgctgtctgacgcctggaatcccagcccccttccggaaacccagagcatggctgtctgcctccttttcatgatggttttactagcaaaggaggctcagctcgttgacgagccagattcacctttactgagtctccttggacagacaagctcactctcatggcatcttgtggaccttgtgtcataccagagtgtgttgggttatttcagcagtcattacccaccatccgtcgtcctggcaaatgactgttcctcggaactgatagtgaagctgttaaaagtgtctgcagggctttctgctcatgctgacggccggaagcacgtggacatagttccaaaatgccaggctttcactcatcagatggttcagtttctcagtgccttggaacagactggaaaaatcaccttcccagcactggagcgggaaatatctaagctgttggatgacatcattatctttaacccacccgacatggacagccagacccgccacatggccctcagcagcttctttgtggaagtcctgatgatgatgaacaatgcggctgttccaacagcagagttccttgctgtcagtattcggacctggattggccaaagagtgcatggcttgatagtgctgcccctcttaacagcagcctgccaaagcctggcgtctgtccgccacatggcggagatcaccgaagcctgcatcatggcctacttcaaggaaagctccctcgatcagaacttaggatggggccccgttctggtgtcccttcaagttccccagctcaccgcgcgagactttctggaggagtgcttagccctcggtagttgtttgactctctatgtctacctgcttcagtgtctgaacagtgagcagacggtgaagaacgacatgaaaatgctcctcgtcgtcagcggctggctggagcaggtgtacccgagctctgcacaggaagaggcaaagctgtttctgtggtggcatcaaatcctgcagctgtctctgattcagttggagcagaacgactccgtcctgacagagtccgtcatccggatcctgctcatgctgcagagcaggcagagccttatggccgaggagaggctcagctctgggattctgggggcaatcgggttgggccggagatcacccttgtccaacaggttccgagtggctgcccgaagcatggctgccttcctgttggttcaggtccctgcagaagaccagattcgtctgaaacccagctctgagttacatctggctccaaaagctcagcaggtgctgacagctctggagtccatgacgctcagtaagcagtatgtggagtaccaggaccagatactgcatgctcttcagtttataaggcatcctggccactgccttcagaatgggaaaagcttcctggcccttcttgtcaaccgcctctatccagaagtgcattacctggacaacatccggtagtgaggccgaagccctcggagcaccgtgtcggccctgagtttacattagccgtgctgttgtgcatgtatctttcctcagtttcgccacagagctcagttctgcctggaatcgactgaggtgcagttgggaggcatcagctcgtcctggttgcacttacctcttctgtccagtggccatcttagtgtgaatgctcttccacaagtcaactgagttcccgagtacagaccactcacatttggggaatgtgcctgtcagctccctaagaacaacagatagagtttttggtatgtctgcacctctgtctccctgccttgtttaaaggtcaagactcctaatgccagatctgaccactttgggaggcgtgaagagccctcttttggaactccattgtattcttccgatgtaaaaattctgtatttctgaaatgtagggaaacacaccagctttaaagtgttatgttacagctctttgagtggagagactacactggattaattcaggagtggtagctgggcagtggtggcacacacctttaatcccagtacttgggaggcagaagcaggcagatttctgagttcgaggacagcctggtctacaaagtgagttccaggacagccagggctacagagaaaccctgtctcaaaaaaagccaaataatttattaattaagaaattcgggagtggtggcccacacctgtcctctgagcacatcggctgactgaaacaggaggatcacaaggttgaggcagcgtgaggtgtgtatcaagaacatctcagcaaacagagcaaaggagctgaattaaaatgagtcctgtgcagacatgtcacttaaccctgaccacagtggccagcacagatggtgacacatcctctggaagtgagcttgtctgaagtgatgtgacagtgtgccctatgccagctgtgttgtgcacaggtgtgtcgtctttgggagcacagaagccctgaccacagccgccagggcactggaaccctttgggtctcctcagtcacaacgttttattagccctgtctatgtggaattcccagctcttgttataagtcagggcttctgcaggccctactgtcagggacaccggggactttgtacttcttccttaggtaaatcagatggcgctcagggactcgctggagcatatgtccagagagaagggccaggtcacggcaatctgagaagtttgactttttgtgagtagctccgtgccttctgtcattgctgagtccccgttacctgtctggcacagtgctctgctccctttagatctcctgctcatgtcgctccctgtagagttcctaatttgacttctgtcagaatagtcctacttctcaaaaatgcccccaaatgggttttgcaggttcagcttaaaatacgtcttttttatgggtttaggtctagaaatatctgtgtaaaatctatgagtggccaccaagagccttgactaaagatgggatatacagctagtgggtcccttccctgcatttggaagcttgcaggaacttcttattggacagaacaagtctgcctggtagacatgtcttagaacactgataaaggacgatcctattcagtggcacaaagtatcattgtccaggaatctgtctcagccatctttatttctgcttctctctgctttccaggtctgtcatcccctctccaatagaagaaaactttagaagctgtagacagttgaaccagtggttctgtggtcaggaaacactgtttttgtgtgctttctccaaggagaaccaagttaccaatatcctagaatgtgaaatgtttgagtcatagtgtgtacagtttagagaatcaattaattttgaaagtttataatatttgtaaattttatctgtaaaaagtataaacaataaaatcaacctttgattgtaactgatgaatccga

SEQ ID NO: 188 - protein, 2552 aa, Mus musculus
MAEAVKPRRAKAKASRTKGKEKKKHEALQTCDAGPLPETCREQESPCPASELKGDDLKSSADPQLHSDVCGWNESEMFDIPLTSLTIGDEGPPVQDTEDLKERGEVTAGDGDDEMELKVDPGDNVIAKGEPCKNFPEVEDHTLIQCGPPESTLQPDFPCTQQAVEGSHAREHPTRKQDEAALGCSKVFQNVSLHSSYEAKEVSQPPRVKKLYPELPAEIAEVPALVAVKPLLRSLYPELPSQPEVTPFTKEQLKLLEPGSWLENVASYVEEFDNIAHQDRHEFYELLLNYSRCRKQLLLAEAELLTLMSDCHSAKSRLWHFKDEQMAVQGICADQVKVYGHHHYQRVEMNENVLGELKKLFDAKSEHLHQTLTLHSYTSVLSRLQVESYIFTLLNSSAALRSLAVYQADQVPKLTESIPSDVCQLKECISVLFMFTRRVSEDAQFHEDILLWLQKLVSVLQRVGCPGDHFFLLNHVLRCPAGIRKWAVPFIQIKVLNNPSGVFHFMQSLALLMSPVKNRAEFMCHMKPSEWKPSSSGPASGNWTLVDEAGEEDEDPETSWILLNEDDLVTLLSQFPFQELFQHLLGFKAKGDYLPETWQEMMKIFAFANSLVELLAVGLDTFNRARYRQFVKRIGYLIRMTLGYVSDHWAQYVSHSTGAGLTPQPYSMEKLQVEFDELFLRAVLHVLKAKRLGIWLFMSEMPFGTLSVQMLWKLLYLMHQVESGDLQQLCASLQPAECKRRLQDPEHFASFEKCLSSINSSEEICLLTAFAQMARARRTNVDEDFIKIIVLEIYEVSYVTLSTRETFSKVGRELLGAIAAVHPEIISVLLDRVQETIDQVGMVSLYLFKELPLYLWRPSAPEIAVIRDWLLNNNLTAVKNKLACVIQWGFTEQGTLHLDQALHTEVLVLEAYQKYLAQKPYTGLISESMKQVSYLASIVRYGETPETSFNQWAWNLILRLKLHKNDFGRQNFPVIPFCSTVPDMTESSMFHPLLKAVKSGLPIGCYLAVTAVGHSLEKFCAEGIPLLGVLVQSRHLRAVVHALDKILPVFYPYQCYLLKNEQFLSNLLLFLQLDSGVPQGVTQQVTVAQHLTGAVHGDNVKLLSSMIQAHICVSTQPDGVGPVAVLEFWVQALISQHLWYREQPILFLMDHLCKTAFHLMQEDCVQKLLYQQHKNALGYHCDRSLLSSLVNWIVAGNITPSFVEGLSTSTQVWFAWTVLNMESIFEEDSQLRRVVERELVINAFSPDQALKKAQVQLKLPIVPSLQRLLIYRWAHQALVTPSDHPLLPLIWQKFFLLYLHRPGPQYGLPVDGCIGRRFFQSPSHVNLLKDMKRRLTEVADFHYAASKALRVPAEGSEGTPEGQAGTPGFLTSPELHRELVRLFNVYVLWLEDENFQKGDTYIPSLPKHYDVHRLAKVMQNQQDLWMEYVNMERIQHEFQETVWTQAKLESHAAPCSSSAQLDFTDPLLAKARVLSNLEKHEAPHPPLLLHPVRPPVPLIPSAALLTQKDSTQLMCTDLNLLQQQARSATLRESQQVDGELLETMPKQYVNREDQATLHLECRGSSGKKCQGAAVVTVQFEGMNKNEAVSQQIHVLQKEVRQLQAEAAQPPALNVVEAAVHAENLITALVNTYKLQPTPGVQKLGISLFFTVVDHVSDETQRHPPTRQFFTSCIEILGQVFVSGTKSECRKLLQTILKNRRLCSLLAPFFTPNAAPAEFIQLYERVVTCLREDNSDVIFMLLTKFDIQQWLNSTKPPLSDRTRLLESIHLALTAWGLEPEEDILMPFNLFCKHWTHLLLYQFPDQYSDVLRLLVQSSAEQLLSPECWKATLRALGCYAPSSQQGAASVESSGLHSASRVLLSDKQVMVQWLSDFFYKLRLSKLDFKSFGLFSKWSPYMADVKTFLGYLVKRLTDLEIASLSQDPTASSKEVLRSLHAQIIQLFKPWILVLEDAESSHQRHYPWLESDTAVASSIVQLFSDCVGSLHTSFKDRLLPGDEGALRLHLLHYCETCTAPKMPEFILYAFHSAYQRLEWKDLHPDQRLMEAFFKVERGSPKSCFLFLGSVLCRVNWVSVLSDAWNPSPLPETQSMAVCLLFMMVLLAKEAQLVDEPDSPLLSLLGQTSSLSWHLVDLVSYQSVLGYFSSHYPPSVVLANDCSSELIVKLLKVSAGLSAHADGRKHVDIVPKCQAFTHQMVQFLSALEQTGKITFPALEREISKLLDDIIIFNPPDMDSQTRHMALSSFFVEVLMMMNNAAVPTAEFLAVSIRTWIGQRVHGLIVLPLLTAACQSLASVRHMAEITEACIMAYFKESSLDQNLGWGPVLVSLQVPQLTARDFLEECLALGSCLTLYVYLLQCLNSEQTVKNDMKMLLVVSGWLEQVYPSSAQEEAKLFLWWHQILQLSLIQLEQNDSVLTESVIRILLMLQSRQSLMAEERLSSGILGAIGLGRRSPLSNRFRVAARSMAAFLLVQVPAEDQIRLKPSSELHLAPKAQQVLTALESMTLSKQYVEYQDQILHALQFIRHPGHCLQNGKSFLALLVNRLYPEVHYLDNIR

SEQ ID NO: 189 - DNA, 92465 bp, Homo sapiens
ggtgattatttacctgaaacaacaagacctcaagagatgatgaaaatttttgcctttgccaactcactagtggaacttctggctgtggggttagaaacctttaatagagcacgctataggcagtttgtgaagcgaattggttatatgatcaggtaatactgctgttgctctacccttctctgttcctttcaccctggtcagacacagatactgcataattgggatgatggacgttttagttgtaaacctcaggtcttatttctcgtaatagttaagatttttttcttcaccatctataagatgggaatttcataattgcttccagttagagtatttcgttaattatctcaaatttaactggcttgctagatgattgttcttggagttgagatccccaaagctgttgctgggttgaagtctgggtgagagagaaggcatctaggaaaatacaggctcttactgcttcagctgtcttaataaatttagagaatatgtactgcttttctttgaattaattttatactcttttttctgctttattaattttaattgtctttactggatcatttcttatagcatatacgtatgctgttattcaacttccttccccacccaaaagaaactccataaaactacaaaacttctctccctcctttcgcttccaaaacaaaattacttttaattcatttattttatttttttatttttttgagatgagtctcgctcttttgcccaggctggagtacagtgggcacgatctcgtctcactgcagcccacgcctcctgggttcaagcaattcttgtgcctcagcctcctgagtagctgggattacaggtgcgcaccaccacacctggctaatttttgtatttttagtggagacggggtttcaccacattgcccaggctggtttcaaactcctggactcaagtgatccatctgcctcggcttcccaaagtgctgggattacaggtgtgagccaccgtgcctggcctaattcatttattttagatatgtatccattagctttataaatcagtcaagtgattataggatgccctaaaagggtgggggtcccttctttttttttgagacagggtctcactctgtcacccgggctggagtgcagtggtgcgatctcggctcactgcaacctctgcctcccaggttaaagccattctcccacctcagcctcccgaatagctgggactattggtgtgtgccaccacgcccagctaactttttgtatttttagtagagatggggtttcaccatgttggctaggctggtctccaactcctgacctcaagtgatctgcctgccttggcctcccaaagttctgggattacagccatgagctactgtgcccggcctgggggtccctcctgaggtctagagaaagccttgagtatagagttaggagaatgagacagtgggagggaggatggctggtgacttggagataaatttgttaaaagctaaaagcccatctacctgttattaacagaagtccatccagacgttctttttctgatttttcttaataaataagaccataaataaaatttgtccataagctcacttacatgatgtaggattgcgtgcttactgtatgccaggactgtgatttcttattttattctctcagtaactctataggaaggacgttggtatcattactgttttaagatcactgtttacattattgtgtaaataacagctgtagtgtattatgattattctttctttgtttttctttccatctgcttactttttgtatctagtgcagattcttctcataccttctaattgcagaacaatttcccataagggcttgccttcagatcgtctattagttcccattttattcctccatcctcacttgaacttgcttttcctcccaccgctacccaaacagctcctacagatgaagatctctaatgaaccttgtgctccagatccagtggccagttctgggtctcttcatcctacttggcatctctcacgcagcttacatagcagcctttctcgtagttagttgatcattttatccttaaaacattttctttccttggcttccaggataccacattctcctgatttctccaccatttcactgacagtcccttttctgcctccttggttgtttcattctcacttccaggcttcttaatgttagagtgtctcagggctcagtccctggacctctcttctctttatctacacttgctttttgagatgtcattcattcatctttaaatatctaaacactgttacaattctcagagttatatttccagtccatacctctctcataaacacattgtatattcaactaccaaccgagcacctccacttggatgactcattaacattgtaacgtagtgttctcaaaatgaactcactctccccccttcccaaactactactcccagtttcattaagtagcaactctattctagtttctcaggccaaaacacctggtgccacctgtggcttttctttcttttataccccacattcaatctaactgcaaattttatcatctccaccatcaaaataccatcttttatcaaatctaaaatgccaccaattattttttaagatacattttatatgccactaacatagggaaaatgctgccaaattatggcatcacatcattaatattaacatggattctgacgttctaattgcagggatactagtgtgaaagacatgcatccttttgaatcaatgaaacatgctccttccagaatctagctgcttcttaccgccttcactgctagcaccccatttcattcctaaacctcctgacttatcttcctgcttctgactttgcccaccacccgcttctgccctttccccacctcagtgtattcttaaacagccagtgttccttatgaattgtgagtcagcccattcactgtctgcccaggaccctactgtgctccccactgcactcagggaaaaagccgacgtcctcacagtggcctgcagggcccctcacgatctggtttcctgccacttttctgatttcatctccagccagtctacctctcagcacattggcctccttgctgttcctaaacatacctgacacccctcggcgcttttgcattggctgtttcttctacgtggacactcttctcatagagacttatgtgattcctcactgttttccagacattatcaaatgtccctctttagtaagccctttcgtgctcccaacccacctccttatcctgcccacccctccacctccagacatactttattcctttctctggctttatctttctcagtgtcacttacaaccatgtgacagactgtatatgactttattttatttgttgtctctttgcccttcactaaatgtaagctccatgaaggtaggattttattttccccatttcattagtttcagaacctggacaatagtaggtggatagtaggtgctcaataaatatgtgttgaataaatgaatgttggaaatgtaatataaaggtgcagatattgagctaatgaaaagtactgtattatctttcctcatgctcaggatgactcttggttatgtaagtgaccattgggcacagtatgtgagccataaccaaggctcaggattggcccaacagccctactctatggagaaactacaggttgaatttgatgaactgtttttgagggctgtcctacatgtgctgaaggccaaaaggtaagtaagacatatgatgatatttagtgagaagtaacttcctcactagtaagaaccattcggtgaaagccacttaagtaggtcttttataatagtttcttagtgtatttcatctatttcttattgagggcaaattcttgggccttggtttccttatctgtagtacccacctgttgactgaaatggtctctctctctctctcaatttctttctgttttaagataacactattctggtgtctcagttttttgccaccctgaacttttggggcagccttgagcaggggaaaacaaggatagattctatctatcacatacccactgcagtgcctgcagtgagacgcagtaggtgtgcagcatgtggtgcaaatgatttgctgattttattgttcaatttgccttccggtaagggttttaaggtctgggaatgtcatggatcttggttccctgtcttagctttgtaaatgctgtctttggatcatgctgactgtgccactgcttacagcctaggacctgtttgaggcataggcaagggcatagctgcacatcccgtgctcccttccctgagccactggccaagttgaggagtgggctctgctgcaggattatgccctccgctaggagatgcggggctgcctccacccccacccagctgtgcttatgaactactggctctcccctgctttggccctctcctgagctagctgcctacactccctcttgccatgtaactcttagccttagcccctgatttattctgtgttgtatagtaagtttgagtcttggtctgccatttactgttaccctgggaaagtcgcttaatatttgtggtctcacttttttcatttctaaaacggagatggtgataatgatactactgttccattaacctcatggatgtgtgatgagggtgaattgtggtaatatgaggaaatacattttaaaccataaaggacttttcaaatgtaagtgggggtttttcttgtgtggtttcatctggggaatagaataatctagagacttagagaaagatcaggaggtcttagctaagtgttaaccacttttagacactgtgaaggcattgagtctaacttaaatagaacttgggtatagaaatttatctttttttttttttttttgagatggagtctcactttgttgcccaggctggagtgtagtagcatgatcttggctcactgcaacctctgtgtcctgggttcaagcaactcttccacctcagccttccaagtagctgggattacaggcgcttgccatcatgcccggctaattttttgggtttgtagtagagacggggtttcaccatgttggccaggttggtcttgaactcctgacctcaagtgatctgcccggctcagcctcctaaagtgctgtgattacagacatgagccacttcacccggccttatctttagattactcctgttatacttataccataaatttggtggtctcatgagatgcaccaaatcctgttcaggactgtgtcagggcatcagtgcagtagcacctgtccactgacgctggcctggtgcatgggaggagtcttccttctctgatctgttacttgttcttgtgcttgcttagtggagaggcaaagctctcatcctagttacttactagagcttatatattgagctgtgaacccttgctgtaacattgtgtatataatttcacaaagataattgttttaaaatgttgacagctattgttcttaagtttattttaggaaacaaattatatgagaaccagatatttaaagccatgaaatttaaatttattcggcactcaaatggaaatttctggcaatagctatcccttcaacctaaaacaaaactgaactatactaaaagacagacaacaaaaatataaaccagggctgggcgtggtggctcatgcctgtaatcccagcactttggtaggctgaggtgggcggatcacctgaggtcaggagttcaagaccagcctggccaacatggtgaaaacctgtctctactaaaaatacaaaaattagctgggcgtggtggcaggcacctgtaatcccagctactcgggaggctgaggcagaagaatcgcttgaaccccggaagtggaggttgcggtgagctgagatcgcgccactgtactccagcctcagcagcagagcaagactctgtctcaaaatatatatatatgtgtgtgtgtgtatatatatgtgtgtgtgtatatatatgtgtgtgtgtatatatatgtgtatatctatatatatgtgtatatatatataaatacctatataaatatatacgtgtatgtgtgtgtatacatatgtgtgtgtgtgtgtgtgtgtgtgtgtgtgtgtgtgtgtgtatatatatgtatatatatgccagacttcctgaatgtctgccatatagggaattttatagcctgaaatacaccctgtttgtgatattacttttaagtcctctacaatttcccttctttgttttggggtataaaacagcatcaggtcccatgtgaagtgttaggataattaactaataagatagaaacctggcccaactgaccttagagaagtttcttaatctcttgttcagaagtctagctggcttttccagagtccaggtaagtgtgggtttgaactaccagttgcctgtttaggttcatagatgtggattaggcatgcactattcatttttttcttaaatttggtttatttgtaattagataatttgtaattggatgatttgtagtagttgtttctcaaatacggcaacagctttgagtgcctcgtatttttttaagtttttttttttttaatttaataacaggtaagttgctgtacattcctttgcagatttcctttttttttttttttttttgaaatggagtctcactctgttgtccaagatggagttcagtgacaccatcactgtaacctccgcctcccaggttcaagtgattctcctgcctcagcctcccgagtagctgagactataggcgcacaccaccgtgcccggctaatttttatatttttagtagagatggggtttcactatattggccaagctggtctcgaactcctgacctcaagtgatttgcccgcctcagcctcccaaagtgttgggattacaggcgtgagccaccgcatccagccattccttagcagattctgacttggggcatggccaccatcctgatacaagtgtttttttttagttgtgataacatttacatacaattttaataagcatctattgagtgctgattgtttttgagatactggtttaagtagcagataattaaaatacaaggttctagttataaactggtttatataaaaatgaacaagacatggtttctgctctcaaattgctgttaggttagtatgtcatatgtaaattacagtaccatgaggggtttctcatgttgtgttttaagaatcacttgagtctgagtcaccaagggtgactataaaggtgtaaattcttgtgccccagctgtgacctacaaaatcatggtctctataggtgaggcttgggaatctgcattttccagaaagtctccaggtggtttttctgccactacagtgtggggatcactggcagaatgtatgatgatggcaaagtcaggtatggatggagttctgtaatagtgcagaggaggaagtccaaggagggcttgacccatggaaggagccagcctggaggtgtggggtctctccaggcttgctggaatgcagtggtaactgaaggaggacagagagggctgtggttggaaatatgattcagagccatactgtggaagcctttgaatgtgggctgaggaatttgaactttgttcagtgttcagagaggagtactggatggatttcgattttcctcccacccactgcacatgtgtctgtgggcacacgtgtacctgtgtgtgtgctcagacacacacatccacagctggcctctctgccacccactactgtgtgtgccttagtacctgtgtgcgccttagtagcctgtgtgcattggtgctaatatccgtaataataatacttattatttttgagttggagtttcactcgtgttgcccaggctggagtacaatggtgcgatcttggcttactgcaatctctacctcctgggttcaagtgattctcctgcctcagcctcccaagtagctggaattacaggcatgcgccaccacgcttggctaattttgtatttttagtaaagatggggtttcaccatgttggtcaggctggtctcgaactcctgacctcaagtgatccacctgcctcggcctcctaaagtgttgggattacaggcgtgagccaccacgcccggccatatccataattattgtcttggtttttgtgaggatggtttgagttgatattgtacatacatgtatacacacacacatgcacacattgttgtggttagaacagtccctggcacagactgggtggtttgtatttgctgttattcttagccatccttgaggtgtttatgactaaagcatattagaaaaatcatagtgtgatttaagaatctttttttccttgagagccaatggtttgtctactttcttagtgtaatgaagctgattaataaataaaatgattcctgcttacatgcagacttggcatttggctgtttatgtccgagatgccctttgggactctgtctgtgcaaatgctgtggaagctcttctacctcatgcaccaggtggagagcgagaacctgcagcagctctcctcctccctgcagcccgcccagtgcaagcagcagctccaaggtacagccccgccgagcagtcggcgtccagctctccctatctttttgtgcttctcttcagggcttaatttttacttttagaaggactaagagaaaatgttttactctacatactcatgtgtaatgattttgaaattcaggagactgcttcacagttttgatgtattaaatagcaactagcatatctgaaatcaaaatttgattagtcccaaacagtataccaatacacacaatattctaacttttaggaagcacttttttgcatgtgtgtgtgaaattattctagttgacagttgtattaacagatatgtattaattgtctagaaatttgttaaggctttgtgcccagccattttaatatctttcttttattgctgtttttttaaagttgtattgtttttatgaactaaagatgtagacaggtgtactttaaaaattaattttggtgaaaacttaagtttttgcgtcataccacctctaaactacaggatatttatttatttttattttttattttttttgagacagggtctcactctatcacccaggttggagtggagtggtgtgctcttggctgactgcaacctccacctcctgggttcaagtgattctagtgcctcagcctcctgagtagctgggcttacaggtccacgctatcacgcctggctattttttgtatttttagtagagacatggtttcatcatgttgcccaggctggtcttgaactcctgacctcaggtgatctgcctgcttcggcctcccaagtgctgtgattacaggcgtgagccaccgtgcctggccaggatatttacttataacaaaattataatgttcgaaatgaaaaacaccatttaattagatgtatgttgtagtgattttaaaaaactaccctatacgttaaaaaagatagacaatttactgaaatacaagactaaaaaaaaacaccaaagataattctgttttccaagtgttttttccttcacagcaggaagtaaaggctgttttccaaatttttaaatgtctgtatcacttaaaagaaaatcatatactttaaaaattattgggcctctactgtttgcaaagtagtttctgcagacattcatgatttatttttttatttccatttcttttttttttttgagaatgagcattgccccggctggagtgcagtggtgcaacttcagctccctgcaacttccatctcccgggctcaagtgattctcctagctcagcctcctgagtagctgggattacaggtgtgcaccaccatgcccagctaatttttatattctagtagagacagggtttcacattgttggccaggctggtcttgaactcctgacctcaagtgatccacctgccttggcctcccaaaacgctgggataataggcgtgagccaccgtactcagcctccatttctgtctctcttgatgtctttattcttctgtttctgtttttttcttttatggggctctgcatgcgtcctcttttgtccctttctgtttttctttctatcttcttagtggtagctctggattccttatattattattctttgtaaagtgcttctccactgtcctgggggcagtgcttctattagaccattgccgtggttggacctgggcttacgagtgagctaggtgagaggtctcacagccattgtctgtcctctggcggctatttctgtggttgaaatagctaatacagaagcagacatttcctttggaagtgcctgggatggtcagcagcactactttgtatacctgagtcctgggtaggtctcctttgtagtgtcatctcccttcattgcggacttactatctgccaggctctgtgttagcatgtggcagatggagccgatgtcaaacagctcagctctgtagtggatgtgattccagaccctgaagtggcagtaccagccttgccttgccctagagctttggatcctgctgctggagttttctgtctggactccaggcttccacggcacttttatctttatctcccttagggcctgtatcacctgacacaggagttagtggcacagtagagaagtttcatctgcctactatgttctagctttgagagtggagtctttgcaaaatttgatcctcctgctctaatttgctgttttttcatcttctcctttgcttaatcttttatatatcaattttgttaggaggcttgatttttattgtttgtggaagaataaggctttctaacatcttttcccttcctcactttttatatttagtaaatgccagaagtgcttattctttataaccagttcttatttatctgtggtaataggagtagggtgagcttgaaatcagtttccagggaacaaattttaactagttttaacattttctaactagcagatttcttagcaatgattgttaaaaaccagtctgttttaatttggcttctttttgtttatttctagtctaatcaacattctgactactagtaaagtgtagccataagcaaatctgatgataaataactgtagaaatgtgtttgtccttatagttaatattttaaaagctaattagaaagttatttcactttcccattgttttttctatagagttatttaaaatataaggccttttccttgatttgtaccttaaacattgtaagtttgaatgataattcttttttttctttttaaatatcctttcacaatatacgttagaatgatcatgccaattttcattattctgggaatactttgtgtaataatttccactataaatccaatttggagatggaaaatgaaaattggtttggtaaatgtcccagagttattttgaaaatgcaggaaatttggtgagctatctaccttggtttctcaaatgtgtaaatatgaaaagaattattggcttgttgccttcttactgtgaaaagttccatcaaggatatatatatatatgtatatatttaatttaattttattattattatttttttgaaatggagtcttgctctgttgcccaggtgggagtacagtggtgtgatcttggctcactgcaacctccgcctcccaggttcaagtgattctcctgcgtcagtctcccgagtagctgggactacaggcgtgtgccaccacgcccagctaatttttgtatttttagtagagacgaggcttcaccatgttggccaggctggcctcaaactcctgacttcaagtgatctgcccatctttggcctctgaaagtgctgggattacaggtgtgagccacagcgcccggccaagcacatatatttttaaaatgggctttttttcctttctgctgtagaactttgcatgtagtttactgtcatgtatatttgtgaatattgcttcctaatggcagaatttagtattgcttttacaacatcctttgtgatataggcaaaacatatcacatttattatatcgtttatgacattcattagtatttcatttacggttataactaatttcttgcccccagtttttcttcataagcaaatctcttttttttggaatgccctatttgtgccaagtagttgctagtattagcagttttcattagtcaggtctttgtttgtctgacagttaccaagtagcttcaagtgtgcctttgaagttggcagtactgcctttgaaggtgactgcctggtgacagcagcagtgctttgcagttaactaagcacgtcaccagtgacatgctatttaaccttcttattaagtaaccttttgagacagatgtgggtactgaagctaagagatgttaaatgttttctgtgaggctacattatatttagagtttgttggaatttcagaggccatctggtccagccttattcctgatgcctgtagaaatctattttggaacaaagaaagaccttttgtatctttaaatattcctaaatctttttctctggaagagtgattaaaagatataaatttattctttccccactctaattttcttgatatgaacttgcagacccagaacattttaccaactttgagaagtgtctttcttctatgaatagctcagaagagatttgccttctgactacctttgctcagatggctcaggccagaagaaccaatgtggacgaagacttcataaaaattattgttctggagatatatgaggttagaatatgaagttttataaatcagctaaaaatgttttcttttggattgtccatctgttgattttttgggggattgcttttacaaattgtgacttatttagctactgtctacacttcagagaagggatagagaatcagtggaacattattttgctacagggattattgaaaatgtgaattatatccattccccagtacttattatcttttgaaatttgttgcaccagtttcagtaagggagagacaatgtgacacagcctgacacagtttttatgatgtatgtttccctcgcccccaccccttcaactaaactcttccactctggctagtagcagaaacctagcttcccagccagtttaaatgagatggtgggaagaatattgaacctggagttaggatacctgagttttaactctgctattaattggccatctcacatcaaaaaagataacttattaccccaggcttcattttcctcatctataatatgaaattacaggctgggaggagatccttgcattcttcatcttttcactgagccatccgtgaaggtggaggggagtgaaatttggacccctgagcatctagggactagcccaaagtggttaccaaaatgttcattggagttttttgtatatttaaaaagccttgcacattttacactttaagctgtcatttatctgtttatctgcatacaaaatatctcctccaaagtattctagtgtgctcaagtaaaattatgtttgaagatgattatttgggttttattatcttcccctaataatccagtttgagaatgacaaacctggatgttctttccaggatcaaatacttgattcagctgttcctatactggtacttcataaccatgcataaagttaagatctcgatggatctggaattcagactgtcttcatgatctgaaaaacttggggagagaagacatattttcacagacattaagtgacattctcaagatctgttgctaaagtaatatttatgctcttgagtaaagtttccagtgttttgaccaggagtcacaataaaaattacattctatattacattctgatcctgtgtgtgtatgtacaattgaagcaatacttaatctacctgtgatacactattacatttttctattttattttattctgttatttttctgtatattccattgtgttaaaaaataccattggcattaatggattgtaacatacactttggaagacataattcaaaaggagttggtaaacaatgttttagaaggtcttgtagttagggttcttattctgtaggggaagctaggcatttccatgaaatgcattctgattttcatcattgtagtgatttcctcagatttagaaaagttttgaaactgcaggaaccattttattgttaccgacagactttgggatatactttttgaatccacacttgaagtcattgttataagaagttgccattctcttatattcctctccctgcacctttcggcctcagagtagacagttgcctgtatgaagttttaacattttttggaacatagtgtcaattaaggctcaatgtaagattctttctgctttgcttgaaaaaatgatataagtgtgttttgactgctaattgatattaaaagtgccatcttcttcccccttccccccatttaggtatcttatgtcaccttgtctaccagagagactttttcaaaggttggtcgagagcttttagggactatcacagctgttcaccctgagataatttccgtccttctggatagagttcaagagaccattgaccaggttggaatggtaagagcactgattttgtttgtttttgttttttcaaatcttggagtaatggaacattggcaaaaataggaaggttcttgggaatgatcttgtcactaggggtataaacaggataaaaggaactaacatttactgtgccagcctctgtgtcactcaccacaccaacttgggattagctgctgcttataaaaagatgtgattgtttctctcaaatctcaaggttgacttgtccacctcgttcaataacatatttttactttacttatgacctatagttaattaacaatttttatttcataatttgtttggctttcatagtttttatattttatacttggaataaacaactgacaaagaaggtcctatttaaagtcagccaaaagcaaaataaatagtatgtagtaacttaagttgaggaggacacatttaatttgtttctgtcatttgtcacaatcccttttgcaatcttcatgtagtttttcaaaagttttcttgagatgtaattcacataccatacaatttacctatttaaagtatatacgtcagtggtttttagtctattcacagatatgtgcaactctcaacacagtcaattttagagcattttcatcacctcaaaaacccttagacttcagctatcactttttttttttttgagatggagttttgctcttgttacccaggctggagtgcagtggctcaatctcggctcactgcaacctctgcctccctacaacctctgcctcccaggttcaagtgattctcctatctcagcctcccaagtagctgggattacaggcgcccgccaccatgcccagctaatttttttgtatttttaatagagacgaggtttcactgtgttggtcaggctggtcttgaactcctaacctcaggtgatccacccacctcggtctcccaaagtgctgggattacaggcatgagccaccgtgcctggcccagctatcactcttactcttctatctccttcagctctaagaagctttcttaggttggggtcctaagcacctttcatagattagggccctaagccctaatctaatgtctgtctctagatttttgcctatttcagacatttcatattaatggaactatgtaatatatggtctttgtgactggtttatttcagctagcatgatatcctcaaggttcatccatgttgtagcatgtgtcagcatttacttcatttttaagcctgtataataattccttggtgcgtgtgtgtgtgtgtgtgtgtgtgtgtgtgtgtgtgtgtgtgtataactttttgtttatccattcagtcattgatggggacttgggttgcttctgccttttgactattgtgaataatgtttctgtgaatgcggatgtaccaatatctctttcgggccttgctttcacttcttttgggcatgtgagaagtagaattgctggatcatgtcataattctatttttagtcttttgaggagccatcatactgttttccatagtggcagtacatggtcattttccttttaagaaaaacagtgttggctgggcacagtggcttacgcctgtaatcccagcacttcgggaggccgaggcgggtggatcacgaggtcaggagatcgagaccatcctggctaacacggtgaaatcccgtctctactaaaaatggaaaaaaaaacaaattagccgggtgtggtggcgggcacctgtagtcccagctactcaggaggctgaggcaggagaatggcatgaacctgggaggcggagcttgcagtgagctgagatcacgccactgcactccagcctgggctacagatagagactctgtctcaaaaaaaaaaaaaaagaaaagaaaaacattgtatgctactgcaagatgattatattgagataaaaagcttttcatatacagttcaatacagtaggaagttttctgttgctccttcttgagtgattagtggatgaattccagagaaatgtacagtggatcatatgattctttcagtttgagctcatgacatttttctcaagtgtttttcttgtttttggcttctttttttttttttctcccaagacagagtcttgccctgtcacccaggctggagtgcagtggttcaatctcagctcactgcaacctccgccaatgggttcaagcgattctcctgcctcctgagtagttgggattacaggcgcgtgccaccatgcctggctaatttttagtagagacgaggtttcaccatgttggccaggctggtctcaaactcctgacctcaggtgatctgtccacctgggccccccaaagtgctgggattacaggcatgagccatcatgcctggcccagatttatcttaatttgcacacttggatgtgttattttaaaagtagtgctgtagactttctgtaaataggatttaaaaattttttattgtggattatttcaaatacatataaaagtaatgagaatagtatggtataatggcctatcatcaagttttaacaatagctatcaactcttggtctctttgttgatcttgtttcatcttaccaccctcccactcaccccacccccggcctggatggcttggaagccaatagagtatctttctaaatgccatagaatgaataattacttaaagtgctaaattcttttgcaaagtgaatagccgtcccccgatttatcatgactttaaaaatgtgcattagtgtggtggtttacctaaactgaagcataccaatttgaatatttaaaaagattgatctttacaaaggattatgaaatgtgcttttgatgtatcatcaattttaatacccacttgatttggttgtccgtgatttccatttcacttgtctaaaaattaaacaaaaactccagttccttttggagaaatttttttacaagcagtttaataatataatattgtagtaatatagcattgtttctaagtctttatttaatgattattgttttctttttaataaggtttctctatacttgtttaaagaactgcctttgtatctttggcaaccttctgcatctgagatagcggtgattcgggattggttattgaattacaacctgacagtggtgaagaataaactggcctgtgttattcttgaaggactgaattggggatttgctaaacaggtatgtgttcaaaccattccctggagactggaggttgtacatgcatctgtttcaaagaaggattttgtcaaaacactaacatttctgagtaccatttgcaaggtctacaaattctttgtagctgtgtcagagtttaggattttctgtttaattctcttttgcagaatgagcaactattaaatgaggataaattgttccacattgaaaattcttccctttttccttattcccatgtatctgtttttattttttattttttttgtttgagacagagtcttgccctgtcacccaggctggagtgcggtggcactatcttggctcactgcaacctcctcctcccaggttcaagcaattctcctgcatcagcctcctaagtagctaggattacaggtgcatgccaccacacctgactaatttttgtattttttagtagagacagggttttgccatgttggccaggctggtctcgaactcctgacctcaagtgatccaccttgcctcggcttcccaaagtgctggaattacaggcatgagccaccgtgcctggctgtatctgttgttttgtctctggctagttactttagtttctcctaattgcctcttctgcctctcattcctttttctcctgtaatttgtcttgcatgtcattgtcagggttgttttctgaaacactatgcattggttaagagtctgagctctaagccagcctccctgggttctgatcccagttctgccaccttctggctgtgtgactctgagcaagtttcctaaactctttgggccttagttgcttatttgtaaacattcatattaacgagtatacctcaatgtctcacagggttgttttttgttttgttttgagatggagtctcaatatgctgcccaggctggccttgaactcctgggcttaagagagccttctgccgagtagctgggattacaggcgcgtgccactgcgcatagagttgttgtaaaggttaaacaaatgaggaaacacaagatgtttaggatgattcttgccacacattacgtactcagtggtgtggttattattaagggtttgctatgtagcatatatcttcagagatacatttcaagtgattttcactgttaaaagaccttctctgcctctttaccataggccttatttgttagctcttccataagaagattaacatttaaaagggaaaatggtggcaaactcagccctttacacctgtctgacaggttttgttctgagcaagtcatttagtcctggacagcatgatacctgttgtgcagatgaggaaactgaagcccgggagcttttctgctgaggtgtccttgaccacttgggactgcccatagattcatctgggccctctctcattgacatgctcgtaggcaagagctacagggggctgttttccaccttcacattctctggcttgtgaacagaatcacctaggctctcctcttgaagagctgcgtgagagtctccttatgcctttgttaagagttaggaaagtcatctttctgaaaggtttaaggaatgtatttttccaggctgcaaaggaagatagtgtaggaaatttgataggcaacttcaggcatcagaaggaatattttacctgtgttgctgagtgtcttatttattgtaactaatgatagaacaggaaaagggaatgtagacataatttattaaatatctttctcttttttttttttttttgagtcagaatctcactctgtcacccaggctggagtgcagtggcacgatttggctcactgcaacctctgcctcctgggttcaatcaattctgctgcttcaggcttccaagtagctggaactacaggcgtgcaccaccgtacttggctaattttgtatttttagtagagacaaggtttcaccatgttggccaggctggtttcaaactcctgacctcaagttatctgtctgtcttggcttcccaaagtgctgggattacaggcatgaaccaccacgcctagacagttcattaaatatttttctgtttaattaagcatcttcctggtttgtggcgttgcccttgacccgaagtgtttgtagagattcttgggtggaatgggggatgacattcaaagataaccttttttggctggagtaggggttaagtcaggttcaaacctatctaggtacagtgttattgcccttgacagttttttgcccattgtcattttatagtttgactgtgtgggatgtgatttttggaacatttagcttctacatcgaagatcctttgttactattctgcctaatgttttgattcaaaggtacaaaaacaaaacaaaaccaaggttgtatgtttgtgattatttttctctttaaaaggctacccttcatctggatcaagcagtccatgctgaagtggctttaatggttcttgaagcttatcagaagtaccttgcacagaagccatatgctgggattctctctgaaagtatgaagcaggtatttccttctcttctgatttggaaacatgaatctttatcttcccaagacatttagaaataaagatgatagacttatactattgaccattaggtatcctaagaacatttctagcaatttaagatgttataattgacttctatggtttgataaagattcttctttaagaaatagcctgtatataactattctaatattacagaatttgaattgaactgcagtggtgtgttagagcttggttgtactggctctggagaactgacttaaatttttagaaactttgcaagccaggttattaaaccattggtagcttaaaattgaccatggtgggaatttttacaccaccaaaattgacaagcgctatatatgagacctccgtcctgatggttaaacttatttatcggcacactattcattgagtatcaacttttatgtcacttttcttttacatgagctaagatcaggttcacaaagtgactagcaagtaagcgcaagttgcgagtgaaaaattgctttgatgtagtgcagtgaacattaattggagaccagcaagtagaatattcctctgcgttgagggcattgttggtcacaaaaggagatgagtgtatgagcttactgatttaatttgtgtgtgactaatgtggctcaaaataaataattgttttaggtttcatatttggccagtattgttcgatatggagagacacccgagacctcatttaaccaatgggcctggaatttaatcttgaggctaaaactgcacaaaaacgattatggaatacagccgaattgtccagctgttcccttctccgtcactgtgcctgacatgacagagtcacccacgtttcatcctctcttgaaggctgtgaaagcgggcatgcccattggctgttatctagccttatctatgacagctgtgggccacaggtacagtgttgggctgaaccactagggttactgaaccttgcagatagttctagaattttatgtttcatatcccaagttctgaggcctctgtcaaacctattgcggagcaattgggccaaataataatccttgattaacagcttatcaaggggagatgctgcccaaattcacatacttcagatttgtacaagcaagtcacctaaatgttactttatgaagagagttctgcttgtctcctggagtggaatgttcgtgtcagcagtagattcgtactgtcttcctcagaattgtgatcaaataaaaataattgatcacctgtagtaaaatttttgaaaaattgatcgtagcccaactcaggcttttttttttttttttttaaattttactttaagttctagggtacatgtgcacaacgtgcaggtttgctacatacatatacatgtgccatgttggtttgctgcagtcattaactcatcatttacattaggtatttctcctaatgctatccctcacccagccccccaccccatgacaggccctggtgtgtgatgttccctgctctatgtccaggtgttctcattgttcaatttccacctatgagtgagaacatgtggtgtttggttttcttaactagaggtccccttaactgtctagaagaatgaaatgcctgactaggtcagatgcctctctgatatgagcccatagctgtctgtatgtcttctactggagcatttatcacactatatcatagttaatctgttcaattttctcagagattcagttatatataacttctatgagagaagtgcccaggaatggcatttgtcttgtgttaccattttatcactagtgatgaagactatatctggtgcagtaaataattgaatgcatgaatgacttctcagttgattaaacatccttctctttaaagattcttttcttatgcattaatttttttctagtctatttatttgtcttcacactctttgacctctgctttctgattcttatgttttagactcactgtaacactttttagcatcctcatttcaacatcttgttccacagtaagtgtaatttcagtgggataccagttgcaatcagctgtagtcttcagcgttgtgctatgaagtaggagagataaagaattgtttgatagctttccttgggttgttgacagttttgttgagatgataggcataaataaatcggcagtactatagaatataattgcaggctggatgatgtgtggaaagcagtggttctcaacttctgctgttctttagattcacttttggagccttttaaaaatcccagtgcagggaaaagggtgagaatcctggcctaagtgggctgggggccagttctctaagtatctctaatgtacaccctggattgagaactacttagaagctgagcagaaagaatgtaaaggaaggagagatcagtatggtgggataccttcatggaagagctgacttttggaaaggagtcttaaattagacaagacatctgtcgcagtttggatgtttgtccccctaaacctcatgttgacatttgatccccagtgttggagatggaacctaatgggaggtgtttgggtcatgtgggctgatccctcatgaatgtcttagtgccatcctctcagtaatgaatgagttcttgtctcttagttcccatgagaattggttgttaagaagagcctggcaccccgcctcctcctcacttcctgtctcaccatgtgatctctgaacctgccagctcccgttggccttctgccatgtgtggacgcagcctgaggctctcaccagatgcccagtcttccagccggcagaattatgactcaaataagcctttttttctttattaattgcccagtctcaggtattcctttatagcagtgcaacatggactaagacaacatcctaggctgatgagcagagtgatgttgtgttcctcttacagttacttagtgcccacagttacttcaagggccatctcctgccacctgcagcccctgtacattctgaacagcacactcactgtgttttattgtcattgtaatctcccctgctcctcattgactgtttgctctatgaaggtagggacattgtcctgttcaattgtgtatctctagatcttatacttagtaggtattcaacaaatgctggtgggttgaatgaatgtggaaaggagcctcaggtgtctgagtgggtaaggggagaggaagggaaatgatgaggaaacacttctcactgacgcctgtgattcatgttggagaatggaggtgatcaggtgtttggttgggccaaattatggagagatttgaaagctaagtaaaagaaggtagaattgatttagaaaagaggagacctgataagggtccttaggaacatactctttatattgtttccagtagctctagtgttattaacggcttcctgtacttcaggtttcccatctctaaaatgggagtactaataacaccaaacttactttatgaggcttaagtgagtcagagcacatgtaggccgggtgcagtggctcacgcctgtaatcccagcactttgggaggccgaggcgggcggatcacgaggtcaggagatcgagaccatcctggctaacacggtgaaaccccgtctctactaaaaatacaaaaaattagccgggcgtggtggcgggcgcctgtagtcccagctactcgggaggctgaggcaggagaatggcgtgaacctgggaggcggagcttgcagtgagccgagattgcgccactgcactccagcctgggcgacagagcgagactctgtctcaaaaaaaaaaaaaaaaccacacatgtaacatgcctagaacagtgtctgacgtgattctcttgagtgcagttatctgaacttaagtgttttatgatttctcgaatttcttgtatccattctgggaccatagccctttattcactgatactgctgtgggctctctctagagataacttttgatttgtgctgatcactgaatcctgaatgggagtgagagtgagaatgagcatttcctctcagggctgatctctagtgtaaaactccatggtgggcatttgggattaggtgtactggaatatagaagtaacttaaaacaatcttaggtatgggtggagtaggcagggacataagttgtttgtgaatataatattacagacattgtagagaagtcagaaaatcacccagaatatttcccatcataaaatcattgattttttttctgtttattttcatccatcatttttcctttgatctttttaaagatgtatgtataattttatatccttagtttttcactttacaattgtaagtagcttccttgtggcataacctttgcacaattactttattttttgaaatgattttctcccccagaattaaagcagtataaccaaactgcagaattaggaaagtggagaaaaagccactcacttctgccactcttgtacaatgactcttttgttgtgacattgtccctgtattcgcctccacaaataacttttctttactagtagttatgatcatgagtataaaattttatgtcttattccctagtatctttatagcagaagtgtttttccacattgcctttggtcatcatgtgtattattttaaaatgatacaataatatttccaattgaaaggatttttctaaaattgccttaagtcattttcaacctctcagttttagagttaaaaataaacctgaaaagcgcctctttatatggatcatattttatatttttttccgtatttgagattattttttaaggatagattctttgaagtgaggcagagaataaaacttttatgccaaattggttttagcagaattttgcagtttatgcaggttgagtatccctaatctgaaaatctaaactttgaaatgctccaaaatctgaaactttgagttctgacattgcactcaaaggaaatgttcattggggcattttggatttgggacttttggattagggatgctcagcttttaagtatgatacgagtgttccaaaatctaaaatacttggtctcaagcatttcagttaagggatagtcaacctgtactgacagattgaggtcacttttgagtctcctctttgctgtgataccttgtgggaatatccagacaaggagagtccctacggctcttaggagaagctctttttgagaaataaaatatggtagtagagagcactctggattagaaatttgcaaactggcgttctcattttgaccttactctaggaaattatgtgaatttgggcatgatacttcaccttcctcatccatacaatgaaaataaagattaacttttaagtttctttgcaattctagaattctgggtttagtatttctgtgtgaagattgggtataaaacatgtgttggagacctgagataacccaaggtattgaaggctcataactcattggaagaacagaattttatgaaccagctcccttgtgtattcagtgcctttctctttttccatagcattgagaagttctgtgcagaaggcatcccactattgggaattctggtccagtcaagacatttgagaacagtggttcatgtcctggataagattctgcctttattttacccttgccagtattaccttctgaagaatgagcagtaagtgtgttccatctatggcaggagacactcttaaacagtccagcaagtacaaatgattgtgtcttctggtttcttaagtaaaataaagggaatgctatttcaacagcgtattatggggcaaaaatattctgcaccccagtttagaatgcaggttgatgaacagtgattctaataatgactccagttttattaccatgaaagatatttttccttttcatttattataactttgaattgcttattaaagcttaatagtatatgaaggagcagttgtttccctgagattctgggaatcgtgcttctgatattaagcagcaaatggtttgccattgtaacaatagaaaagattgttttaaattgtttacagtgcacatagtgcagtgttgcaaacagataagatgctaggaaggtgggaagagaacaacctgtctagggaggcaagagtaaagcatctggctggggcctcatgaacagtgatgaaaggggaggtgaggcctcaccccatatggaggaaccctgtacagtggggacatgaagtacatccaaaggcacaaggggagcattacagttttcctgttatgtgtcttttcaagcagtatgtctccaatttgcccaaaagagcttattaaatatggattcccaggtttctcccccggagatgttactttagtagaaatgggttaggtcctgggaactactcacctaacccttcaacccctttttaagaatcagcaccctgggtatgaggcaagtttggaaactgaatggtttggaaacatctctgcctttattcatggagttggggagtgaggaggggagagtggtgcctttgggtgtttttcctctaatgctgtttaacttgcatgtgtttgtgtgtcgtggatctgttcttaatacctctgtgggtagatagaattccttttaacccatgttaaatgtgaaaactttattcttctagaatcccttcttaaatagtgctttggtcgaaaaatgggaccaatttaggaattttctgtttcctcataagtaattagggaaaattctgttgagttctgatcggaaggtaaagtgcgtcctcctgtgtgcttggcaggtttttatcgcatctcctcttgttcctacacttggacagcggtgtccctcagggtgtcacacaacaggtcacccacaaggtggcacagcacctgacaggagccagccatggggacaacgtgaagcttctcaacagcatgatccaggtgagggccttgcaagcccctaagcacactcccgcctgtcttcccaaccaagacctctagcgttagcacacttaggttttagtcatttcagatcacttggcttagtgtgcttttggccaagaaaggcaatagatttgggatttgtagtggaggtagatagcattttgttgctatttaaaaaatgagaggctggttgttatctttcccatcacatgagccttttctccacaggcacacatatctgtaagcactcagcccaatgaagtgggccccgttgctgtgttggagttctgggttcaggctctcataagccagcatctctggtaccgagaacaacctatcctcttcctcatggaccacttgtgtaaagcagcttttcagctgatgcaggaagactgcatacagaaattactctaccaacaacataaggtaattaacctgttagagaatttatctttcagtgattggctagataaagtagctttctaaaaagattcccccaagtacagttttcagttctactctgtggccattaccttctttaagctttgccttaatggtaccttatcccgataatcgtagtccactagcgtagaccctagggaagttggaaaggacagcccaggaagagtcccgcttgttacatttggctgtaatgctctgccttggactattgctgctggtggactcatccttgaaatctctgtcttatcagaatcttgtattgtagtaagacagttgctgatactcttgtaaaggtcattgataagattttccttaaaacctcctctctctgctccacatctcccggtgtagaatgccttgggttaccactgtgaccggagtctgctctcatctttggtaagctggattgtggcaggcaacatcactccttcctttgtggagggcttggccacgcccactcaggtaggaaactcactgagaggatcatttgttatctttgtgaactttaatctcatgatcatccttacaaagaaattactaattgtctaaactaacttttatttagcacttattctagtgtaagtatactttttcatttaatctttacagtagccctttggtgaggttgtgctgttgccattcctgttttacagaggagttaactgagttttttatttttatttttattttttttgagatggagttttgctcttgttgcccaggctggagtgcaatggcgcgatctcagctcactgcaacctctgcctcccgggttcaagctattcccctgccacagcctcccgagtagctgggattacaggcatgcgccaccacgcccagctaaccttgtatttttagtagagtcagggtttctccatgttggtcaggctggtctcgaactcctcacctcaggtgatccgcccacctcggcctcccaaagtgctgggattacaggtgtgagccaccgcgccctgcctgagttgtttctttttttttttttttaaattaaaaaacatttttggatacagggcctcactttgttgcccaggctggtctcaatctcctgttgttaagtgattctcctgctcccagcctccctagtatttggggactacaggcacactactgtgtctagctgtaactgaggttcagtggaattaaggactgtctcaggagtagacagctcttgatcataccgcagccagccggactgcagagactgcccagcagcactgcagagaggtttagagtggtcactggaaccagacagtctgggtttcaatctggtttctgccgtttgttagctctgtgccttgggcagcttgcctacctatctgtcctcagttttctcaattgtcaaatgggaataatgatggcacctatatgtaaagcatttagaacagtgcttcgcacataaccagtgctcactgagtgttggccattgttattattatcatcagcagcagcattatttttatcattaccacctcttagactttgtgtataaaattatgtctgtttcatctcttaaatcagtagtaatgttcttcaacctcttatttgtcttacttcttgctcttcttcccacctctcatggattgagctggaacaaactccttgctgttacctagacacatcccgggcttttcctctttttgtctctgcctagcggattctcttaccagcatgcctttccctctgacatctacatagaaccttctctgatatagcactttaccttgactcagtcctcgtcactgctcaacttcacattttgcttacttatatattagtcttgtctactccagtagatggaagacttcttaaagacagagcccctgtctggtcctctttcctgtctctcttgcacacagatcttgcctggtaaatatggagttaatgaacatcttgtactaaagtagcctttccaaaggaatgtaacattttccaatgatctattttatttaaatttatatctgcgacaaggatataggtaggtataaaaaggtgttaattttagaaactgcaaatatttgctgattgagcttgagataggaagagatttaaattgtggaatatcaggatgtatttcgtcagtggggcgagctcctccttcccctcccctttatctggtgtcattataggtctggtttgcctggacagtgctcaacatggaatccatctttgaagaggactcccagctccggagagttattgaaggggaattggtgataaactctgctttcacccctgaccaagctctgaaggtacaaatagcagttctgcatttgagtggtagaaggtggcttacactttgatgctgatggattcacccgtagcttttgagcttttgtgttttattttgttgtgaatgtttggaaagctcaacaaccaaaccaatacttaaaactgtgtaattgaagagtacttgcttctcaaggtttgtttaacaagagtctcagcctagtatttgaaggctggatcattgcacatgtgacgggtgttgtcattgcatcccacgtacatcagaattccctggagaacttgttaaaaagcagattcctagacctcatcttctgggatttggagtctctgagtctcgagtgggacaaggaggttattttttgaaactcctagctgattcttaggcttactaatatgtgggaaagactggaataaggctttaaagaccttctattttagtatagattttgcttttgggtttcagagcctgttaaagaatttgcttttgggtttcagagcctctcaaagaattcagcattctcgaatgtccttttgaaatctgaattttcaaaagattgataaagtttgacagtcacatagtgacattttctttttttctttttcttttttttttttttgagacagagtcttgccctgtcgcccgggctggaattttacaatggcacaatctcagctcactgcaacctccaccttccgggttcaagcaattctcatgcctcagcctcccgagtagctgggattacaggagtgcaccaccacacccagctaatttttctatttttagtagagacaaggttttgccgtgttggccaggctggtcttgaactcttgacctgaagtgatccacctgctttggcctcccaaagtgctgggattacaggtgtgagccactgtccccggctttacttttggttttcatatctttctattcccttgcactataacgttgtattcgccaaggaatttcagaaatgaaaatgaggttagactagatgactcttaagacccatacccattttggggtctgtgaagtgttttgacagaataaaaagctgccctacatgtcttgctaccaaggaggttaaaatgttaactagtggattggagaagtgagttttatgtgacttttaaaaaatatattattgaattgaaaacagaatgtttggtgtttcagttggatcacttagaaagagttaaccgtttgcatttatgttcattttgtggctactcaaagccctttcttttttgtagaaagcccagacccagctgaagctccccatcgtgccatccctccagaggctgctgatttatcgctgggcccaccaggctctggtcacaccttctgatcaccccctcctgccactcatttggcagaagttcttccttctgtatcttcaccgtccgggaccacagtatgggtatgctgcccagtattgtaggtttctgtgagtccatttctgcctttgcactgctctcattctatgtgttcttagactgtggagtgtgagttggaatcattctttggtgatctctggtgaggactctttctctgtctctatgtttgacatttattagactggatctttattgagttgctggtgtcttgtggcagcttctctttaccatcttccatgaccagtgtagtaaagacaacaccctgggattgggcaaggtttcacacagaacttctggagatgcaaagggagagcaactgccttaaactgaggctgcctgtgtgaccgtcatggggcttgtaggaggggaccttgtgatgagtggtgcgcgtgtgaacaaaggccaggctttgtctgtcacctgtaggttgtacttgggaatattcagcattttcatgggattcatatgaagatactccacccagccagagccatccactattacgaaccattgctctctagctcctgcctcaattcctcattcccttaacttactcatttgaaatatatagatactggctgggcatggtggctcacacctgtaatcccagcactttgggaggccaaggagggaggatcacttgaggtcaagagttcgagacaagcctggccaacatggtgaaactctgtctctactaaaaatagaaaacttggcccagcacggccaggcgcggtggctcacgcctgtaatcccagcactttgggaggccgaggcgggtggatcatgagatcaggagatcaagaccatcctggctaacatggtgaaaccccgtctctactaaaaaaaaaaatacaaaaaaattagccaggcgtggtggcgggtgcctgcagtcccagctacttaggaggctgaggcaggagaatggtgtgaacccaggaggcggagcttgcagtgagctgtgatcacgccagtgcactccagcctgggtgacagagcaagagtctgtctaaaaaaaaaaaaaaacaacccagcgcagtggcgcatgcttgtaatcccagctacttgggaggctgaggcaggagagtcaggagagtcgccaggaggtggaggttgcagtgagcagtgattatgccactgcactccagcctgggtgacagagcgagactctgtctcaaaaaaaaaatgtatatatatatatatatgtgtgtgtgtgtgtgtgtgtgtgtgtgtgtgtatagatagatagatagatagatagattcttagtcgcttctgttttagtttttgccagattgcaagttcttcaagaatagaaaccatctttatgctgtacctctaagtagtgatgtcttaaatttgtgtagcatttcacactttttaaaactactttcatatacaccatcttgttggaccatcaaaataatctttgaggtagaaataataggtgttaatttaatggtgtatatccacaatcacagtaaattgccttgctaattaactgctattttatgccatacagaaagtacatcttgtgttgaaaggttatagatctgtgcttgtgttttttaaggttacccatagatggttgtattggaagaaggttttttcaaagtcctgctcatatcaatttgttgaaagaaatgaagagacgtttgaccgaggtggctgacttccaccatgctgcaagcaaggccctccgtgttccagcagagggcagtgaagggctgccagagagccactctggcacccctggttacctgacttcaccagaactgcacaaggagctggtgaggtgagtatggttatttagccacctacattgttgtttgcagcacaggtactatgctggagcagttaactgtgttacaaactgctagatgttattctcttaacacggttagattgaatatggaaggtggctttgatatagatttgcatcttgaaatgtttctcttttatgttcctcaagagaactgaatcaacagtttggatgtacttgtgtcgagtgcctgtagtctgagcgataaatcctcttctacttctttacgtaaaaatagaaataagccaaattttatcatagcaggtaaacaactattaaagcctgctagacagcctgggcaacatagtgagaccctatctctacaaaaaataaaaaaaaaattagccaagcctggtggcgtgcacctgtggtcccagctacttgggaggctgaggtgggaggatcccttaagcccaggaggtcaaggctgcaatgagccataatcatgccactgtactccagcctgggcaacagagtgagactctgttacaaaaaaaccttgctagaatagttctttttttaagaaggagtgtctcactatgttgcccaggctggaatgcagtggctattcataggcacgattatagtgagacgatcatagtgcacctcagccccaaactcctgggctcacgtgatcctcctgagcagttgagactacaggtgtgtgccaccacacgtagcttagaatagctcttcaaaagaaacaaatgaccagggcagggctctttaagtgtggttcatagatccttcacgggattcagggatccacctgagatgaggggtctagtaatctcccaaaaatatgtgccctataaaatcagggtacaatatttgcctcctctaaaaggttaagaactctgaagtaggtttggattcctttcacactattccttcccctttcatttataagtttgatataaatcaaatactagtcttacaaataagacttaataaaaatggctcttaagaattaatcctcaatacacaatagctaggtgaggtccccatttcatctagcactgaggccttaggtttatttgccctcaaccttttacgactctctgtcagcctccagaatgatttcttcccttatgttgcttgttgaaggagaacttatttttaaccagccttaaccagtggacggctttctctgtgaatattttagataagccaagagagtctttgatattcctttctgcctctgttatatccccctcctggtatgtgttcataaagtggccatctatttcactgagccagaagctggaggagagaactacttagcaacctcttccctgtaagaaccccaaagccctgtccttgtctgtcttcctggactggctgttgcagaggtaaaggaggtaattttccactttattgagtaaagtcaggccagaccatctcccagtcccctacccagtaatttgtgtatttgccgactatttttctagcactgctggtaaaaacaaaagcaaaataaaaatgaaggaagtattgtatttttaaaaggtttttactggaaaattggaatttttttttttttttgaggcagagtcttgctctgtcacccaggctgaagtgcagtggcacaatcttggctcactgcaacctctgccttccgggttcaagtgattctcctgcctcagcctcctgagtagctgggattacaggtgtgcaccaccacacccggctcatttttgtatttttagtagagacaagctttcaccatgttggtcaggcttatctcgaactcctgaccttgtgatccgcccgccttggccttccaaagtactggaattataggcatgagccactgcgcccagccagaacttttatttttttaagtctgatttgattttattccttcttgatgagaggggcgtacacacatgctgtgatatttatttgcgattctctgaggtgggagatggttcttgagcctaaagctggaaaattcctacaatgcataagtttaaaatagctcttaatattttctctgaaaatgtttttatttgaatgtattatttttgcttttctaagcaaaaataactgactgaattgcctaggaaagaaaagctccagattcagatcccaggtctgtggtaaaaatcatcttttccagttatttttttctgtgtactgtatttaaatctactttaagaattgttgtcagagccccttcttcataccttttgttttagcaattatcgcatcatatttgaataatctgtgacgtgcctcccctgctggaccaggagttctctgggagccgtggtggttgttggccacattttctgtattatgggctttctttactcttatgtaggggtgccagtgttcctagagatgtaagaagctttgtttgtatgctcatctttttatgtttcgtataattatgtttttatcttttaggctcttcaatgtatatatattatggctagaagatgagaattttcaaaaaggagatacctatatcccttctctaccaaagcattatgatattcacaggctagcaaaagtgatgcagaatcagcaggtgaaattatagccctcctttttttttttttttttttagcatatctgaatgtaatttgaactggtcatattcataataaaacaatttattgataagaaaatgggtagtcactcagatggtcattgtttctatggttttgtcagtatctaagtgattatatggagggaatactcccttttgaatctccagccccaccgtgccttctacctgaaggcttgaagcttgttctagggctttttacgacctcataaacataaccttcctctgactgtatattttttttaattggaagttgttagtagctgaatacctttaagcaattatctctactcccattcttacatgcagtgtaagaatttgtaagaatttgtagggatccatatgtgatgtgggaggttggttgcatggaggagatcaggagctcacctttgtttggcttggaggtgcttacttgtcattgtcacagttctgattgctcttctggaaccacttgatttcagtcttcgtatgtcctaagctgttctcccccaggcactcaaagatgtctgtgaccctttttcaggccaaaacttgtgatgtcagttttctctaagcttttctagccatcttggggacagggaaaaagtggggaagataattctcttctattctagttcttttttttctagggctgcagtcttttgagtattgaccccagcaccaggatgggatttaggaaactctaagagttgaaacactttcatttggatccttaaaccctcctactttcacatcatgtgtatattttatctccagtaggtgtctttttcttgttttctttccttcattccttgccttctttcttcttgctttccttgccttctgtgtgtatttactgagtgtcttctaagtgccaggtaccgaagatacaaaaagaaatctgatacattccctgcctcctaagagcttattggccaacaggagactaaacaaacagttattacattttgtgatcaagattatgggccaggtgcatggcccacgcctgtaatcccaacactttgggaggccgaggtgggtagatcacctgaggccaggagttcaagaccagcctggccaacatggcaaaaccccatctctactaaaaaatacaaaaattagccgggcatggtggtgggcgcctgtaatcccatcgactcaggaggctgaggcaggagaatcgcttgaacctgggaggtagaggttgcagtgagctgagattgcaccactgcactccagcctgggcaacagagagagagaccctgtcttaaaaaaaaaaaaaaattacgagagtggaatgcacagggtactatggaaacataggggaatagcccctgatttggattgggcctggagtggtgacctttgagctgagccatgaaggacaaatgggagttgggcagatggaaaggaaaggcatggtgttagggagtggcagagaggatgttaatgggcagaaagaccagtatgtgcagcgacatatagcaggtgagaaagggatgggcatgttcagaaaggtgcagggtagggcatagcacctgaggcggggcagatgaaaccagagagatgagtaggaatgaaatccctaagggccatgtatacttttctaaataatttggcttgtattttgaagtctttgtttggagaactattgaaatagcagcagttattaaacaaatggatgaattaaaaatatatcgaggaagaatcagatacccaaagacttccaaatttctgactttgtcccccagagataaaccctggaagagggggtgcctgaggggcttcaacgagagctctctatcaaggagttggtcagaaggggaggtatatatctagaattcaggaatgaggcaaagtcggatatgtggatttagtggtaagagaatatgtagattaagaagaggactgaagatggaacattgagagataacagcatttaacgcacagagaaataagactgagagtatagggccagagaaacaagaaaaatacacatgagaccatggtgtcctgacatcctttgagttcagttccatcctcatctttttatgcttgacacccctcatccatatccaaggctttgtacatggtaggtacttggtcagtgtttttaaaaattagccatagctttcttggttctctgagatttatcctggttcctcagcatcaacagaattaattgcttgctttctctctctttttctttttaagtcagcccttgcttggtgcttgatgtataatttcttgatctgtaattcaagctcagggttgttttgtatttttatggtttataagatgtctctgcttacctatcattaattcctagtagttgctctattcattagcctctgttaacagttacttggcataaaggcagagaaagtgacagagtgaccctatttaaaggagcatgtatgcaataggaggatctagcccagcacattgaacactcagctgcatgtagaattcaggattgtgatcaggattacattggagctcctcctctgagtctggaatgccttggactgtgaggttggtttggaaataatgagttgggacttcacagcagtatgcttattgagaagccaaggacattttttggtttagagggatccttgggcctttagaacacttaaaatccaaaaaaaatcacggtccacaaacccatagtccctgtttgctcacttgctattactatttaaagttcattgataatttgactttttgttgttgttgttaaaggcagtcccccattctaaagtgtagtgatcaccaaagtgaaatatatataattcagaatatgcaagacagcccatgggagtgtagggagaggttactagagctactatatttattgttttctcattttatttatttacttatttgacacctgttattatgaaaaaattccattttataggaaaatagggagagcagtataatgggcatgctcttctccccctccccacatatgccatgtgtctagtttcatctatagcccatccacttcctcttccattttatcttggaggtaatcccagagagcacttgatgcatgaagattttaaaagatagggataaaaaaatgacataacccaatagcatacctaaacatattagaaataattttttatatcaaatatttagtcaatgttcaagtttccacctttctcataaatgtcataaaagttttttttttatttattttcatagtttaaatcaggatccacatgttgtgattggttgatatgtcttataagtctgtttaatctacaagtcctccccttatccctttacttttccttgcaatttatttgttgaagaaactgagtagtttgtccatagaggctccccacagtatggattttgctaattgtatcttcacggtgtagtttaacatgtttttctgtcccctgtatttactgtaaattgatagttggatttagtgtcttgatctaattcagatttgattattttttaacattttattttttacctctttaacatttgctattttttacctatgtcttatagtatacataatgtattagctttatagtgtatgtatataatttacaaatatacatatagggctgttaaaattttttctaatcatgatacacaatcaaaaaagttttacagctactgcagggattgttagagtggtcattttaatggcaatttatcctaatggtggaggacttggagtagaccacttcgtgttgaaacttactggttcactttatagttaaatacatagttttatatgtgaatctatgacttgtctgtcagagttaaagtactgtcgttctgtttcaggatctgtggatggagtatttgaacatggagcgcatctatcatgagtttcaggagactgttggtctgtggacacaggccaagcttgagtcccattccacaccctgcagtttgtccgtgcagctggacttcactgatcctttgctgggtgggtcctgggagcacctgccccttcgaatgagtgaatgaatgattgaatcagagccattgagggttgaggctgacatactttattcccccagtgttcatttttcctctggtgctttaaaaagagatttcagttgacttacacaatggtgtaaattgcaactgtaaatgtaattactttgcagttttgaaaatcagaagtctgtctttttcttttataaactcttttcctttgtacctagaacccttaccatacaaatgaatcagattcctgaagtttctaagttacttgtttctcccagtacatttttctagagaaacagtggtataaattaccagttagttttctatcaggccacaaaagcccatttaacctataaagttgctgatatttggggtaacctattaattttaattactgactatatttcaaaaatataggacatatcattgtaaattcaattgttgaccaaaatatttattacaatatatagtgtaagaagacactgaggtgattcagagaaatgcagaataccttcttattccagcttgccactaaccaaaacgcgttagttgtatgaagagagacaaataagaacttctctggacttcacgccattcatctgtaaaatggtgctggctggtttcttctaaggctctaaaatttttccctccaacatttcctctccctgcactttttcttgaaacaataattttttttctgattataaaagatatatattaattttaaatattaaatgatatagaaaggtatatagagaaagggatgaaaattgccctcaagccaacaacgtagattctcatttttctattcctgaaagtttgttaagaagaagaaatatatgaacagatctgggaactattaaatgatttccgttcatgcccttccattcatagtgtttctatgttgcctgaacactgccctaaaatacgaattgttttcgctggagttaagctagtaatttatgaagcccttcgtttgttccgagcactgtctcagtgctttatatgcattaactcagtcctcacaaaaaccctatgttgttaggttatccctattgagcagataagaaacccaatttgtaagctgttaggtgacctgcctgcatgggccacatagctggttattgggcagagccgtctgactccagagacctgctgttcaccactcattattctacctcttgtgtctggtgataccttgtacttctaaacaaaattagggcctatacttctaaatagtgagtttcaggtttttctcagatataagagattagttgatgattatatcaaatgatttaatttgtggttatgattggttgtaggaaaaatttcactagcacccttgtgatagcaatttctttttcttaaactaaatttgttttattggcttcaatatttttgtcagttgtggtccagagtggtgattactgttaaatatgaatttagattttttgtttgtttgtttttaaaataccttggtttttcttttatggtaacttatattgggtttgaaagagcccccagttttcctttagcatcatggcctcttatgttgcttgaaaggaactttaacataaatagtaacaagtcttatccagtggtgaatacctaacttggttacatctgtgcaaagagtagttagttctagtggaaaaacactaactataagggatagtgctgtacttgacctatttgaaatgttgaattccatctgtttggggtacaaacaatacaagtctccttatgccaagtaaagtcatggctattaatttttctttaatttttctcaacaagaatagaaaatggaatgttacatctggaatgtaatcggaaattcactgtagtcccttaagtacttgttgacttgacttactgacttgaaattcccttgaccactgccttcctctgtttcttgctattgaaaagaattgggtaggtagcagcatttttcttcatgttattcagtccccacctgctgtgtggtatgtgtatagtgtggtgaagggagagggagggaagataggaatctattggatatctactgtgtattcagctctgtactaagtctagaagtatcaaacatttgaatttgattaaacagtatgagatcatgtgtaatctagggcaaagttgcatggtagagattcacctttgtgtgtgtgtgtgtgtgtgtgtgtgtgtgtggcacaggattgcttatttggactccataaatcatttgttgagtgaatgaataaatgactgatggactatatgactgcataaatagaagtgctgaaggagcttatgcatatgtcttcattcattttatctcttactgcatccagtcctcctgttcaaaccttgacctgatttcagatttttgactcggctatattccataacgcttattcctttttcttctattcctctgaattctggatgatggcattaaaaccttaactgggtgacctgcctccagacctactccatttacctaaaccattattcagatgatagctaccatctgattcaagcttgcatagaggtgttcactagatccacatgatattagcgtaaggcactagatagtagctttacactaatatcaagtccaaacttgttagcatgtcatgcaaggcctgtctagggtaataatttaagatcatgagctttaactcttcaactatcgtaagactataaattttttgaggataggaattctactgaattgtaccacatgcttctgttctcctgctaattcacctgattgctcagtatatatgacttaattttctttcagctaaagaaagggttttaagtaacttgcggaagcatgaggctccccagcctccccttgttctgcacccgacgaagcctcctgtgccagttatttcctctgctgtgctattgagtcagaaggacgccacccagctggtgtgcacagacctgaatctgttgcaacagcaggccaggtaagaccatgcagcctcacggatcatgttcccatgttggtggctttgacagcctggataatttgctacctggagtggcttccttgtcagcatttttacaatgaggatagtttgaccaacctggcccagacggttcacttggttaaccaagttgtgacaagtcttataatttcacatcgaaattatgtggtactctcaccaactatcaatttcacatttcctgtggtggcatttctgagcatcagcagtgccagctaagattttcgtatgcttctcatgaagagatcttctgatattggaaagatgatgttggaaaggtgtgaagtaagagttcctttcttttctcattgctgtactctctacttctccatattctttaagaaattgacataaatattgattgaagtgtggaaaagtcattgttttgagttcacaaggtggatacaatatgatcaaccatttaaggttttgatctaacttgagatcttgtgagaaggagcatacgtggagtaagtctgtttcattaacagtaagcgagccttacttttacaaatcctatgtgaatcaatttcctttttttttttttttttttgagacagagtcttgctgtgtcgcccaggctggagtggtgcagtggcatgatctcggctcactgcaaactcagcctcccgagttcacgccattctcctgcctcagcctcccgagtagctgggactataggcgcccactaccacgcctggctaattttttgtatttttagtagagatggggtttcactgtgttagccaggatggtttcgatctcctgacctcgtgatccacccgcctcggcctcccaaagtgctgggattacaggcgtgagccaccacgccaggccatgaatcaatttcttatcagtatttttttccttgtctgtttttggtccaggcatttgttgcgtgtgtgttgagtgcacatataagcacctgcccattaatgtaatgatacataccgttagaccagttttgacaccccatgtatgcgattagctttcttggtctttgacatttcgttttgagttgctaatacctaagaagtcattggtacttataattaaggcaccccttgagggtgatgaagttaggatagaattctcagttgttcttgtagggtctgttggtataacatggattctaaatggagctttgtttgtggctatcaagttgtctcacttctctataggcttttctttcatttcttagctttctctttagcctctctgctgggggatgatttgggtaagtcttggctcacaacctttggtcctctgttactatggtttatgtgtcttttgctgcactataatgctggctgtgggtaactggaagcctttatcacctatcatataacctttcctaagactttcttttacctcctgatgatgtttttcagaaccgcagctcttcgggaatctcagcaggttgctctggatggtgagctgttagacacaatgccaaagcagtatgtgaatcgtgaagaacagaccacactacatttggagtgcagaggcagcagcggtaagaaatgccaaggagccgcagttgtcacggttcaggtaagtgtttaaatttcttcagaactgagagaattttaattgagtccgtaatgttggcttatcaatgagaaagattgaaagacatatatagcacactgtctgtgtcccaaacatttactagttttgcagggcatgaaaacactcatagagctaatcacacatttttgtaggtaccagatgagtcctataagacagatattcaaataggaattaaaaaaaaatcagaatcattgagaagattcctagagagagggcttcaactgattcctttttttgtttgtttgttttttgaaacggagtccccaggctggagtgcagtggcgcgatcttggctcactgcaacctccacctcccgggttcaagtgattctcctgccccagcctcccgagtagctgggattacaggcacctgccaccacgcccggctaatttctgtgtttttagtagagatgggatttcaccatgttggttaggctggtcttgaactcctgacctggtgatccacccgcctcggcctcccaaagtgctggcattacaggcgtgagccaccgcgtccggtctcaattgattaaaagactttggtgatgatacagttagaaggaatttggaaatggagtggccatgatgtcatttaggggtcggtggctaggtcagcccgttccaagtgttttgggggtgttggtgggaattcacattggaaagcttggtgtgcaccatcattgggaactctggctgtctgctgcacatggcagggagcccctgaagatgaacgtgggaaggatatatgggaagcagattagttgggtggaacttgctgacaggcagaggagagacatgcaacaatgtgactgaaacttgaactgcctctcagagttaccttcttgcactggaatataggcagaatttggatctgcaatatggtatgcacttcacaatggaagcttcgctgaagctagtgtgccatagcatttactttatgccaggccctgtctaaacactttaaataagttattttatcctcacaacaactctgcaaggtggcctttatcatattatcttcatttctcaggtaaggaagtagagtcacagagaagttaattaagttgctcacctgaagtgccacagcccgtaagtggcacagccagaaaggcccaggcagtccggctccagagccagtgctctttttaaagtagagatggggttttgtagtagagatgggattttgccatgttgcccaggctgctctcaaactagtgggctcaagcaatctgcctgtctcggactcccaaagtgctggtattgcaggcctgagccaccgcacccggccagcctgtgttcattaatcaccgcactgtattcctccttcgagtgaagtcagtattccttaagctgaaagagaaatgcttggagattagcactgcctattgtctaaatctgtctacacacaaatgattcttttttgttagcttttggaaattggagaaaatttattttactccctcttgtttgtctttcagaaatttcccttctttttttgctaattttcattgtaactattccaatgtctccatcaatttccttgggagactcttttctacaaaatgtcttctctgaaataatcttttatatgtattgtatttttcattactttcaaaatgtgtctctgatttttcaacatagttgtatttgtctaaagttcagaaatttgacctaaaagttaggatgagtccaacttattttcccgtatgttattgtaaatatgtgcgactcttaaacattgagttatctttggccaggtgctttatacagttggttttcttttggtgtatttttttcccagttactaatgctgttatagtaagaccaaggtagaaatatttaagaaaagatcgcttgctgaagtaataaaactgggagaaaagtttgccaattttgggtggagttcgagttagtgaggaaaaaactgaaaatgtatccggttttaataaaaaaaggggtgtcttcaccaatttgtgtttttccatattttaaaactacatatctttgccagactgttaattttatatagagaagagaattctaaaatgcatttttataagtgacaagtgagataactataaagaaatgtttttccagttctggctgatggcttgctctgtgaagaactgtaaatatttactgcctcagctaaagaacaggtctcttgccctgacctcctgttaactctctgggccttgcagtggaaaataccaccaggcaggccagggagctgaagctctaagcctacctgtgacttgtctcttttcctttacagaaaaagggatcatagtattatattatttgtctgaacccttgaattgagattttaaacataatcttttgctttgttaattctgaaataaaaagaaacaccttttctaaaatgtcttctaggtaattttgattggagggaggtcagagaaaagatgatttatgataaggactgatgtgaacatggcttagatgtttttacaaacataccaaagttcttgtgctttcttttctttaaagaaaagttgggctgagcgtggtgggtcactcctgtaatcctagcactttgggaggttgaggtgggcagattgcttgagctcaggagttcagcagcctgggcaacatggagaaactctgtctttacaaaaaatattatacaaaaataagccgggcatggtggcgcacgcctgtggtccaagctacttgggtggctgaagcaggaggatcacttaaccgcaggaggtccaggctgcagtgagctgtgactgtgccaccgcactccagcctgggcaacagagtgagaccctgtctcaagaaaaaaaaagaaaaattggtaattgctaatatagcttgaagaaagaagggggaaaagtaatgaaggagagagggaaaaaaggagatgttgcagaagcgtaaagaatttgaaaaaatagctgtattttgtggccctaacctcattagaaatatttaagttttcttaaagcaggttttacttttctgctggcctcactcgtttgcttagtgccctgacttttagtcccacttgggaagttccacaagcttgagatccctcactgatggctcctagaagttcagtatcaataatagtatcgactgcagccagtgttttgcctgataacgcagatttgccagggcaattaaaaacatggacagtgaacaacttttataggcggagacttaaataatcttgaaagttatatagtactgttgttgctagttgaggctatcccaggcggtatttgctggttgatacttctaggacttgaagataaaaatatgttttgttacacattaatggcaaagggcaagatagaggaaagctgaaactctacctgctatgaagttggggaattatctatgcaagttgttcgttttgctcagatttttggccaaagattgtacttaaatatgaagccatccaatacccaaatggataatattggttatggatgactttagttttggaaaaagaggtgttaatggaggatagagagggtgagttctcagtgtttatgactcatcatgaaactgtcattgggagagagtatgtcctgcaaaaggtaggttgtgttatttttatacataaaactgtagccctctatatagatgtgtccagtgaccacctcatggctatgttcagtagttttgattccttttaacatctttctgttgtgatattgaactttatgtagtcacatcttttccctctgaatctctaagcacttctcagtttccagggtttcttcctcctcaactcaaacccttaaattgctagttatcctgattctcttcttcatatgacatcatcttcttttgcctactgtctgtgctggagttcttaatctggggtctgtgaatggtctttagagaattggtgaagttcctgaaagtgtgcataaatttttttttctggagagtgtataactccaatagatctcagaatagttcaaaacgaacaaaagagctatttactcatatgttgataatcctgttctgtttctctagtccagaattctctcttgagttccaaatctagatttccacctgcctcattctacctgaatgttccacaaatacctcaaactccatattcccaaattaatctcacctttaccttccaaatctcttcttcctataatttcacatagctggtctcccaagctggaaacttaggcatcaatatcatcacttccagttaccctaccctacttcattcctgtattttccaaagttgcttccatattggttctgcctctgaaatggctttctgaagcccctgacattcccttctctgtgtttctgttgccatttctccatggtatgcacacctcgcttctcccttgacctgttgcattaattagatttcctgtccatatctctctccctgcctagtctgttttccattctctcattactcatcttttgaaacatagatctgatcacattttcaggctaaaaacccatatttacttggcagtatcaaaaggaatatgacccttagcgcccttcataatctgttattgatctttttctagcagcatcatttatcctctctcccacttcacagacattttacttttcagccatttagactttctgcatttttctaaacacaacatacacattaatacctttgttcttcgcatatgctgcttttgttctcctcccacccatttctgacctctttcttgctcagccttcagtatttagttcaggccaaacctcttttgaagtctttgcggactcttgcagtcgaattgagatgttctttccctcattgcagcttgtgcctaaatgctgttgcagtcacttgctgttttgtcctgccagactgaactctttgggaataaggtttccatctttatttgtttttaatattattattattattattattattttgaggcagagttttgctcttgtcacccatgctagagtgcagtggcactcactgcatcctccgcctcctgggttcaaacaattctcctgcctcagcctcctgagtagccgggattacaggcaggtgccaccgtgcccagctaatttttgtatttttagtagcgatgaggtttcaccatgttggccaggctggtcttgaactgctgacctcaggtgatccacccatctcggcctcccaaagtgctaggattacaggtgtaagccaccatgcctggcctgttttaatttttttagtacacctctgctgaaaggaagcatccttatttgtaacacaccactcattaggctgtgttacaacttattttgtgttatgattagttctatgctgttactagattttgagttacacaaggtcagggactttgtcttattcatgtttgtatcatcagtgcctcatacagtcagtgctgcaaaatggatgtgtttgaaggaatgaacagctctagatttatgcccttcataagtaagttccctgattttaactactttggggaattttgtggatattgtttggccatgacagacatcatggaaattggaactttttcttattaaaaattaacagttcattccttgattgtgcttacctttgcttttaaacaacttaatactttccatacttaaatactcaacttaaatactatacactgcttactgtatatttttactctagtgtaaatgtctcccaaatattcagtcttgggaagcagtaaggatggttgcactgtctttcccagccatgttcacagtactttttgtcacttgcttggggcactctcatgtccctggtattatgctaggtgctttgctttcattatccaacttaactttttttttttttttagacagagtctcactctgtcgcccaggctggagtgcagtggtgcgatcttggctcactgcaacctccacctcccaggttcaaatgattctctctgaggagctgggactacagggtcacaacaccatgcccagctaatttttgtatttttagtagagatggagtttaatcatgttggccaggctggtcttgacctcctgacctcaagtgaaccacccaccttggcctcccaaagtgctgggattacagatgtgaggcactgtgcctagtttatccaacttaatcttcacagaatgaggatgagttcagagaaacaggttcagagacactgtgagacttgccaaagtcacatagctagtgagtagctccatcaggattcaagcctgcatatgtctaaattcaagacccctacttttcccattcaatattgccaggtcgttttgcttcagctgtttcagctgcagcttctgaatacttgcagtgtgattctgagcaagctgatcatgacagttaaatctcatgtaaatgaatataggtaccatttcattttctctctgagtctgtataatagtattgccttcttttttcagtgattagagaatttgtgatcttaacattctagattagatcagtttttaaaaattagctttatgggaaatgacttcagattttaaatataattttgaatgactcctttataaagagttcaaattatatcatgaaaatattttattccttaatagattttttctgggaaagaatgtcctggaaatttccagctatctgcaagcgtctgagctatggatagcttgtttggggtatacaaaggcaaatatattttatgggaagtgagacatgcttctttctgtgttctctcttcccagtagaaggctctaacaattcagtgatgttccctggggaaatggggtgatttataattgggttccttttgatgtactttggtattgtgggtatgcttgctgaccccaggattgatttattatcatgtgaaaaatttgttaattccaagaaatgaacgatggaaaagacccactgagggcctcacattattgtaaaaactggctgaaggacatgctttgtccaacttttaaatttagacaaggaaacttttaaatttctgtgtccacttaaaatgactcaagtggaggggcttccaccatgctactttgttctattgtctactacttcttgtaattatgaactgatagacattccattgctctcaccttcattgcagtaaaaaaagaaaactttcaacagtagtgggaacaataaacaaaaataagtagactagaaaataataataatttggggatgttttttgtgagagggtctaaacttgcctaaaccacctggttttattttagtagtttctacaacatggaatggcagttgtaaagtttggattacagagtagttttagtcctgtctgcatttttccagtcaagtggtctctggatcctttgcctttccacctcccttcattctgtgtcttccttccttatctcagattctctcttttcctgtttggctcctgtctctccaggccagccaggggattctgtgacacgcatagtcccggtctaactgtatttggtgatgtattgaacaaaaaggctgactgcagatactcctaatcacattttaggatattaaacattggtctgttatttgaaagatttcaaatttaattcagatacttgtattgatttattatctaattaaatgcaagtaatttcttttttaatctttcatttctccaatagtaaaagttaattattgttaacattatatgttctagaatattcacttttgtgcattttgatgtcacagagcttttttcttttttaaagaagttttgtaaagatttttaatacattaatgagttttatacaagaaagttattattatcacagtcataaaaaatagttgctcagtgtattgtcagagttatgctgtgctggggttctgggtaagtaaaacaaataggaaggaccattgcccttcaggaactttttttttttttttttttttgagacggagtctcacgctgtcgcccaggttggagtgcagtggcatgatctcagctcactggaacctctgcctcctaggttcaagcaattctcctgcctcagcctcctgagtagccaggattacaggtgcctgccaccacacccagttaatttttgtatttttagtagagacggggtttcaccacgttggccaggcatgtctcgaactcctgacctcaagtgatccgcgcacctcggcctcccaaagtgctgggattacaggtgtgagccaccatgcctggccgcccttcaggaacttttatacagaatttatgataataaccctgggcctcataagtgacataagagcctcaggtaataagtttgtgaattatttacattatttataaaggatatctttaatcattgcagtgatggctgaagactgggtttgggcaggtgcatgtaaggaaaaaatgtagaccttactgctcacccatgtgtttggggaagacaggaggagaatgtagagtttagaactcttgccttctaaatgttatggtctcttcagctgtacctgtaagtccagactccccggcctgcatttcaaagcctctccaagagggctctctcagctccccagtctgattttactgcactctgcaaccctggccaggctcctccttcctgtatctctgtcccatatcccccacagctgtcatgtcagttctgtgtttgtgttgcaatctgggcccaggatgtcttctcttttcttctgcctctatccacatccaaaaaatgacattaaaattgcataaacaaaccagttatgtatgtcactatcagtcagagaaagggtttgttgatggcttctcaaataagaaaggctaatcttaaaaaaggataatcttttgagttgaaaaaaatttagtttttttttaaagaagctcaataaattctccttgtttttccacctttactgaaaaccaataaaaattttatcaaagaccagcttctaggaacctaaattggtgaatttaggaattagccaattgctctttccttggcatggagttggtttgggcatttccccatattttatcttattttgttgtttgttttatgattatatatattttcttcctttcaaaacgacatttgtgagcagcatctgtgtcatctttttttaatgctgggcacacatgtgtacgcagcctgagtgtttggagttgagtgttttgtatgttggattgagagcacacagaagggctacggctggggagccatgatcagcagtggaggggcttcctgtgcttcaagaaaagcctcagtggtggaagacatgggatgtgtttttgatgaggatttcaggagttgaaacataagtgaaatagtatcctacaaaaggctttgaactattgataaattaattcaagatcttaccagtttataaggcagtcatataaagagatacaaattttggtatttttataagacaataattttatttcagtttgagtcttcatgggaaacctgacacatggggggaaatgtcttttgataactttaatttttgttagtttgaaggcatgcataagaatgaagccataagccaacagcttcatgttttacggaaggaagtgaagcagttgcaagcagaagctgctaaaccaccatcacttaatattgtggaagctgctgtacatgcagaaaacttgatcacgtaagttttgcaggcattataatttgaaatactgttttgttatcatgaatagtaatcatacatgctactataccaccaccacccctgcagcacccacaggttaatttagtacagacatcagcaaactacggcctttgagtcaaatctggcctgctacttatttttataaataaagttttattgcaacacagccatccccatttatttataatttctatggcttttatgctgcagcagaaggattgagtggttgtaacagagatataaagcagaaaatattaactatctggccctatatagaaaaagtttgctgacccctgaattgtgagatgatatagtgcattgaaattcagttgtggagagatttagtgcttatgtgttatatcaaagtcacatttacccaggaacttatccttgtcaactcagatgactgaacaaagttcatagcacaattatttaggggaattaggactctcaagtgtggttgtgaacttgcatttgaccatcgttttcttttggctttcattgtggctttctctcactgtcctctttctttccaaagccaccatgacatgacttgggaggtgggggttgactctgcctttactttaaggtgactgactccacattccagttccaacagctgatcccctcagtagagtaggatggtgtatggaggggagcatcgagtccttttgtgtgttgggctggggctcctgggaaggaggagaccaggcaaacaagaggttgatgtttcttttactgggaaagggacacaaaaaggtgtgagaattggaagggctatctttattctaggatcttattctacacagaaatctttatctcaactttagtcagtgttttggattttaaaatgtagagaaatcagggttttgtgtttaaaaaaattatataaagaatacaaaaagttaaataacaaattatgaattacatgcaaaatatgaacatttttaataaggatgagaatgttaattagttcttatagctgatttttttcccctaggagactatgaaattattactaagtattgaaaatcggccagatgcagtggctcacgcctgtaatcccagcactttgggaggccaaggtgggcggatcacttgaggtcaggagtttgacataagcctgaccaacgtggtgaaaccccatctctattaaaaatacaaaaattggccaggtgcggtggctcatgcctgcaatcccagcactttgggaggccgaggcgggcagatcacctgaggtcaggagttcaagaccagcctggccaacatggtgaaaccccgtctctacaaaaatacaaaaaaattagctgggcattatggcagctgcctgtaatcccagttccttgggaggctgaggtgttagaatcgcttgaaccctggaagtggaggttgcagtgagctgagattgcgccattgcactccagcctgggtgacagagtgagactccgtcaaaaaataaataaataaataaaataaaataaataaaagaaaaatacaaaaattagccaggtgtggtagcgtgtgcctgtaatcccagctactcaggaggctgaggcaggagaatcacttgaactcgggaggcgaaggttgtggtgagccgagatcacaccattgcactccagtctgggtgacagagtgagactctgtctcccccaccccaaaaagaaaaaaaaaaagaaaatcagttgtcagtaaaattggaagatacatatatttactccatgaaatatttctaaagtgacattttcatgggtgctctgaggattcttaagaatattgcctgagaaattgtagggtatcaaagaaggccttgtgagtatggaatcttttactgtagactgcagtcttacccacattttcccacagggccttagtgaatgcctacaagttgcagcctacacctgggattcagaaagttggcattagccttttctttactattgtggattacgtcagcgatgagacgcagcgtcatcccccaacaaggcagttctttacttcatgtattgagatcttgggacaggtaaggctatctgtaccttttgccttgatcagataatgagtctctgcggtgtctgtcttctttggatatagtcagcattgacttcagacttatattacaggttcagagtcttacccaagtcagaagcctcttggagttgtaggcttctcaaaatatgattagaattgttggtatagaattttgcttctcatacaagggagattattcatatttgaaagtctagggagacatcagaacttgtcatatatccttggtgttcttaacaataacagtactaaatctcttcattgtttataaaaatacttcccagtttgtttaatcctcatggggaatctgtgtgattgagattcccttcttaaagatgagaaaactaggttctagaagattaagtgactggcctaaagaattcagctggtgagtgtggagctgagactggatcccagggcttctgacaacactcagtgcttgctccacctccccactgctgtgtcccggttgctagtcttggtcaacatttatttgtttgtttatttatttatttggcttacagtgacatagatagatatttaataagggtaagggtaatcatacagatttatgaaatgtttcataaaagaaaggaaaacctcttgtttgaaatatgtaaacactagttaaccatgtactctcacccaaattcaactgaatgagtacttacttattggatgcttacaaggaagtaatgctgaacaggtatcatcattgatttttttgtaggaagttttttatcctgatcataaaattaatgtgtgctggtccggtggggtggctcacacttgtaatcccagcactttgggaggctgaggtgggcagatcatctgaggttgggagttcaagaccagcctgaccaacatgaagaaaccctgcctctactataaatacaaaattagctgggtgtggtggtgcgtgcctataatcccagctacttgggagactgaggcaggagaattacttgaaactgggaggcagaggttgcggtgagcggaaatcatgctattgcactccagcctgggcaacaagagcaaaactctgtctcaaaaaaaaaattaatgtatgcttattataagcaatgcagacagcatagaaagtatgaagaagaaaactttcttataatcctaactacctagaaatactgactacatagctaacatttcattatagtttgtcttgtatatgtgtgtctatttgtgtatatgtatatgtaaacatatttctacatatatagagatatatagatatggataggcacttaaaatgggctcatgctattttgtaacctcctttttcatttaaacacatcttttagacattatttcatgttaataaatacagacctatatcatgacattgcatgtctgtatagtgctccatgatacagatttattacagtgtgttgagctagtgtttgatggatggatatttaggtagattgttttgctgcaatcaggctgaggtaaatattcttgtatgtctttgtgaacttgttggactattttctttaggataatttcttagaggtatgattgctgtgtcaaaggaatttgatacacattgtatatttgatgttttacatcatgcttgacatagtcactctgccttccctgggaattttgcacctacttatgctatcattgcagtgtttgagtttgttattcttcataccataaccaacattaggaactctcattcttttaagttttgctaatctgataagggagtggtatttcattattattttaatttgtacttctttaagtacttgttaagttatatgccttttcatatgtttattggccatttatatatacttttgtgaattggtgattgtggtcctttgtacactttctgttggagattcttgttttccgattgctttgaaagagctcctcacactattaacctggcatctggaatgtgttaaaaaaacatttttccagtttgtcatttttttcctttaattttatgatatttttgccttatagaagttaaaattttaatatattcaagcctatcagtcttgttcttttattatttccgcctgtggtcaaccatatgaaagccttcctgccggtgaaattgtttcaatttttgcttatattctgtacttttaaatattagaaccaagttaaaacaagatgacgtcatcttgattatatattattatggaagttagtttttgacaggtattaaatataactctcagtaaaatctataacctggaagttttgttttctgacgtaatgcagcaccatgttgggtactgtagtaatcatggtggggacattgcatgtttgtggattcaaagtaccccaatattttaatgtcttaaaagtcttgtagtatagttaacttatcattttttttttctttattgagacggcatcttgctctgtcgcccaggctggagtgcaatggtgtgatgtcagcttactgcaaccactgcctcccgggttcaagcaattctcctgtctcagcctcctaagtagctgggattacaggtgcccaccaccacgcccagctaatttttgtatttttagtagagacggggtttcaccacgttggccaggctggtcttgagctcctgacctcaggtgatccgcctgcctcggcctcccaaagtgttgggattacaagcgtgagcaactgcacccggactaactcagcattttctgtgtgacttgtccaaatcagatttatggattcttcagaatttctaatattacttccattggaagcaataggcttatctatgttgattttagctgtcttttgattgtttcagacttttgtttagaaaaaaattctattcaccttatttggtgccccttaaaaatttgcttgcttaaataaaggttgtgagggaagaatctggtgacatttttcctttttatttttccaaggtatttatcagtggcattaaatcagagtgcagaaaagtacttgaaaccattctgaagaacagcaggctctgctccctgctgtctcctttcttcactcccaatgctgcacctgcagagttcatacagctgtatgagcaagtggtgaagtttctaagtgaggacaacagtgatatgattttcatgctgctaaccaaggtaagatgtaattccatcctcaccatattgttgaaacgtaggaatgattgttgcttcctcctctacagaaataaaaggacctctgcagttttgtttccaggtacagcagaggctgagaggcctttttcacagtttgcatgagcttcaagcagtctgaccccacagctgcttcttagggggtggggcattggttgtcttgtatagcagtggtctccaacctttttggcaccagggaccggttttatggaatacagtttttccatggactggagtagaggggatggttttgggatgaaactgttccacctcagatcatcaggcattagatggagcatgcaacctatatccttcacatgcacaggtcacaatagggttcgcacttctatgagactctaatgccatgggtgatctgacaggaggtggggcttggggatccctgttgtatagggtagtcttattccacttagtgtaaaaaggacctaattcccacccctttttaaaaacttaatacagttttgaaaatattcataatagtagtttagtacatccttttttaaaatttatcctgaatttatgcctaaattgtgtttgacaaaggttttgttagtctctctcatatttagaataagctggatctaagcaaattgcctttgatctcattctgaatattaactttaatattttattttatattaatattatattttatattaatatcttagtatataacattagaatattaactctgttagaccaaggtaatgagtttacttaagcagttgagaatttcagagtcttagctactttgccttcacttgtatttctgttacatctatgaatcaaaaccttggcagttttggtcgggtgcagtggctcctatgtgtaatcccagcacttttggaggccaaggcatgaagattgcttgagggtaggaatttgagaccagtttggccaacacagaaaccctgtttgtccaaaaaaaaaaaaaaaaaaaaaaaaaaaccccaggctagtggtactcccagctacttcagaggctgaggtgggagaattgcttaagccctggaggttgaggctgcagtgagctgtgattgcaccactgcactccaacctgggtgatggagtgagacctgttgtgaaaaaaaaaaaaaaaaagacaaccttgacaattttagggcctacagattgatctcagcctataatggaggagaacatgttttatagtttgggattttggaagggaatatcaacagtctgaattttattaactgagacaggtaactgatgcagaccagaaacatggctgttaaattgagacagttccataaagtggctgcttatttgtggcactgtcgccagtgaaggagagctacgaagttctgatccagttcttggagaggaaacttattataagacagaaatgtatgagactctgaggaacagtataaaattataagccaataatgaatcatcagtaaaatttttaaattgcaagaaaagcacacagagcttagaaaactctgcctctgagattctagatagtaacacagaaatagatgcataatggcaccaattagtgaactactttttttttttttttttttgttgtgagacgcagtttcgctcttgttgcccaggctggagtgcaatggcgtgatctcggctcactgcaacctccgcctcctgggttcaagctattctcctgtctcagcctcctgagtagccgggattacaggcatatgccaccatgcctggctaattttgtatttttagtagagaccggatttctccatgttggtcaggctggtcttgaactcccgacctcaggtgatcagcctgccttggcctcccaaagtgccgggattacaggtgtgagccaccgcacccgacccaattagtgaacttcttatattcttttatgtacttctctttttattatttatttatttattttacaattagcttcctcaggttgaatcttttatgtacttgtttatacattttaatttcaatttttataaaatgctgggtaatttttggcttttaaactaaatttacacagacctctctcctcttaaactatttttctagtgcaaataaaacggctttttgtttctttttctttttagttcgatcttaaacaatggttaagcgccactaaacctcctctgtctgatcgtaccaggcttctggagtccattcacttggcacttactgcctggggccttgaaccagatgaggatattttgatgccatttaatcttttctgtaagcactggacttatcttcttctctaccagtttcctgaccagtacagtgacattctcaggctgcttatgcaaagtaagtgtcttcatttaattgtaactaactagatcttagtgaatatttaatatcacatttttcatcttacagatgttattcaaagatatgaaagtaataccagtataggagtttagaatcactaattgtcatctaaagggcttgatgaacaaggcccaaaaagttgttactgtaaatatggccagttattgttctaaatttgagaatgggctctaattgggcaaggcagcacctccagtttggtggagtccacagtcatgcaggtacttctttgtcttgacttttcagctgtcttgaagtggggtgggaaaggactggcttactctgcagacgacagatctggcaaagcaaggaggttgtgccttatgatatgtttaatatgacagtttgtttctctgtagttccaaacattttgggagtttttcctttctaagtcttttactcttgttttttgcaaattaattttatccatatgtaatgatagactttatttatatttaccaagggaaagagcagcattacaatctccacattcctgccacttctgttcccccttcttacaattttctatagcaattttagagtttagaggagaaataaatagggtaggcttttttatttttggagtttcgctaggcagtaattttattaaaatttgataaatgagatagtatttactttttaatgcaaacttcatacggtttatagatataatagcaaatgaaattttgctttataccaaatttttgtgttacatcatagaaatagtttaatggataagttaatgatccagtgtatcgggttgcccaaaggaccttgaaatgtgcagcctctcattttgaaagcacttcaagctttaattgtttcccacagaggcaggttgcagggtgggtggagaatggtggaagggaaatacatttgtacaaatgccaatgaatatgtgcatagctaattttttctctaagcttttaaagtttcaaatagtgtgtgttgtggatttttccctgaaatcttttaaagagattgtaaaccatttatattagaccactattgactggaatttagctagaaatttgttcttaccaagaaaagtaattcagacttaagaataacaatatgatacctctcagatgtcatgagcttcagcctcctggtttctttctcctccttggctaccatgttgatgttcccttgggagcatcctttgctcttctactgcattcattccctctgggtgagcccgttgttttccctgatgtcactgccaccttctaggcatgtgtgatttccagtgatagcttaattttggggcgctgtcctaagatccagaccccagtggccattggacacagactggcactgtccccaggtacctcacactggacatattgtaactggcctcaccatcgttctcctcagacctgctccatgaacctgttattttagttgattctcatgttcgctctgggtggaaagtactttaggagatattattcctgtcctgtgggatgggaagttattaagtagcagagttgggactagttcagaatatgggctgctggacttgtccagcgtttccatgctgcctctgggtcttggtttcggggaattggggggccggtaggagactccttctggagagcccaggccctgagttgccttcatcatgtggtttccgttgtcctgtgactgttgtttctgtcacactcatagatagctgtggtcccccagccaggagaggcactgccaccattccccagtcagggtcggagggtcaggtctcccacccctctgagtgtagctccaccagcttcagcagcgctcactcccagcagggttaccaggaaccaggaaaaccaaatgtgcaggtggccagttcttctcttaggttctctttacttgggcctcctcaccccagatatccctgtgagtttgttttggattttggctttatttttattcctttataaggtgctcatattctttgttacaagttaaaatattcctttcgggaaagccactgacttgctcttcctgtccctgctggcaggctccgcggagcagcttctgagccccgagtgttggaaggccactctgagagccctgggctgctgcgcccccagctgccagcagggggcagcgtccaccgagggcgccgtgcttcccagctcttctgatgctctcttgtcagacaagcaggtgtgtagcctttggtctctgacgtgtttgtgcatttctttttatttcccttgctattcattttttaagcagttggaaaacttgtgcattatctttaagagccatgtgtttttctttgtgttaagtgctttggttccctcgtgtcccctttttccagatggctcaccccattcccctgagtctaattcttgcccatgtatccaagacaagggcaggcactcccctgtagatctttcctgcccaccctagcccatcggactccaccctgagacctctggtcgggtttctatgatgcagtgtcccatggagctctgggttttatcctttctgtttgatatgcatttgcatgagaatttatttgaaataatggttccactgatttagaaaaggtttgaaacccactgatggcctggcgcggtggctcatgcctgtaaccccagcactttgggaggccaaggtgggcggatcacttgaggtcagggattcgagaccagcctgggcaacatggtgaaaccctgtctctactaaagaatacaaaaatgagctgggcatggtggtgcacgcctgtagtcccagctactcaggaggctgaggtaggagaatcgcttgaacccaggaagcggaggttgcgatgagccaagatcgtgccactgcactccagcctaggcgacagagcaagactctacctcaaaacaaaaacaaaaacaaaaaaccattgatttatttctcatatgctttatatttttgccactctcttataaagtcaaagacctactatatacacccccatcacagtgtatcataacactttactaaaatacatatttagtaagcattttttgactagttgtctcttccaggtaatggagactatacagtggctttcagactttttttataagcttcggttatccaagatggactttaaaagctttggtttattctcaaaatggagtccttatatggctgatgtgaagacattcttgggctaccttgtgaaaaggctgattgacttagaaatgacctgtttggcccaagacccaactgccagcaggaaaacaggtaatatacttctcatgcgatgtggagctaggtgtttggactttccattaagagagatttaaataggcacattaagagatttatattgagtgtcaaggagagaaagtagaaatatatagaacaggcatgagcccatatatgtgtcatatatgtcacaatatatgaatggatatattcattacatagtgaatgtagggtgcttgctatagcttgtctctgcccctcctttgcaggttggggtacagagaggtttcagtttccaaccctttctgtcatttgtcttactaagatggggttctaaatcttatacatttatcttttttaaaagtgtgttataaaattatccatgatattgtattgtaatacaaattcttcaattcagagaaattccagtgtagccaatgaaaacgtaaacatacatagttacactaagcatgttgtttatacattaacataggtttatgaagctacagataataagaggtagatttttctatataatgtgagcagtgatattgacaaatgacaaatgatgacctttgttttgtctctaaaactttttagtgctgaaatccctacattcagtaatcattcagctctttaagccatggatcctggttttagaggacaacgaaaggtaaacagttttttagatattcaaattcctttgacgtttgtagacttaaaattctaaatggtatttggtagaagtgatgagttcacagatttaattttttagtgtaaggccatatttaaatttagaaaaggcttcttttcaaaacttaagacattttctatttatggaattgctagtctggatcatcagagatattatcttgataataattttggaacaaaactggacactcatttccagttttccacaataagaggttgaataaactttagtgtttaatttcagaaaaaatgatgctgttcgcttgagggttttatgagactgatttttctctactacatcagttgtgttttggaactaagttggctataaaattattgggtgggaattacctttaaatctaggactcttcaattaaagcattatttcacaagcatttgaaatacttagaggtatagagctgtccaaattcagtgagttgccttctgagtcttttttttccctgaaagtatacaagcagaagctagttgaacttgtcagggttttataaaaattacgacagtggtaaacatcacattataggagttgttttcaaaaacttgaatttgattctgagactcagagaacatgaatgtcaaactcaagtctcatagctggttggttagtgctgaagctgcgactagaactcaggtcttagacttctgtttctagactctttgcattaacccatgatgctttacgagccacttaaggaaagtataaaaggttctgaatgtttgcttttgctagagggctatctgaataatctgcaagcttcaggattttatagtgactgtgtacatatagactgcttaccatagtgctggctgcttgtttatttccagtaagaattaacggaacctatttggatattgagttttctagaccagattcagaaaataaaaaaaaattttttttaagacagagtctcactctgttgctcaggctggagtgcagtgacgtgatcttggctcactgcaacctctgcctcccaggttcaagcgattctcctgcctcagccccctgagtagctggaattacaaatgcatgctaccacgtccagctatttttttatttttatttttattttttttgtatttttagtagagacagtgttttgctatgttggccaggctggtcttgaactcctgacctcaagcagtctgcccacttctgcctcccaaagtgctgggattacaggcatgagctcccgtgcccagccaattaaatttttcatataaagaatttctctgggccaggcgtggtggctcatgcctgtaaacccagtactttgggaggccaaggcaggtggatcacttgaggtcaggacttcaagacaaacctggccaatatggtgaaaccctgtctctgctaaaaatacaaaaattagctggatgtggtggtcggtgcctgcaaccccagttgctcgggaggctgatgcagaagagttgcttgaaccctggaggtgaaggttgcagtgagccaagatcgtgccactacactgtagcctgggtggcagagaaagactctctctctcaaaaaaaaaaaaattttatttgctcattttctatttgttaatatttggccatctctttgttatgtgaatttgattttttttttttaatgctttgagtagagaaaactgttgaagctgacttagggtgtttttctacggcatttgaaatgtaaccaagatgtccaagggtctaaatttgatgtaaaaagatgttaatttaagggttatttagatagcacatttttgaaatctaattgcattggaataaagggtatgaaggagatgaaagaaaattatatggctggtgttacaagctacaattcgcctgcagttatttacagccttttaagtattctaaatgtgtgtcaggcctacataatggacaggcttccaggacttaggccagccctagacactgggacttaacagtattttaatcacggttgcattcctaagtgtgtgcttcttttctttaaagcagccaacagcggcattacccctggctagagagtgatactgtggtggcctcaagcattgtgcagctgttcactgactgtattgactcactgcatgagagttttaaaggtaggaagatgtcaggctgtctctgcttagttttcatttttccctaagtcagtcagtctttttcttctactttcctctatttaatttttatttaataggcagttatttgtgactgaagaaaagtcgctgatacaattatttagtgttaagtgtgtaactttttttttttttttcttttggagatggagtcttgctctgtcgcccaggctggagtgcagtggtgtgatctgggctcactgcagcctctgcctcccagattcaagcaattctcctgcctcagcctcccgagtagctgggactacaagcgcatgccgccacacctggctaatttttttgtagttttagtagagacggggtttcaccatgttgcccaggctggtctcaaactcctgagctcaggctatctgcccgcctcggcctcccaaagtgctaggattacaggtgtgagccaccacgcccggcctttaggtgtgtaacttcttacctttttttgttaggttgctctgagtttctcagttatggtaaatttgcagtctttctctcttccaatattgcctgtcctgcatgttgagtttcttcctgtcctccctaactcttaacctctttttcatattttctgtctttttttgctttattatgggtaatttctagaggtcttccttccatttctttagtctctctccagctctgtctcatctgcttaaaatatatcaattgaatttttcattgaagtgattattttttccatttctagatctatttgtttgtttttcaaatgtaccctgatcctttttggtagtatcttttctttcatttaaaattctattttttatttccttagaatttgtttaaacatgcttactttatgatgtatgtacattaattctattatctgaaattcctgttgggggttgtcttatgctgctgtttaattttcctttggattcttgttcttggaggcatgtttccttgtgtgtttttaaattttgtattgtgagcccatatttagagagactgatgggaatctcataaggcctaggctgagggtgtgtaagtcctccagagaggatctacatttgttgtcaattggaactacttaacttcttggtttggggtttcccgtgctaccagttacatgaaatgaaaccccaaactcacttgcgggctggcctcaattctcacagtaaactttttgatctctcctgactcacaatctagggtaaggcagagaagtttcctcttttgccccattctaccctttcagtaagaatatagtccttagaaaacctcatgttctgtcctcttgtgctgttaaaactcagcaggcaaatagtcctcggttggctggtttcagcatctgtttaacactctggcttcctctttgcttctggcccatggtgttttcttccactgaatacacctagtgcccctgtggctgccatgtgtttgtgtggcatttagttatagagtgatatggtttggcagtgtccccacccaaatgtcatcttgaattgtagctaccatgattcccatgtgttgtgggagggagccagtggaagataattgaatcatgggggcggtttccctcatactgttctcctggtggtgaatgagtctcatgagatctggtggtttgataaggggtttcccgtattgcttggctctcattctctctcttgcctgctgccatgtaagacatgcctttcatcttccaccatgattgtgaggcctccccagccacatggaactgtgagtctgttaaacctctttttctttgtaaattacccagtcttggatatgtctttatcagcagtgtgaaaatgagctaatacatacagttaagcatatgtcatccagttttgttttttttttgtaatagattttattttttgtttaacggactttattttttagagcagttttaggtttacagcaaaattaagtggaaagtacaagaattcctttataccttctgcccccacacatgcacaagccttccccactctggacattccacaccagggtgatacatttgttataattgatgaacctacattaaggcatcattatcaatgaaagtccatgatttacattagtgttctctcttggtaaacacattcggtgggttttgacaaatgacaaataacatgtgcccaccattgtggtatcatacagagcagtttcactgccttaaaaatcctctgcgctctgcctgttcatctctccctcccctcaacccctgatccttttactatctccatagtgttaccttctctagaatgtcctatggttggaatcatagcattttcagattaacttctttcacttagtaatagacattgaagtctctttatgccttttcatggctggatagctcatttcattttgtctggctgtaccttatttgtatttctgatttatcttttatatatcttatcttaccttgaagaggtgtaaactcttcatagaataacagaaatgttattctttgcttctttttgctccctacaaaactagggtaatgccatattctcagtgtgtgtttgataaatagtggttcaatgagtaacacatgaaatcctagtagtactcaattatttttttgaaaggcagacttctagctgctttttaccatccagaatatattgattactgagaaaaagatttgagcaccaaattataatcataaaggctatatatttaatttctttttttttttttcctttgagactgagtctcactctgttgcccaggctggagtgcagtggcaggatcttggctcactgcaacctctgcctcctgggttcaggcgattctcctgcctcagtctcccgagtagctgggactacaggcgcccgccaccacacccggctgatttttgtatttttagtagagacgtggtttcaccatattggccaggctggttttgaactcctgaccttgtgatccgcctgccttggcctcccaaagtgctgggattacaggcatgagccaccatgcccagccatatttaatttcttagtataggggaaagcaccccaaggctctcttgcccctgtatatgaataaaataagaaagtggcataggacagaagggttcacagacatcaagacttggtagctgggttcaaagaaaggaaacaggagagctttgcaaggtaggatgaagaagtattgcagctttttagtgaggttatctgatccactagctccttctatggatgagaaaagtggggacctgaaaatgaaaagaatttatctgacgtcacagaatttgtgtcttggctggaactatcagctcagtctatcctaagacatccttctggatatcttctacatacttacccaactttatctaaacaaaactgtcttttatccatatttaaacgaatgctatcattaacctctgtcttaaaggttgttaaaaatgtgcattcctgttccatgccgggttgtggaattgagggtacaagcatgttagaaatgagagttgtctggtacaatgtgttgatgctcattggctttttttttggacaaggagtctcactctgttgcccaggttggagtgcggtggtgcgatcttggctcactgcaacctctgcctccctggttcaagcagttctcccacctcagcctcccgagtagctgggattacaggtgcctgccaccacacctggctaatttttgtatttttggtagagacagagtttcaccatgttggccaggttagtctcgaactcctgacctaaagtgatctgcctgcctcggcctcccaaagtgccgggattgcaagcgtgagccactgcacacagcctcgttggccattttttaaaagatttgtgttgagaaaccatcaggtttctgttcttactgtgtgtggctctctcttctttgactgcattccattagcatggaaccagaaagtctgaaaccacttgttttagactaaatgtcccttatatagtcattagcccttgaaggcattaatggaattgatacttgtgaggataatattgagtaataatccaggtctcagaaaagcgtgagatttattttagaatgacttacatgaatgacagttaatggactagtttcattgcaccaagggttaattaagttttagtcatttggaacatttccaccgtttctaaaattaaaaaattaatgttatttttgattaacaaatcataattatatacattgatgggtacagtgtgatttacagtgtggcatgattaaatcaagataattaagatatccatcaccttgcttacctttcattgtttatgatgagacatttaaagttggttctcttctgatttcgaaatacgtaatgcattgttgtggacggtagtcaccctgctgtacaatagatcctgaaacctattcctcctgccctctgaaactttgtgcccttttgatcagcaactcctcattccctcccttttcccctgacaccccacagcctctggtaactgtcattctattctctacttcaatgagttcaacttactagattccacatatgagtaagagcatgtggcatttgtctttctgtgcctcgttttcttcacttagcatgagttctccagattcattcatgttgttgcaaatgacaggatttcctcctcttctaaggcagactggtattccattgtgtatatacaccacatttagaaaaatccattcatcttttgaaggacacttaggttgtttccatatcttggctattgtgaataatgctgcagtgaacatgggagtgtggttatcccttctccctatcgatttcctttcttttggatatatacccagaagtgagattactggatcatatggtagtctatttttagttttttgacgaacctccatgcctttttccataatggttgtactaatttacactccccccaacagtgtttaagagtttctttctctccagatcctctctaacacttgttatcgttcatcttttcgataacagctatcctaacagctgtgcactgatacattgttgtggttttagtttgcatttctctaatgatcagtgatgctgagcatttcttcatgcacctattggctatttgtatgccttcttttaaaaaatggaacatttccttttgagggattttggatttctcctgagtgccaaatgaatgaagcactaaatgtgtaaaactgaatacatactgagggcaacaagctgtaggagtgtatttcagttaaaaagccatacgtttagaaattttaaagaaaagctgattatttcccacacagcatctgctcattccagttacccgagtgggtaattaaagtaccattctttattactaatctgccagtagtccccttaaccactctccctacatgaaaatctttgaaattgggtcaatcatgagaaccttagattttagacttttagttcaaatttgctttttttttttttttttaaggtaaaccaaaggtcttcagctctattttcttttcacattctagataagctgttgccaggtgatgcaggagccctttggttgcacctgatgcattattgtgaagcatgtacagcacccaaaatgccagagttcattctgtacgctttccatagcacgtaccggaaactgccatggaaggacctgcaccctgaccagatgctcatggaggccttcttcaaagtaagcccttcattcccggcatcgcagcctagagagatctggcttctagggagcagcctggtcactgtggttgttaggcatagtggcagtgtgtgctagcgtggaccatgaatacattctgtgttgcctcggtggtgcctgtggaaaacagtgtcttgtggaagtcattttatcgtgttaaaacatctacaggaccatttttaaaacccagagaaagattttatctataatatgtcagtcatcccctagactttgtcacgtgtgagtacgtagtttaatgcctccgttatgcttaatcttggttgttattgatgtgtttgtgtcattacagtttgtgtcaacaactgcttatcgttaaatgtcctattaaagcaaatgtaaattggtactgaagctattagtttcttttagcagttatgcaagtgaataatttgattataggagataaaatgcattgtgacaaccgatgatgcatcataatcgtgtgcagacctgaaatgacttaaaaaaagagagtgcatgcgagtctttgcagtagaagcaatggttacaaaaccagaaaacagagagtgtagtgtaacttacatactagtcaggcatttggagctgttgttgtttttcttcttttttttttttttaattacactcttgtcttaggtttttatggtagtttcagttcatttgttcatagtctcatcagttagtgtttactcttactgtcacatttattgttgagacaccttaagtgctttgatacagatctacagttatttatgaaggttagcaaaatatacttaacttttttagtgcccttaatggaaccccatctgtgctgctcttgtcagccactcagtagctgaaatgcaagaaaagctgagggcagttgttctagagaaatcccaggcttaagaatgattttatagctagatttagtatatgagacgggcattaagtaaatatttatcaccattatgaacatactagagaaaggtggtttaaagaactataagatggagttttaaaaaggatgaccttaactataagacagattagatagtagcacagcctgttaagggatgctgtagactctgtctctaggagttttattctaatggcagatgaccctgaccaccccagaagctggggatcttttaattctttgtgtcttgttggcataataaactatatttttttggtggggttgaggatgaggatagagaacagattataatggacaatgaagaatcattttctaaaaggaagagaattagtagttagcataatataataacagtaatgacaagaaatgaatcatcaccaaattccattgatcatgattttataaatagactagagcttttaatcttcattttgaaaggaaaaattcatgagtagccatgttttattttaaacaaattagaagtatttaaatagcttgtaagagatctttgaggtttcttatatactttatagtacatctgttcctcattctctaattttttttttttttttgagacggagtcttgctctgtcacccaggctggagtgcagtggcacgatcttggctcactgcaagctcctccttccaggttctcgccattctcctgcctcagcctcccaagtagctgggactacaggtgcccaccaccatgcccagctaattttttatatttttagtagagatgaggtttcaccatgttagccaggatggtctcaatctcctgatcttgtgatccacctgccttggcctcccaaagtgctgggattacaggtgtgagccactgcacccggcctctcatattttaaatagaatttaaacatgcagtcatcaaaaattgtaaagactaataatacggagacattgttataatacagcattacattaaaaagggaatataggccgggcgcggtggctcacgcctgtaatcccagcactttgggaggctgaggtggacagatcacctgaggctgggggttcaagaccagcctgaccaacatggagaaacccggactctactaaaaataaaataaaaaataagcaataaaataataaaataaaaaattagctgggcatggtggcaggcacctgtaatcccagctactcaggaggctgagacaggagaattgcttgaagccaggaggcggaggttgcgttgagccaagatcgtgccattgcgttccaatctgggtaacaagagtgaaactccatctcaaaaaaaaaaaaaaaggaaaaaggaaaaaggcaatataaataatatacactagtgtagtggatctcaaagtagtgtggtccctgggacagcagcatcagcattacctgggaacttacacattctggctcccaacccatacctgcaaaattaaaagctctaggggtaggcccagcagtctgttttaatataccttccatttagttctgatgcacacttaagtttgggaactactgactagtaaatttcaactttgccctgtcctggcacacctgaggattctgatacactccctgcagctccagtgacttactgtggcagcgattctccacccaggttggggttagggaaggtcattcctcgcttattaagaatgattggaataaatgctgaaatctgaacagacaaactaaaatatacacacatacactgtggaaggaaagatattacaaatattaagtctaaatctctaggaggtgggattctaagtgatataatctggggaaaaagtgttttttaaaaacataattatgaaacaatttacatacattttccagatacatagatagcacaaggcaacagaatgattttaattcattttcttttaggtggaacgaggaagccccaagagctgtttcttatttttggggtctgtactctgtgaagtcaactgggttagtgtgctctctgatgcctggaattccagtccccacccagaaacccgcagcatgattgtctgcctccttttcatgatgattttattggcaaaggaagttcaactggtagaccaaacagtaagtttgggaagcttatggcaaaaattcggcaaggctgcttagatctttgctttctactaggtcgtagtttttcatttgtttttccagtgcccctatcagtgtgaacagatgcttggcatatgagatgtacctttaaccagatgcctgattttcttggatagctcattatctgattctaaattatgcaaagaaccacactgagttagaatgtattaatcaactttattttgtatctcattaatatctacttcaatctcttgtatgcttcttgaagtcaattttggcatgtcccaccagaacagggagttcttttgaaagaaaagaacctgggttccagatactcaatacatcttaatatgaatgtgtttttgccaaaagtttggttattgctttcactagtactcctaactcgagtagatacttacttgatatcataactgttctgtgcttaccataggccatcttagtagttattccacagactagttagcaacacatatttctggaaaaattggggctctggaactaaaggaatatgtgttttatttttaggattcacctttacttagtctccttggacagacaagctcactttcatggcatcttgtggatattgtgtcgtaccagagtgtgctaagttatttcagcagccattacccgccgtccatcatcctggcaaaagaatcttatgctgaattaatcatgaagctcctaaaagtgtctgcgggcctttctattcctactgacagccagaagcatcttgtaagttgagaggtagtttaaaaggcagagactgttcctggagattggtagcagcataagtgctacaaaggacagtcgaagctaggaagtgctcagcagaggaagtcggaggatgtgtattatcatatactcatcttttggccttgtagatcttttgggttgagttctccctttgggtgaacttttacttactagcaatgtcacatgtcgatgaaaggtcaaaaggattgagggctgccagcaagctgctggtttcatgatctgaatgtcattggcagcagaatagcagggaggaagggaggttggtaatatgaacttaggcttgacagggcaagtccctcagttttctcatctgattagaaatagtaccttgcaaaggctgggtgcggtggctcacgcctgtaatcccagcactttaggaggccaaggtgggcggatcacctgaggtcaggagttcgagaccagcctggccaacatggtgaaagcccatctctactaaaaatacaaaaattagccggggaatggtggcaggtgcctgtattcccagctactcgggagactgaggtaggagaatcgcttgaacccaggaggaggaggttgcagtgagccgagatcgcaccactgcactccagcctgggcaacagagtgagactccatctcaaaaaaaaaaaaaaagaaatagtaccttgtctcaaagtggtgttttgaggattgaattcgataatgaacataaaagtttttggaaaagtttctggcaagtagttagtgtttggttaatgttgttattcttgtagtaaaaaaggaagagtattctgccacaatttgggaaaacatgggccctggtcaaagtgttaccatagatttgcctttcactaggccccttgggccacgtgggactaagtcttcatgtggcttcctgttctgtcccctctactccctacccaagcattcattgcagtgccatgctcccaggaaatatgcagttaacactccttgcttggattcatttgaatgatttttttttttttttttggtcaggatgcagttccaaaatgccaagcttttactcatcagatggttcaattcctcagcaccctggaacaaaatggaaaaatcaccttagcagtcctagaacaggaaatgtctaagctcttagacgatatcattgtctttaacccgcccggtaagtgaccagtcggaagtcctgtattcattcagtcaatgcattcctgctgtgcgtaaggcactgtgagatcaggaggatgttcaggacactggcactcctctttccagagaagcaatggtcagagaggtgtttggacaccagggactcagcagtggggaaggattgacactggcagatgctgttgggtggtgggcgagactgacctttaagctggacaatgggatctaatgattaggagatatcagagacctttcagtgagcggcatttctagggattttggcttttaactgggagggcacttcagaatcacctgtagacttgtcaagaaactgtgtctggagaaccttctgctcccagcagtttggtggactagacatactgcctgcctctcctgctgaagataactgggtgctggatgaaatatttttaagaaactggaaattaaatttattagtggagtggcaaaaaggtaagggaacctcagaggccagaacctaagtgaaaggagaaacccataaaggtaggtggagttctgaggctgctgtcaccctgaagagttttgctgaatatgtttggatattagggggaggtggtaaagcccagggcctgcctaagatgggagcctaaaaggaaatccgatgcataatccacagggtgacatttttactgtaaagataagctagaagtaaacctcctcttgtgagaggaaggcaaagacagttacctgttttggcctcgttgttaggttaaatgtttatgcaggaaaagagatatctgttttgagaattgataacaagctgaccctcatgtggttttgaagcaagaattcagactacctagattggtagaaacagcagtaataacaacaacctcaatctaagaatttagagtagttctgggttggcggtgccaccagcatctggcaaaaagcaaccatagctcctgtttggagaaacgcatctttaactcatgcctcaaagttccaagaaactcacagtaaaaaaagtcacaaaacacaggaaacaaggtaccatgagcaaagtaatagaaaacaacagcagcgtcagaaatgaaaagattgaagatagtggaataattagtacagtaagcaaaaaagttatttttattatatgctgaaataagagaggattgaagatatcagtaagaagcaagggattgtagaaatatgcagatttgagagatttatataatttagaaatgaaaaatataaagattataataaagttaatggataagttcaacagattaaacccatccgaagagaaaattggtaaactggaaaacaaaactgaagaaaatactcagattgcagcacagaggaacagagaaggaacgtaaaagtgagctgggcatggaggcggaggcaggaggattgctgatggccaggagttcgaggccacagtgtgcaatgattgtgtctgaatagccactgcactccagtctgggcaaaatagtgagaccccatctctaaaataaaaagaatacgaaagtgaggttaaaaggcatagaggataggctgagaaggtttaatatacatcctattatccaagtagaattccagaaggagaggagatacttaactggggagaagcaatatctgaagagatagcaaggctgaaaattttcagggctgatgaagacagcaatcctcaaattcagtaaacccagcaaatcccaagtaggatatatggaaagaaattcaaacctgtatacactatagtgaacctgcagaagtaccagtggcaaaattaaaaaacaaaacaaaacaaaaccctttacatccaggaaggaaaggcagattacctaccaaggagcaacatttagactgacagctgacttctcagtatcaataaaagaatctgtaagacagtgggataacaacttcaatgtgctatgagaaaatgactcataacctagaattgtaaactaagaaaagccaccctttaatgatgaagacgaggtaaagaaccatactttcattgagccctgagagtgtttgtcccagtaggtgtcactaaagaaaatactaaagcatgctaggaaggaggttgagttaaaagtgttctaaggttctactgctgtttagtggtcaagagattaactttataccttgattaaagtatgaatattaacaattttaagaaattaaccaaaagaatagaaattaaaatgtacaatttccaagtcagtagagggagataaaaaggaatgtccaaagtatgttcagtccaaagaaggcaagaaaggaagcatggagaaagtgagaaaaataaccaaaataagatgataaaattcaaatgtattggtaaagggactaatgcttaagttaaaagacaaagattgttaaggtaggttaataaccaaaaacatctagctttaagctgttgataagaaatacatcaaaagcctaaggatatagaaagctttccacaagatgattatgtcaggcaaatattaaaatagaaagctggcatagctatattaatatcagataaatagatctgtaaggcagaaaactttgtaaaagccagatgttcatctctgtgtatttctgccccgaagttgcatgacaaagaaaaaaaaatcagtaactaaatagaactagagggaaaaacactgtggaaattaagaagcaaacttttaaataactgatggccaaaggaataatcataatagaaatttaaaatacttacaactgaataataaaatacagtgcatcaaaatttgtgggatgcagctaacatgggacttattattttagcctgttctcacactgctataaagaaaaacccaacactgggtgatttataaggaaaacaggtttaattggcttatggttctggaggctgtacaggaagcatggtgctgccatctgctcggcctctggagaggcctaaggaagcttacaatcacggcagaacgcagagtgagagtaacactccacatggccagagaaggagcaagagagagaatgagcaagggggagatgttgcacacttttaaactacgacatctctgagaactctagtatgagaacagcaccaagaggatggtgctaaaccattcatgaaggacctacccccatattcagccacctcacactaaactctgctccaacattggggactacggttcaacatgagatttggtggggacacagatccaaaccgtatcacttactttcagggccttaagtgctcatcatagacttttttaaaaggtgaaaattaaaaagataagcattaaacagttatttaaaaagacggcaaaattacagtcaaagacagtagaggggaggaaataataaagagaaaataaataggaagaaactaagaatgaagaacaatgaaactggtaaatgtgtgggtaaatctaaatgaaatctgactgtataagacaataataatagaaatggtttgttgggctatggcaacagtggagaaatgaagttagaatgttccaaagccattacatcatctgggaaccaattaacattagacttcaaaaaatcaggaatgcatgttttcatttataggataaccactgtcagaattttaagagaggatttagttttcaagctaaaacagggaaaaagtagaataatgatctaaaagaagcaaaagagagaaaaagaaatgtagaataggagggacaaataggatacatataggaagacagtagatttagacccagctacatcagtaattaattataataactgtgaatgactaagattgtcataccagataaaacaaggaagaaaaagacaacttagtagaaaaaaatggacaagacccttgaaacgacattctgcaaaagaaaatatactgatcaccaataaacatgaaacggtgctaaatgttgttaatggtcatacctgtttcatgtagatattgtaagtattgagtgagataatatctaaaattttagcatcagcctggcaagtcagccacattcaataaatcttatggaaaaaaactatcagcaagcaatgctggagaaactgttctagagttggtcagatatgattgaaccaggaaggttgaataatagctggccagggaaaggagagaagggtgttctggaaagatcttcatcggaagagtgataggatcagatatggtatttaggaaaagatttgagagccctgttgatatgaacaggaatgggagagactagggtctgttgtagtaatctattcctattagtcataattaagagataaaatttaaattgctattccgttgaaattcagagatgagcctttatttccaagaatatttgtacccatagaaatacatgaagaaatagacagatatactgttactatctctctcaaacttgttttttaagtccttgcttgatagtaagtaggtcgtacagaaagattaagtgagggtttatttaaccctgcataagtagatgaatttgttttgatagatgcgatgagtaagatctctcaactttttacccttcctattgacataaatactgaatccttgtggtgtgaaagctacagcttgaggagagctagaagagttggcaaaaattattccatttaactctcagtaaaatatattttctgtttttgaatgtgaagatttgcagttctcttgtaaaatgaattcgttctttttcttgaattcctctctctttacctccaattttttttgaaaaattaccagttggtttactttccttatttaaaaaacaaagaaataaaagagctgctgttaggacactttacaaaggtttttccttacatttatatttagttttaagtaataacctttaatgtgtgtaaatcaccctagaatattgacagcggtggcagtgacagtgggtacttttgctacttggtttactgaatgactggtgagatctacgtatttggttttccatgagcaaaggttggaaaataaagactgactaggcatgttctgataagttactctttcacaccagcttcagatttgtctatttattaagtattgctctgctatgctgctgtacccagggaactcacagtagttcctgcttttactcttagtaaccgtgtgccgcatactacctgtacaaacttaacaccatccagagccttccttccagtcccttgcagtcagctactagcactgtaaaatctgcctggagaacagctaagattgaagcactgttattctcctgatcacatggatagtacctttctggcagccattcttgagtgtgtctatattcctttcagacatggacagccagacccgccacatggccctcagcagcctctttatggaagtcctgatgatgatgaacaacgcgactattccaacagcagagttccttcggggcagtatccggacctggattggccaaaaaatgcatgggctggtggtgctgccccttttaacagcagcctgccagagcctggcgtccgtccgccacatggctgagactacagaagcctgcatcactgcctacttcaaagaaagtaagaggaggtcatcttacgctccattgtattggtcttttccagaaagatgaaagcattgtcatcagcagatatgtttccagactcttcccagtgagggatttgccattctaattttctgctctacaaatgttgtggatgtttctgaatatacgtatttttcataaagatctgcagttagcatgagaacctgtggccatgtctgttggtacaatcacatttcaagggagaaaagctctaatccacttcacgttagttttggagggtcagaccaacctgttatgatatgcaaattgtgttgtgtcacaggccaagtcatagtcctcagaacaaatgctatataccaggatctatataatcatagtccatgaggttaattttccctgtttttgtcacttttggtaaaaggagttttcatagaagtttttaaaattgctgcttatcagaccttttaaagcattatgaagggctcattcattgtcacccctcctttttaaaaatctgttttactttctacctctaaactgtcagactctggaagcggcttagtctgattaagaattgctgagaacagcacttctcaactctgatatccagataacacatcacactgcagtcagtgggagagaagcagtagtgagaaggagggtatcggagcaaggatccaggaagtgcccacaacctgccatctgccctgtcctgaccacccatgaacagcacatgcccacccatggaggtggtgtgcatgtcaccatgccaccccaccctcgctcccccaaagagtggagaaccattaggataacactgctattccaaactcatgtgtgttactaaaaatcaaacagtttcaatacatgagttaaactaagctttgataagtaaaactactcacagattgagtgataacagtttcccgtcggaaagcataagtgttcatatgttcttaaaaagggtattaaagttaaaattcttaactgaccaggacaggcagtgtctacatgtggttttaaggatcataatgtgatagaaaggtgatttatacgtatgcagccctgaattctgatttcttaaacctttctggtggctacgctggggacaggcatctggcctgagggctatccagtctgagccctgaggtatatttgacttttgtagcctccaaggtcactgtaagaaaggttgtcttgacatgaagcttattatctcataggttgctatgtcaaaaaaaaaaatcatgaagcttaaagtgaaaatatttgctagagttgtcaagtaattggattcttgcctatatcttgatgtctcttcttcatgttcttaggccctctcaatcagaattcaggatggggacccattctggtatcccttcaggttcccgagctcaccatggaagagttcctgcaggagtgcctcaccttgggcagttacttgactctttacgtctacttgcttcagtgtttaaacagcgaacagactttaaggaatgaaatgaaagtgctgctcatcttaagcaagtggctggaacaggtgtacccaaggtacgttggccctcaggctgttacatcaaacttgctgtatttggttaacttggaatttagagcttaagtctagctttaagtacacagaaccaagaggtgcataaaaaataaggttttaaggtatggtgacagttgttttggaaagattcttaattaataggctaatcttctgagcagattttttgtttcctaaaactggcactttgaaacaccaagcatcagtttccttaccagttaagtggagatagtaatccctacctgatagggctgtcatgaggatgaagtggaagaacacgaagttcatcacagtggcgtgtagtaggtgttccacagatggcggtggttacaatcccatggctctattaacatcagccattagcctgtgcttttgaagtactgaatgtctcctatccttcaaactctgatgtggacttgcagttaaatgggagtgggaaaaatttacttctaattttattttcctccggtgcctcccctagctccgtggaggaagaggcaaagctgtttttgtggtggcaccaagtccttcagctctccctcattcagacagagcagaatgactccgtcctgacagaatctgtcattcgaattctgctcttggttcagagcaggcagaacctcgtggctgaggagagactcagctctgggatcctgggggcaattgggtttggccggaagtcgcctttgtctaacaggtaaggaagcgcctttctaacactgttgttctaaataggcctcagacatctgtacctacttacaggttgtgatatacttcagtaggtttttcgacttaggatctaggttctccagaaagattaatggaaaaaaaaaaagaaaaaaaaaacagagcctgattacatctttacattctaaaaagcatttttattttttcttacctttaaaaaaaattttcaattcaaacagtatttttaatagtatctcctgttgtgtttggactttgtaacctaactgcactactgatttctttttggttttgagctagtcatggacggtatgcgagcatagtttaaaagccaagtcagctgggcacttgaggcgttcagggaaatccagaacctgtgagggactcagtctagtgaactgtaaagtcgtcaagctgggttaagatctgttggtggccaggcgcggtggctcacacttgtaatcccagcactttgggaggccaaggcaggcagatcacttgaggtcaggagttcgagaccagcctggccaacatggtgaaaccccgtttctaccaaaaaatacagaaattagccgggcatggtgatacatgcctgtagtcccagctactctggaggctgaggtgggagaatcgcttgaacccgggagacagaggtttcagtgagctgaaattatgccactgcactccagcctaggtgacagagtcagaccctgtctaaaaataaataaataaataaataaataaacacaaatataaaaattagctgggtgtggtggcaagcacctgtagtcccagctactcaggaggctgaggcaggagaattgcttaaacccaggaggcagaggttgcagtcagccgagatcacaccattgcactccagcctggccaacagagcaagactctgtctcaaaaaaacagaaaaaatgaataaaaggcctgttggtaagaaggataagtaatgagaagcaagtctggatttttgttgcaaaaaatcccaaggcatggaagaatttgccattagctcctgttttctctcataatacttacttacatcatggtttccttttcaagcccttgtcagtgttgaaaagagtttgcaaacttgatgatgtcagcattcttgtggaatagcccattgtgatgttgtaactttgggactcactcattccaaaccagttaacgtcatgtttttttgtttgcggtggaagatagcaggactgcgagattttgttttacttaaatttggcttgcgtcttttattctttttaattgtgataaaatacacataacttaaaactttccatggtaaccatttttatatgcacaattcagtgacatttagaacattgacaatgttgttgtagccatcaccacaatctagcttcagaacattttcatcactccaaaaggaagccctacactcattaagtagtcacctccattccctttaatccccgtgtctctagtaaccactaattgacattatgactttatgtattgaatcctattttggacatttcatataaatggaatcatataatgtgtggccccttatgttggacttttttcacttaacataaagttttcaaggttcatttatgttgtagcatgtatccatacttcgtttgtttttatggctgaataatattcctttgtattccacattttgtttatccattcattagctgatggacatttggattgtttcaaccttttggctattgcagataatgctgctatgagcatttgtataccagtttttgttagaacatctgtttttagttttttgtgtatacctaggagcagaattgctgggtcctatggtaactctatgcttcacttgttgaggaactgccaaactcttttccctagtgcctgcaccatttacattcccaccagcaatgtgcaagggttccagttactccacatctttgccaacactttcattcttgaatctgaattatacatatattgtttggatggtgataatggataaaacttcttcttgatcatatttaagattttcctgagaaggtgaacaacacagtagatctggaaatgtgttcatctttttatgtcatagaaaatatggtgtttatttcaaaatgcttactttaatagccatttacttcttctgacctctccctaatgcctaaggttccgagtggttgcccgaagcatggctgccttcctttcagttcaggttcctatggaagatcagatccgtttgaggcctggctctgaattacatctgacccccaaagctcagcaggtcagtatatacaatgaagggttagaagtttgcctgcacatcttccctagaaggcagggaggtggcagccgtagcctgtgcgcgtcatgacatgatgctctgtggtggtagcacagtgttccctttcatgtgccctacttacgggaaaatggtttcatgtgccaacctccaaatttttgtaggcagttgtctagatcgctgctactgtcattgtagaaaagtaaggccaaacgaaaagtctgtctagcattaaatttggttctgataagtgtgaatatgcacttatctaccacatgcttgggctggggcaggggctggagctggggactgggatctcgcacagaagatgtggctacagttgggatggatggaaattagctgagctttagcttggaaccgagaaagtagttcctgttttgtgagtctgaaggttgactattgttggctgatgctagaataacctaacatggacagaatggtagctagaaattatagcttcttctaaaaacatggaaggccacattcctataacctatggacatgctggccaggtacaaaggtgcacagtaaaaaatgatgatcagcattcgtgagtactccctctgtgccaggtactattataagttttaactcgaccaatattagtgagttaaagctttaactcatttaatcctcatagcaatgctatagcacagaaacgactttattttttaagacagggttttattctgttgcccaggcaggagtgcaatggtgtgatcatatctcactgcagccttgaactcctgtgctcaagcaatcctcccacctcagcctcccaagtagttaggactacaggcatgcattgccactcctggctaattaaaaattttttttgtagagactgggtctcgctttgttgctgaggttggtctcaaactcctggcttcaagcgttcctcttagcctcagcctcccaagtgttggtattacaggcatgagccactgcatccagctgggaactattattatcctggttttttggatgaggaaagagagagagagagagaaaggctaagtaatttgtcccaaattacacacctagtaagtgttggggctggaagtcgcactggccagtctggctccaggcctctcccattccctgctctgcagggctgtctctgtaagtgctcagagcttgaacaccttagctcctctgctggggcaactttgtcatgtctaagccagccacatgcaatgtcagatcttggttattaagagcaaggatcagacagaataattagcagattagcaggttctccacagggatctgggcttataaaatagctgatagttgtcactcattgcctagacagctgctgtttgaatcccctattgtcttacatgaaacatcccagtgggcagatgaatatcctgagggcaggttgtgaagtcagtgagatgcagggtgtatttgagaagactacgtctcctgtggccaccagtacctgcagcatcagtttcttgctttagctggggccctgggctgcccaggcctggcctctttgccttcatttctttggacttaaagtgatgactccctgtatgtcccatacatacttgtcatcaggattttcagatttgaagaaagttgtctttttagaaaatgattatcgttaggcaaactgtcaaagtagactgtttgggggactaaatttaaagaaggaaaagagagggagagagacagagggacactgtgattcatgggaatgcctgtcccagttgattcctattcttaaattgaactctgtttacatagctcttaatttggtacccagataccttcagtttattttcagcccaaagacttccatctacagccctcctggtagttaatttctaaaattctggtttatttatcatcctcaaaaaaatcccctctcttatggtttttgaatcaagcacattccatcttttaatacatattttctagtgcagtggtttctgtaaaagggacaaggagggagtggggcactccatggtgggggatgtgccccagtgaggaggggaacaccgtcagaatcctggggtggatgagcttgttaagttggaaaacaaaactcctcaccccaaaaatcaagagccattgttgattttttgttttctccatatacagtctcttccccttctcttctcctactatgaagaaaggaataatcaaaattctggagtcaaagaatgcttttctttccttcctctgaagagaggcatggaaacagtttctgccatgattttgtgtcatttgtcagatggattcgggaggaacctatgtacttcatgcttgttggctgatttaacaaccttctcacttactcttggcagcacttagcaactggttcctctagaattcctttccgttagacagtttcatataacattatctcataacctaggaacatacccaacagcagattgaacagatttcaccttagcaagatgaggctggtgcctgggatttccggttgcgccctagaacggaaggagtggacaatctggtggggaggaccccacaggtgggactggggagaacgaggacaaggcaggctttagaaatcggtgtggcaggtgaggcgcccagcaacaagagcagcctgccacagcagtggctcttggtaaggcaaggttgggaaatggcacagaacagaaacagggaaggctgggtgtgggatgctgcaaaggccacagaggcttgggctgctggcctccttctggttgtggttaagttaatcaatgcctgccttccggactcctggcctcagttctgtaggcctccttcccacaaggctcacagttgaagtacacagtgataatgggtgtgctgtacctctggcagtcacattatgtgcctctatggagttaaccctctcatcttccgtgtcttttaggctctgaatgctcttgaatccatggcatcaagtaagcagtatgttgaataccaggatcaaatattgcaagccacccaatttataaggcatcctggccattgccttcaagatgggaaaagcttcttggctcttctcgttaactgtctgtatccagaagtgcattatttggaccacatacgatagttaacactgaggctcttgaaaaacccattgctgtttatgtttacatttaactttgctgttgcacaagtaactttgctcaattgcactgtagagctcagtttggccaatgtgtagttgactgagatgcaagttgggaggcgttagatattagataattttggggtgtgtgtgtgtgtgtgtgtgtgttttcttagctcttaagaccttctggggactctttaagtttttatatttatccacaagagaaacttactaagttccacttgggtgcagagccactcacagttgccgaatgtcccagtcatctcacaagacctccagatggagttctttgtatgtttccacttctgtctctgttttatgtaaatgttccagatctgacaaccttggaagtcactcagtacccttacttttaaaccccatttgtgttcctccaaagtaaagaagtcaattttgaaaaatttctgcatttctcaaatgtggacaaatacaatagttttaaagtattgtttttctcagaagggagataaaaatgccgagttagttaaagtgggtcatgtgtaaaatacgaccacttgatcgtgattatagtgggcagtagagatgatgacaagtcaatttccatccagccgtgtatcctcatggagaagctgcctgtctgaatcaggatggcaagctggcagtctgggaggagcatgttttgcacagatgttttgtttggtccacttggtgaggagtgcagacagggctgcctctctctagtcgggagagtctgtgcattccctcgggccctgaccctagcctcattcacatcacttgcccctgtcgacacctaagtttgcaccctttgatagacaccatgttcgatatctgaaaggctcagtgtcaggagacagagactgagggagactgaagacctgattctctgttccctgcttgttttttaacttcaaactcagatgaagccaatggacctgctgaaacacttgtctgtggaaactgggtcaggtcgggagatctactgaaatttggctttttttccatagccacgtgccttctgttgttgacagttcattcattaccaaagcctgtgtgtaactttgccttgttctgtggccatcttcttgctcatgttatttctcctgggaatgagcagtttgacttctgttcccacgttcctcattctatcagctctagatggattttgcctgcatagctggcttaatatgtctttgtgtatgggtagtctgtagcctgagaatatttacctaaaaatgtctaaacagccaccaagaatgtttataggggtataggaatatagttaacagagtgctaatctctcctcaaatgtccttttggaatgcttcccccaaaattgggaagttggtaggagcttttctttactttgaatttctttacttggacagaacgattctgccttaaagacacgctttgcagctctgataaagaacatccctgtttagtctcttgagttttacaggccacaaaatgtccgtctcagagggatctgtctcagcttttcttatttttgcttctctccgttttcaaaattaatcatcttgttctctgtataagaaaatttgagaagctgtggaca

SEQ ID NO: 190 - DNA, 2959 bp, Homo sapiens
ggtgattatttacctgaaacaacaagacctcaagagatgatgaaaatttttgcctttgccaactcactagtggaacttctggctgtggggttagaaacctttaatagagcacgctataggcagtttgtgaagcgaattggttatatgatcaggatgactcttggttatgtaagtgaccattgggcacagtatgtgagccataaccaaggctcaggattggcccaacagccctactctatggagaaactacaggttgaatttgatgaactgtttttgagggctgtcctacatgtgctgaaggccaaaagacttggcatttggctgtttatgtccgagatgccctttgggactctgtctgtgcaaatgctgtggaagctcttctacctcatgcaccaggtggagagcgagaacctgcagcagctctcctcctccctgcagcccgcccagtgcaagcagcagctccaagacccagaacattttaccaactttgagaagtgtctttcttctatgaatagctcagaagagatttgccttctgactacctttgctcagatggctcaggccagaagaaccaatgtggacgaagacttcataaaaattattgttctggagatatatgaggtatcttatgtcaccttgtctaccagagagactttttcaaaggttggtcgagagcttttagggactatcacagctgttcaccctgagataatttccgtccttctggatagagttcaagagaccattgaccaggttggaatggtttctctatacttgtttaaagaactgcctttgtatctttggcaaccttctgcatctgagatagcggtgattcgggattggttattgaattacaacctgacagtggtgaagaataaactggcctgtgttattcttgaaggactgaattggggatttgctaaacaggctacccttcatctggatcaagcagtccatgctgaagtggctttaatggttcttgaagcttatcagaagtaccttgcacagaagccatatgctgggattctctctgaaagtatgaagcaggtttcatatttggccagtattgttcgatatggagagacacccgagacctcatttaaccaatgggcctggaatttaatcttgaggctaaaactgcacaaaaacgattatggaatacagccgaattgtccagctgttcccttctccgtcactgtgcctgacatgacagagtcacccacgtttcatcctctcttgaaggctgtgaaagcgggcatgcccattggctgttatctagccttatctatgacagctgtgggccacagcattgagaagttctgtgcagaaggcatcccactattgggaattctggtccagtcaagacatttgagaacagtggttcatgtcctggataagattctgcctttattttacccttgccagtattaccttctgaagaatgagcagtttttatcgcatctcctcttgttcctacacttggacagcggtgtccctcagggtgtcacacaacaggtcacccacaaggtggcacagcacctgacaggagccagccatggggacaacgtgaagcttctcaacagcatgatccaggcacacatatctgtaagcactcagcccaatgaagtgggccccgttgctgtgttggagttctgggttcaggctctcataagccagcatctctggtaccgagaacaacctatcctcttcctcatggaccacttgtgtaaagcagcttttcagctgatgcaggaagactgcatacagaaattactctaccaacaacataagaatgccttgggttaccactgtgaccggagtctgctctcatctttggtaagctggattgtggcaggcaacatcactccttcctttgtggagggcttggccacgcccactcaggtctggtttgcctggacagtgctcaacatggaatccatctttgaagaggactcccagctccggagagttattgaaggggaattggtgataaactctgctttcacccctgaccaagctctgaagaaagcccagacccagctgaagctccccatcgtgccatccctccagaggctgctgatttatcgctgggcccaccaggctctggtcacaccttctgatcaccccctcctgccactcatttggcagaagttcttccttctgtatcttcaccgtccgggaccacagtatgggttacccatagatggttgtattggaagaaggttttttcaaagtcctgctcatatcaatttgttgaaagaaatgaagagacgtttgaccgaggtggctgacttccaccatgctgcaagcaaggccctccgtgttccagcagagggcagtgaagggctgccagagagccactctggcacccctggttacctgacttcaccagaactgcacaaggagctggtgaggctcttcaatgtatatatattatggctagaagatgagaattttcaaaaaggagatacctatatcccttctctaccaaagcattatgatattcacaggctagcaaaagtgatgcagaatcagcaggatctgtggatggagtatttgaacatggagcgcatctatcatgagtttcaggagactgttggtctgtggacacaggccaagcttgagtcccattccacaccctgcagtttgtccgtgcagctggacttcactgatcctttgctggctaaagaaagggttttaagtaacttgcggaagcatgaggctccccagcctccccttgttctgcacccgacgaagcctcctgtgccagttatttcctctgctgtgctattgagtcagaaggacgccacccagctggtgtgcacagacctgaatctgttgcaacagcaggccagaaccgcagctcttcgggaatctcagcaggttgctctggatggtgagctgttagacacaatgccaaagcagtatgtgaatcgtgaagaacagaccacactacatt

SEQ ID NO: 191 - protein, 965 aa, Homo sapiens
  VARIANT (1)...(965): Xaa = Any Amino Acid
MMKIFAFANSLVELLAVGLETFNRARYRQFVKRIGYMIRMTLGYVSDHWAQYVSHNQGSGLAQQPYSMEKLQVEFDELFLRAVLHVLKAKRLGIWLFMSEMPFGTLSVQMLWKLFYLMHQVESENLQQLSSSLQPAQCKQQLQDPEHFTNFEKCLSSMNSSEEICLLTTFAQMAQARRTNVDEDFIKIIVLEIYEVSYVTLSTRETFSKVGRELLGTITAVHPEIISVLLDRVQETIDQVGMVSLYLFKELPLYLWQPSASEIAVIRDWLLNYNLTVVKNKLACVIQWGFAKQATLHLDQAVHAEVMVLEAYQKYLAQKPYAGILSESMKQVSYLASIVRYGETPETSFNQWAWNLILRLKLHKNDYGIQPNCPAVPFSVTVPDMTESPTFHPLLKAVKAGMPIGCYLALSMTAVGHSIEKFCAEGIPLLGILVQSRHLRTVVHVLDKILPLFYPCQYYLLKNEQFLSHLLLFLHLDSGVPQGVTQQVTHKVAQHLTGASHGDNVKLLNSMIQAHVSTQPNEVGPVAVLEFWVQALISQHLWYREQPILFLMDHLCKAAFQLMQEDCIQKLLYQQHKNALGYHCDRSLLSSLVSWIVAGNITPSFVEGLATPTQVWFAWTVLNMESIFEEDSQLRRVIEGELVINSAFTPDQALKKAQTQLKLPIVPSLQRLLIYRWAHQALVTPSDHPLLPLIWQKFFLLYLHRPGPQYGLPIDGCIGRRFFQSPAHINLLKEMKRRLTEVADFHHAASKALRVPAEGSEGLPESHSGTPGYLTSPELHKELVRLFNVYILWLEDENFQKGDTYIPSLPKHYDIHRLAKVMQNQQDLWMEYLNMERIYHEFQETVGLWTQAKLESHSTPCSLSVQLDFTDPLLAKERVLSNLRKHEAPQPPLVLHPTKPPVPVISSAVLLSQKDATQLVCTDLNLLQQQARTAALRESQQVDGELLDTMPKQYVNREEQTTLHX

SEQ ID NO: 192 - DNA, 4057 bp, Homo sapiens
tagttcgatcttaaacaatggttaagcgccactaaacctcctctgtctgatcgtaccaggcttctggagtccattcacttggcacttactgcctggggccttgaaccagatgaggatattttgatgccatttaatcttttctgtaagcactggacttatcttcttctctaccagtttcctgaccagtacagtgacattctcaggctgcttatgcaaagctccgcggagcagcttctgagccccgagtgttggaaggccactctgagagccctgggctgctgcgcccccagctgccagcagggggcagcgtccaccgagggcgccgtgcttcccagctcttctgatgctctcttgtcagacaagcaggtaatggagactatacagtggctttcagactttttttataagcttcggttatccaagatggactttaaaagctttggtttattctcaaaatggagtccttatatggctgatgtgaagacattcttgggctaccttgtgaaaaggctgattgacttagaaatgacctgtttggcccaagacccaactgccagcaggaaaacagtgctgaaatccctacattcagtaatcattcagctctttaagccatggatcctggttttagaggacaacgaaagcagccaacagcggcattacccctggctagagagtgatactgtggtggcctcaagcattgtgcagctgttcactgactgtattgactcactgcatgagagttttaaagataagctgttgccaggtgatgcaggagccctttggttgcacctgatgcattattgtgaagcatgtacagcacccaaaatgccagagttcattctgtacgctttccatagcacgtaccggaaactgccatggaaggacctgcaccctgaccagatgctcatggaggccttcttcaaagtggaacgaggaagccccaagagctgtttcttatttttggggtctgtactctgtgaagtcaactgggttagtgtgctctctgatgcctggaattccagtccccacccagaaacccgcagcatgattgtctgcctccttttcatgatgattttattggcaaaggaagttcaactggtagaccaaacagattcacctttacttagtctccttggacagacaagctcactttcatggcatcttgtggatattgtgtcgtaccagagtgtgctaagttatttcagcagccattacccgccgtccatcatcctggcaaaagaatcttatgctgaattaatcatgaagctcctaaaagtgtctgcgggcctttctattcctactgacagccagaagcatcttgatgcagttccaaaatgccaagcttttactcatcagatggttcaattcctcagcaccctggaacaaaatggaaaaatcaccttagcagtcctagaacaggaaatgtctaagctcttagacgatatcattgtctttaacccgcccgacatggacagccagacccgccacatggccctcagcagcctctttatggaagtcctgatgatgatgaacaacgcgactattccaacagcagagttccttcggggcagtatccggacctggattggccaaaaaatgcatgggctggtggtgctgccccttttaacagcagcctgccagagcctggcgtccgtccgccacatggctgagactacagaagcctgcatcactgcctacttcaaagaaagccctctcaatcagaattcaggatggggacccattctggtatcccttcaggttcccgagctcaccatggaagagttcctgcaggagtgcctcaccttgggcagttacttgactctttacgtctacttgcttcagtgtttaaacagcgaacagactttaaggaatgaaatgaaagtgctgctcatcttaagcaagtggctggaacaggtgtacccaagctccgtggaggaagaggcaaagctgtttttgtggtggcaccaagtccttcagctctccctcattcagacagagcagaatgactccgtcctgacagaatctgtcattcgaattctgctcttggttcagagcaggcagaacctcgtggctgaggagagactcagctctgggatcctgggggcaattgggtttggccggaagtcgcctttgtctaacaggttccgagtggttgcccgaagcatggctgccttcctttcagttcaggttcctatggaagatcagatccgtttgaggcctggctctgaattacatctgacccccaaagctcagcaggctctgaatgctcttgaatccatggcatcaagtaagcagtatgttgaataccaggatcaaatattgcaagccacccaatttataaggcatcctggccattgccttcaagatgggaaaagcttcttggctcttctcgttaactgtctgtatccagaagtgcattatttggaccacatacgatagttaacactgaggctcttgaaaaacccattgctgtttatgtttacatttaactttgctgttgcacaagtaactttgctcaattgcactgtagagctcagtttggccaatgtgtagttgactgagatgcaagttgggaggcgttagatattagataattttggggtgtgtgtgtgtgtgtgtgtgtgttttcttagctcttaagaccttctggggactctttaagtttttatatttatccacaagagaaacttactaagttccacttgggtgcagagccactcacagttgccgaatgtcccagtcatctcacaagacctccagatggagttctttgtatgtttccacttctgtctctgttttatgtaaatgttccagatctgacaaccttggaagtcactcagtacccttacttttaaaccccatttgtgttcctccaaagtaaagaagtcaattttgaaaaatttctgcatttctcaaatgtggacaaatacaatagttttaaagtattgtttttctcagaagggagataaaaatgccgagttagttaaagtgggtcatgtgtaaaatacgaccacttgatcgtgattatagtgggcagtagagatgatgacaagtcaatttccatccagccgtgtatcctcatggagaagctgcctgtctgaatcaggatggcaagctggcagtctgggaggagcatgttttgcacagatgttttgtttggtccacttggtgaggagtgcagacagggctgcctctctctagtcgggagagtctgtgcattccctcgggccctgaccctagcctcattcacatcacttgcccctgtcgacacctaagtttgcaccctttgatagacaccatgttcgatatctgaaaggctcagtgtcaggagacagagactgagggagactgaagacctgattctctgttccctgcttgttttttaacttcaaactcagatgaagccaatggacctgctgaaacacttgtctgtggaaactgggtcaggtcgggagatctactgaaatttggctttttttccatagccacgtgccttctgttgttgacagttcattcattaccaaagcctgtgtgtaactttgccttgttctgtggccatcttcttgctcatgttatttctcctgggaatgagcagtttgacttctgttcccacgttcctcattctatcagctctagatggattttgcctgcatagctggcttaatatgtctttgtgtatgggtagtctgtagcctgagaatatttacctaaaaatgtctaaacagccaccaagaatgtttataggggtataggaatatagttaacagagtgctaatctctcctcaaatgtccttttggaatgcttcccccaaaattgggaagttggtaggagcttttctttactttgaatttctttacttggacagaacgattctgccttaaagacacgctttgcagctctgataaagaacatccctgtttagtctcttgagttttacaggccacaaaatgtccgtctcagagggatctgtctcagcttttcttatttttgcttctctccgttttcaaaattaatcatcttgttctctgtataagaaaatttgagaagctgtggaca

SEQ ID NO: 193 - protein, 767 aa, Homo sapiens
MPFNLFCKHWTYLLLYQFPDQYSDILRLLMQSSAEQLLSPECWKATLRALGCCAPSCQQGAASTEGAVLPSSSDALLSDKQVMIQWLSDFFYKLRLSKMDFKSFGLFSKWSPYMADVKTFLGYLVKRLIDLEMTCLAQDPTASRKTVLKSLHSVIIQLFKPWILVLEDNESSQQRHYPWLESDTVVASSIVQLFTDCIDSLHESFKDKLLPGDAGALWLHLMHYCEACTAPKMPEFILYAFHSYKLPWKDLHPDQMLMEAFFKVERGSPKSCFLFLGSVLCEVNWVSVLSDAWNSSPHPETRSMIVCLLFMMILLAKEVQLVDQTDSPLLSLLGQTSSLSWHLVDIVSYQSVLSYFSSHYPPSIILAKESYAELIMKLLKVSAGLSIPTDSQKHLDAVPKCQAFTHQMVQFLSTLEQNGKITLAVLEQEMSKLLDDIIVFNPPDMDSQTRHMALSSLFMEVLMMMNNATIPTAEFLRGSIRTWIGQKMHGLVVLPLLTAACQSLASVRHMAETTEACITAYFKESPLNQNSGWGPILVSLQVPELTMEEFLQECLTLGSYLTLYVYLLQCLNSEQTLRNEMKVLLILSKWLEQVYPSSVEEEAKLFLWWHQVLQLSLIQTEQNDSVLTESVIRILLLVQSRQNLVAEERLSSGILGAIGFGRKSPLSNRFRVVARSMAAFLSVQVPMEDQIRLRPGSELHLTPKAQQALNALESMASSKQYVEYQDQILQATQFIRHPGHCLQDGKSFLALLVNCLYPEVHYLDHIR

SEQ ID NO: 194 - DNA, 6188 bp, Homo sapiens
aagtaattagggaaaattctgttgagttctgatcggaaggtaaagtgcgtcctcctgtgtgcttggcaggtttttatcgcatctcctcttgttcctacacttggacagcggtgtccctcagggtgtcacacaacaggtcacccacaaggtggcacagcacctgacaggagccagccatggggacaacgtgaagcttctcaacagcatgatccaggcacacatatctgtaagcactcagcccaatgaagtgggccccgttgctgtgttggagttctgggttcaggctctcataagccagcatctctggtaccgagaacaacctatcctcttcctcatggaccacttgtgtaaagcagcttttcagctgatgcaggaagactgcatacagaaattactctaccaacaacataagaatgccttgggttaccactgtgaccggagtctgctctcatctttggtaagctggattgtggcaggcaacatcactccttcctttgtggagggcttggccacgcccactcaggtctggtttgcctggacagtgctcaacatggaatccatctttgaagaggactcccagctccggagagttattgaaggggaattggtgataaactctgctttcacccctgaccaagctctgaagaaagcccagacccagctgaagctccccatcgtgccatccctccagaggctgctgatttatcgctgggcccaccaggctctggtcacaccttctgatcaccccctcctgccactcatttggcagaagttcttccttctgtatcttcaccgtccgggaccacagtatgggttacccatagatggttgtattggaagaaggttttttcaaagtcctgctcatatcaatttgttgaaagaaatgaagagacgtttgaccgaggtggctgacttccaccatgctgcaagcaaggccctccgtgttccagcagagggcagtgaagggctgccagagagccactctggcacccctggttacctgacttcaccagaactgcacaaggagctggtgaggctcttcaatgtatatatattatggctagaagatgagaattttcaaaaaggagatacctatatcccttctctaccaaagcattatgatattcacaggctagcaaaagtgatgcagaatcagcaggatctgtggatggagtatttgaacatggagcgcatctatcatgagtttcaggagactgttggtctgtggacacaggccaagcttgagtcccattccacaccctgcagtttgtccgtgcagctggacttcactgatcctttgctggctaaagaaagggttttaagtaacttgcggaagcatgaggctccccagcctccccttgttctgcacccgacgaagcctcctgtgccagttatttcctctgctgtgctattgagtcagaaggacgccacccagctggtgtgcacagacctgaatctgttgcaacagcaggccagaaccgcagctcttcgggaatctcagcaggttgctctggatggtgagctgttagacacaatgccaaagcagtatgtgaatcgtgaagaacagaccacactacatttggagtgcagaggcagcagcggtaagaaatgccaaggagccgcagttgtcacggttcagtttgaaggcatgcataagaatgaagccataagccaacagcttcatgttttacggaaggaagtgaagcagttgcaagcagaagctgctaaaccaccatcacttaatattgtggaagctgctgtacatgcagaaaacttgatcacggccttagtgaatgcctacaagttgcagcctacacctgggattcagaaagttggcattagccttttctttactattgtggattacgtcagcgatgagacgcagcgtcatcccccaacaaggcagttctttacttcatgtattgagatcttgggacaggtatttatcagtggcattaaatcagagtgcagaaaagtacttgaaaccattctgaagaacagcaggctctgctccctgctgtctcctttcttcactcccaatgctgcacctgcagagttcatacagctgtatgagcaagtggtgaagtttctaagtgaggacaacagtgatatgattttcatgctgctaaccaagttcgatcttaaacaatggttaagcgccactaaacctcctctgtctgatcgtaccaggcttctggagtccattcacttggcacttactgcctggggccttgaaccagatgaggatattttgatgccatttaatcttttctgtaagcactggacttatcttcttctctaccagtttcctgaccagtacagtgacattctcaggctgcttatgcaaagctccgcggagcagcttctgagccccgagtgttggaaggccactctgagagccctgggctgctgcgcccccagctgccagcagggggcagcgtccaccgagggcgccgtgcttcccagctcttctgatgctctcttgtcagacaagcaggtaatggagactatacagtggctttcagactttttttataagcttcggttatccaagatggactttaaaagctttggtttattctcaaaatggagtccttatatggctgatgtgaagacattcttgggctaccttgtgaaaaggctgattgacttagaaatgacctgtttggcccaagacccaactgccagcaggaaaacagtgctgaaatccctacattcagtaatcattcagctctttaagccatggatcctggttttagaggacaacgaaagcagccaacagcggcattacccctggctagagagtgatactgtggtggcctcaagcattgtgcagctgttcactgactgtattgactcactgcatgagagttttaaagataagctgttgccaggtgatgcaggagccctttggttgcacctgatgcattattgtgaagcatgtacagcacccaaaatgccagagttcattctgtacgctttccatagcacgtaccggaaactgccatggaaggacctgcaccctgaccagatgctcatggaggccttcttcaaagtggaacgaggaagccccaagagctgtttcttatttttggggtctgtactctgtgaagtcaactgggttagtgtgctctctgatgcctggaattccagtccccacccagaaacccgcagcatgattgtctgcctccttttcatgatgattttattggcaaaggaagttcaactggtagaccaaacagattcacctttacttagtctccttggacagacaagctcactttcatggcatcttgtggatattgtgtcgtaccagagtgtgctaagttatttcagcagccattacccgccgtccatcatcctggcaaaagaatcttatgctgaattaatcatgaagctcctaaaagtgtctgcgggcctttctattcctactgacagccagaagcatcttgatgcagttccaaaatgccaagcttttactcatcagatggttcaattcctcagcaccctggaacaaaatggaaaaatcaccttagcagtcctagaacaggaaatgtctaagctcttagacgatatcattgtctttaacccgcccgacatggacagccagacccgccacatggccctcagcagcctctttatggaagtcctgatgatgatgaacaacgcgactattccaacagcagagttccttcggggcagtatccggacctggattggccaaaaaatgcatgggctggtggtgctgccccttttaacagcagcctgccagagcctggcgtccgtccgccacatggctgagactacagaagcctgcatcactgcctacttcaaagaaagccctctcaatcagaattcaggatggggacccattctggtatcccttcaggttcccgagctcaccatggaagagttcctgcaggagtgcctcaccttgggcagttacttgactctttacgtctacttgcttcagtgtttaaacagcgaacagactttaaggaatgaaatgaaagtgctgctcatcttaagcaagtggctggaacaggtgtacccaagctccgtggaggaagaggcaaagctgtttttgtggtggcaccaagtccttcagctctccctcattcagacagagcagaatgactccgtcctgacagaatctgtcattcgaattctgctcttggttcagagcaggcagaacctcgtggctgaggagagactcagctctgggatcctgggggcaattgggtttggccggaagtcgcctttgtctaacaggttccgagtggttgcccgaagcatggctgccttcctttcagttcaggttcctatggaagatcagatccgtttgaggcctggctctgaattacatctgacccccaaagctcagcaggctctgaatgctcttgaatccatggcatcaagtaagcagtatgttgaataccaggatcaaatattgcaagccacccaatttataaggcatcctggccattgccttcaagatgggaaaagcttcttggctcttctcgttaactgtctgtatccagaagtgcattatttggaccacatacgatagttaacactgaggctcttgaaaaacccattgctgtttatgtttacatttaactttgctgttgcacaagtaactttgctcaattgcactgtagagctcagtttggccaatgtgtagttgactgagatgcaagttgggaggcgttagatattagataattttggggtgtgtgtgtgtgtgtgtgtgtgttttcttagctcttaagaccttctggggactctttaagtttttatatttatccacaagagaaacttactaagttccacttgggtgcagagccactcacagttgccgaatgtcccagtcatctcacaagacctccagatggagttctttgtatgtttccacttctgtctctgttttatgtaaatgttccagatctgacaaccttggaagtcactcagtacccttacttttaaaccccatttgtgttcctccaaagtaaagaagtcaattttgaaaaatttctgcatttctcaaatgtggacaaatacaatagttttaaagtattgtttttctcagaagggagataaaaatgccgagttagttaaagtgggtcatgtgtaaaatacgaccacttgatcgtgattatagtgggcagtagagatgatgacaagtcaatttccatccagccgtgtatcctcatggagaagctgcctgtctgaatcaggatggcaagctggcagtctgggaggagcatgttttgcacagatgttttgtttggtccacttggtgaggagtgcagacagggctgcctctctctagtcgggagagtctgtgcattccctcgggccctgaccctagcctcattcacatcacttgcccctgtcgacacctaagtttgcaccctttgatagacaccatgttcgatatctgaaaggctcagtgtcaggagacagagactgagggagactgaagacctgattctctgttccctgcttgttttttaacttcaaactcagatgaagccaatggacctgctgaaacacttgtctgtggaaactgggtcaggtcgggagatctactgaaatttggctttttttccatagccacgtgccttctgttgttgacagttcattcattaccaaagcctgtgtgtaactttgccttgttctgtggccatcttcttgctcatgttatttctcctgggaatgagcagtttgacttctgttcccacgttcctcattctatcagctctagatggattttgcctgcatagctggcttaatatgtctttgtgtatgggtagtctgtagcctgagaatatttacctaaaaatgtctaaacagccaccaagaatgtttataggggtataggaatatagttaacagagtgctaatctctcctcaaatgtccttttggaatgcttcccccaaaattgggaagttggtaggagcttttctttactttgaatttctttacttggacagaacgattctgccttaaagacacgctttgcagctctgataaagaacatccctgtttagtctcttgagttttacaggccacaaaatgtccgtctcagagggatctgtctcagcttttcttatttttgcttctctccgttttcaaaattaatcatcttgttctctgtataagaaaatttgagaagctgtggaca

SEQ ID NO: 195 - protein, 1446 aa, Homo sapiens
MIQAHVSTQPNEVGPVAVLEFWVQALISQHLWYREQPILFLMDHLCKAAFQLMQEDCIQKLLYQQHKNALGYHCDRSLLSSLVSWIVAGNITPSFVEGLATPTQVWFAWTVLNMESIFEEDSQLRRVIEGELVINSAFTPDQALKKAQTQLKLPIVPSLQRLLIYRWAHQALVTPSDHPLLPLIWQKFFLLYLHRPGPQYGLPIDGCIGRRFFQSPAHINLLKEMKRRLTEVADFHHAASKALRVPAEGSEGLPESHSGTPGYLTSPELHKELVRLFNVYILWLEDENFQKGDTYIPSLPKHYDIHRLAKVMQNQQDLWMEYLNMERIYHEFQETVGLWTQAKLESHSTPCSLSVQLDFTDPLLAKERVLSNLRKHEAPQPPLVLHPTKPPVPVISSAVLLSQKDATQLVCTDLNLLQQQARTAALRESQQVDGELLDTMPKQYVNREEQTTLHLECRGSSGKKCQGAAVVTVQFEGMHKNEAISQQLHVLRKEVKQLQAEAAKPPSLNIVEAAVHAENLITALVNAYKLQPTPGIQKVGISLFFTIVDYVSDETQRHPPTRQFFTSCIEILGQVFISGIKSECRKVLETILKNSRLCSLLSPFFTPNAAPAEFIQLYEQVVKFLSEDNSDMIFMLLTKFDLKQWLSATKPPLSDRTRLLESIHLALTAWGLEPDEDILMPFNLFCKHWTYLLLYQFPDQYSDILRLLMQSSAEQLLSPECWKATLRALGCCAPSCQQGAASTEGAVLPSSSDALLSDKQVMIQWLSDFFYKLRLSKMDFKSFGLFSKWSPYMADVKTFLGYLVKRLIDLEMTCLAQDPTASRKTVLKSLHSVIIQLFKPWILVLEDNESSQQRHYPWLESDTVVASSIVQLFTDCIDSLHESFKDKLLPGDAGALWLHLMHYCEACTAPKMPEFILYAFHSYKLPWKDLHPDQMLMEAFFKVERGSPKSCFLFLGSVLCEVNWVSVLSDAWNSSPHPETRSMIVCLLFMMILLAKEVQLVDQTDSPLLSLLGQTSSLSWHLVDIVSYQSVLSYFSSHYPPSIILAKESYAELIMKLLKVSAGLSIPTDSQKHLDAVPKCQAFTHQMVQFLSTLEQNGKITLAVLEQEMSKLLDDIIVFNPPDMDSQTRHMALSSLFMEVLMMMNNATIPTAEFLRGSIRTWIGQKMHGLVVLPLLTAACQSLASVRHMAETTEACITAYFKESPLNQNSGWGPILVSLQVPELTMEEFLQECLTLGSYLTLYVYLLQCLNSEQTLRNEMKVLLILSKWLEQVYPSSVEEEAKLFLWWHQVLQLSLIQTEQNDSVLTESVIRILLLVQSRQNLVAEERLSSGILGAIGFGRKSPLSNRFRVVARSMAAFLSVQVPMEDQIRLRPGSELHLTPKAQQALNALESMASSKQYVEYQDQILQATQFIRHPGHCLQDGKSFLALLVNCLYPEVHYLDHIR

SEQ ID NO: 196 - DNA, 8403 bp, Mus musculus
cacacacgccccggggcttcctgttgtcaggtcaggtctttggtagtctagggcttacacgcgggtccgtcctgcgcccactcgtgtttgcgggccccgcgccccgaagcatgtgggccggcgtcgcggggctgagaggctcctgcgccgggctgcaggctctgtggggcggccacagggctgcgcttcttctcggccgctcgccggccctgcacacctcggtcgcctcctgcggcagcaagaacttgctcaagaaatttgcttcgaaaaccaggtatgcacggatcagggtctgttgcgggcctggtcgcctggtgcacggttggatggaggcggtttctacagggaatgggtgtccacgaggggttggggcgagaccatggggacaggttgttagaagatgattattggcagatcacctgcagattgacctttgactatttccacgttcccttcacattttaagtgcataaaatgtgcctttattagatatctttagtaataaagatataagatattttgattccgccggacagtggccccacaggccttttatcgcagcactcgggaggcagaggcaggaggatctctgatctgagttcaaggccagcctgggctacagcatgagtgccaagatagtcagggctaaacagagaagctctatctccaaaaacaagacaagaaaaagatatttttaatttccacggcatcttagaatctaccaagtgtggtaagccagtttatattttggggggtttgttttaacaaatgattttacaggtggttttaggtttatgaagaagttcatggttctgggactggcctaagattctctatcagagtttaatgtgcaatccttaatgttttttcctatccagacacggtagctcgtggtcagtctttccctgtttgacagctgtaaccgttctggagaatcctgtttggaggttgtgtggttgtacaccactggaattcgatattttcttcatggttatctgtgggttgtggacttggggagaaagaaacagagaaaaagcagcattttatccatcttattagggtgtatatagccatgagcttcctgccattttatcctgtcttatcgaggggtcttacagccagtgtgcctcccactgttctggggtcagctgtcccttttgtcatttttggtaagaagctgctgtgtgttgtagcccctgaccttaagaggtgaaggattatagtcatggattaatttgaattctttgtgggagatgttccccttcatttattaatgcattcatcaatgtggacttgtagttaccagctatgggttttgttttgttttgttttaagatttagttatttattatatataagtacactctagctgtcttcagccacaccagaagagggcatcagatcccattacagatggttgtgagccaccatgtggttgctgggattttaactcagtacctctggaagagtagtcagtgctcttaaccccagctgcagttttattttgctcagtgttccatctttggcctttagcagccccctctacccctttgctctcttgacacactccggatgtttagcaatttcttaccttctgacacttcaagatgtcttaagctcatcttacgtataccccttcaaccccgagaataagctattcctgtgaggagcccaggtttcgggaaggtgctggccagcgtggtctgggatccaggcgcgcccactttcattgttacagctgcctttggtcctgctacttaggagcattttgtacttatctgggcatttgtcctctttccctgctctccggggactcgcccctgttctcacagtgaaaagtgaggctcccctcagtttcctaagtgttcagtggagcacaccagaaccatcaaccctcatcttcatgaatggccaacgaggcatagtgcttcgtgcaatttggagataaaatctaaaggcctgtttgttcttccactgtagagagacacaagtcacagttacagggttacgtgtaagtgtcttctgtcccatcctggaaagcaccctaggcttgaagtgtcacagcgttttgacgtggtttatgcaaaacttttttttaacttgtcatagctatctcatctaatttttaaaaaaatgatcctccatctctttataaagatgtgttatatatgtatgtgtatgagcttgtgtctctttctctctttctgcctctctctgtctgtctctctctctccctctgtgatgtgtgtgtgtgtgtgtgtgtgtgcgcgtgcacgcgcgcgcatggttttttcaagacagtttctctgtctggctgtcttggaacttactctgtaaaccaggctggcctcttaactcacagaaatccacctgcctctccatcttgagtgctggatttataaggtgtacactgccactgcttggcctttgtacctgagttctaaaatggtgctagcacatgtctttaatctcaaactcagaggcagaggcaggcaatctattgagttcaaggccagaaaaacaaacaaacaaacaaacaagcaaacaaacgagaaaggattcatttatgtgtttgagtattttgcctgcatttatgttgtgtgcatcatgtgcaagcctggtatctgtggaggtctgaagagttcgtcagatttattgagagataccacgtgaatactggaactgaacccaggtccccgaaagactaactagtgttgttaaccactgagctacttctccagccgccccctcccaacccaatcttgttttcttgatctaggaagaagttttggtatgaaggtccctccctggggtctcacttgacccccaggccatccaagcatgagttcctcacgaagaccacctcaaagaagactaggaaggaagacagcatccgcctgagggtcctgaacggccttctctacaaatcattgacggaactgctgtgcactcctcaagtgagccaggaggtctacgacctgaatgtggagctgtccaaggtgagcgagcagaggccggggttggggcttaggactgtggtgaggtttataaagagagcgtggggcccaccatcttcctagaaggggctgtgagcagtgcggtggggcccacggggttgagctgagagaagggaggttagcgtgggtgtctgtgacccgacttcccctgggtgaatgctctctggctgccatcaccagaataactggcaagaggcaggagaagctgtagcgcctatctccagcacgctgtgcgaactgtgcagactgaacgtaaagtgacaagcgttggggggcctttcaggtctctgtgacttcagacttctcagcctgccgagtgtactggaagacgggggtctctgcggagcagaacaagcacacggagtcggtgctgcagaggagcgctgcctacatgaggtgatggggtttgcttcctacgagtaacgccttctaactgaaccttaagtgccttggccgcttgtctgtaggtaaactttacaatttcgtttgcattgaggatttttgcctttcaggaaaatcttagaagcgtctccttgattcctagagtataaattgcattttcctgtgagacctaacctaatcagatttctcaaaagtctcgtggggctccacaggtccttccagggtgctgtgaggcaagaactattttgactgcattaaagttggctcttgattccactgctgcccaagcttgctgagacacacggtgcctgatttacctaaaagcatcctggataaacaaggaaaagagtaaaaagagcaccattgtaaatgttggtccttggcgggaagcacaggcaggtctctaatgtctgctgaggcaccgtcctccctaaggtcctccctaggtgagaattcctgctggagtgaaccactgaagagcagacagctggctggtcccgcccaaggctggtagcaaaacgtacccttacagaatttgagcagttgagccagaagtgtgtgaactcgggagtctggagaacactaagtgtgttcttgtgggaccgtgactttgcaagtgccacaccgtactgcacagggttctgacctagtgtcagcaactggcccgacatacaaggccgtaagaccaccccgggggagaaggtccctaacccgccagaccctgatgcactgtagcgtgatactggattgtgttaggttgcacgggggctcaaaacgatccctgctttcctaaggacaattaatacatttccccttccgcagttccttatctgtgtgaggccgcggtttcatgtgtatcagcaagaatagcaacaggaagtaagtgtggaatgcggcgctggcagttcctccactgagctgatgctcaaaaacgtgcagacacacaggctaggccaccgctcgctctcaacacttccttaaaaaagttatttttttcccgtgaaaactatgtgtggccgcagttagtatgcttactgttttaaaatggcttttcaaatatgccattttaaaatttctcagatcggatttccagttgagttgacgtccatagaacaacgtaaacaaaatctgttggccgttctcagtcacttcttataattgtaaagggtcctgagaccccaacttttgagaattggtgagctgcttggatatagtgaagctattcagtgtcttagttcttaggtttctgtcgctgtgatgaaattccgtggccaacaaaccgatttgggaggaaagggtttgtttgacttacacttctgtgtcactgttcatccctgcatcaggacaggaacgcagacggtaggaacctgggggcgggagccgatgcagaggccatggaggctgctgcttattggcttgctcctcaggggtttctcagcctgctttcttacagacctcctgctcctctctatagctcttgccctcccttcatatattactccatttcaggaagaagactgtgctgggaacccacgggtggggctcatccagcatatctgtttgtctgtctgtgtactgtctcatgttctgtatgagggtcactgggcatcccttccatagagagtgtctgcagccatcaaggaaggatcagaagcacgttagcagagtggaacacatctttgagactgttgtgattgcctgaagtttcaagggattgcagggcctagacctcattagtctggtctgtatcacattactgagctgtaccaaaatctttcgggtctagcagggatgtcaggtcggagtccttccagggagtgcccactgagtataggatgctgtgagtccaattcaaacaacttgttaattaggcctcggtcccttggaagagtgaagaccggagatggtatggtgcatcctatatgatgaggcagtatagaaaaggactcaccaaagctctgcttcccctctcccccccaccccccgccccgccccatcaatgacccgttgtcagtagctctctcagacgccccttctgcctccatagtgagcaagtcttcttatctcctggtaaatttgtgagtttcgtgtagtttatgtttggttcctctccactaagtgtcacgtgctctctcctcaggcatcttctgatatctcagcaaaccctgagaaatgttccacccatagtgtttgttcaagacaaaagagacttggtcctggctgaggtgagcttttaccgtgattagcctttttttttttttttaaatctcatgtacaccagaatgagcttttatttacgtgttgtttgtttgctgatttattagtttaaaaaattatgaacatgggtgttttgcttgtatgtatgtctgtaccacatgcatatactgccctctgaggccagaaaaaggcatttgatgccaggaactcgtgtgcgggttctgggaagtgaccccaagtcctctggaatagcagccagcgttctaaaccaccaagccacctctccagccctgtttattcacttttgtgtggggggcgtcttagttaggctttctatagctatgatagaacaacatgaccaaaaacaactggggagggaagagcttatttcagcttacagttttgtctcatagtccattggtgagggaagtcagggcaggaactcaaacaggacagggacaggcagggaccatgtaagagtgctgcttgtcaccttcctcctcatggcttgctcggccagctcccttacacacctcccttacacacccgaggaccaccagcccaggggtgtcgcccccctaaagggctaggcacccccacatcaatccctaattaaggaaatgctcttcgtgcttgcctacaggccagtaagtgtgtccacagggacattttctcagttgacgtttcctcttcccagatgtctctagcttatgtcagattggtataaaacaagtcagcatagtgggtgttgaggtcagaggacaccctttcaagacagagcgtttattctgcagaaattaccagcacgcaggggccaaccgttcatcaaaatggcgaccaccagaggagctcacaggttccctctaatgcagggctaggggaattttccagaaggttaagtaacctctaatatgattggctagaagtgcagcagagacattagtacagttctgattggttgctatgctagttccatatttggtgaggccgccttgaaggatttcaggagccagctgagccctggccttgttatctcctccagcagctgtctcaggagttgactcagctccagacttaaacgctgaggtcagggtcagcactgagcaatgacccatttcagtgactcctctgaggaacccaggatgtttcctagagttgaaaatttttattcttaaggtcaccagtggctgcaatgcctttgtccacagagccattgttccctgtctaaataattagctttttatactttctgaccttgaacttgcagagatccccctgcctcggattgctgctacttttggctcaggccccttgaccccacagtgggctcttgtggctgagactcgccaacctcacatatgttcttcctctgttagtggctccctgtcgtaaacactcaacattctgtggccagatggaattattttgcaagaacaccttagaaactagtaaatgtcagttatgtaattcagcccgtgtttattttcctcagagacttgtctaatgttgcaaactcagggagcctcagttgtcgtcagggaacttgggacaagataatggaacagggaggggggtggatcgcagcattgagaaggcgcccgcccgcagtggtgctagctgaagccaggtgacttgtgctggactgcgtgcgaggccctgactctgtaccctgcaagcagagggcgtggcctaccatatcctccccccaccccctactttcctttcaggtagatcggttgctggcagaggctgactttggacccccagatgaaagggacgacttggacggtttgaggtgagccacgtggacatctctctgttacctgaggcagatgttttagccacagcggctgctctactagtctgtgcttctgctagcacacatggcccccttggtgcctgcccctggacccagcacaggtctgtatgttctgggtggctgtctatataccaccacgctcaggtgcacacactggtcccccgagccactgtccaggatcaccttgctacatccctgtcaccctcagatacggtcagagatgggaagatgtagcacgggtcctatgcagatggtttgctccttacacagtgctttggagtgtggtttgggctctgtgtgaaggcttgcttctcttctctcacaggaacgccgatgcccaggtaccacatgactccccagaaccagccgcacacccaaatctgtgtgggattgaccacgaggcgctgaataagcaaataatggagtacaaacgcaagaaggagcgagggcttcagtgtcagagtctggcgccaccatcagggcgggagcaggcacctgaaccgacccgtctgctccggaagagagagaaggtgcgatcccggtggcagcaccgggacgcttcccccagaagcttccttttgggcgaggaggacgaggacgaggacagcagcacagagtgggaatgccatgcccacgaggcagaggatgatgatgatcatcaggaagaggagctcggagctgacagaggcgcgcagcggggcctttgtggcaagagagagcaggggtagggctggggcctccgagctgccgcccctgcctgtgggtcagactgcaggacagagcctctggtgtaccttctgtagtagtcactcacggaggcggcctgacctcagcggcaggagaactgcacccatcggactgcacctgcagacctccgcagccagtcctcagcgattggtacctacctggtcccggataaataaaccattttgtatttactctgagaat

SEQ ID NO: 197 - DNA, 1280 bp, Mus musculus
cacacgccccggggcttcctgttgtcaggtcaggtctttggtagtctagggcttacacgcgggtccgtcctgcgcccactcgtgtttgcgggccccgcgccccgaagcatgtgggccggcgtcgcggggctgagaggctcctgcgccgggctgcaggctctgtggggcggccacagggctgcgcttcttctcggccgctcgccggccctgcacacctcggtcgcctcctgcggcagcaagaacttgctcaagaaatttgcttcgaaaaccaggaagaagttttggtatgaaggtccctccctggggtctcacttgacccccaggccatccaagcatgagttcctcacgaagaccacctcaatgagccaggaggtctacgacctgaatgtggagctgtccaaggtctctgtgacttcagacttctcagcctgccgagtgtactggaagacgggggtctctgcggagcagaacaagcacacggagtcggtgctgcagaggagcgctgcctacatgaggcatcttctgatatctcagcaaaccctgagaaatgttccacccatagtgtttgttcaagacaaaagagacttggtcctggctgaggtagatcggttgctggcagaggctgactttggacccccagatgaaagggacgacttggacggtttgaggaacgccgatgcccaggtaccacatgactccccagaaccagccgcacacccaaatctgtgtgggattgaccacgaggcgctgaataagcaaataatggagtacaaacgcaagaaggagcgagggcttcagtgtcagagtctggcgccaccatcagggcgggagcaggcacctgaaccgacccgtctgctccggaagagagagaaggtgcgatcccggtggcagcaccgggacgcttcccccagaagcttccttttgggcgaggaggacgaggacgaggacagcagcacagagtgggaatgccatgcccacgaggcagaggatgatgatgatcatcaggaagaggagctcggagctgacagaggcgcgcagcggggcctttgtggcaagagagagcaggggtagggctggggcctccgagctgccgcccctgcctgtgggtcagactgcaggacagagcctctggtgtaccttctgtagtagtcactcacggaggcggcctgacctcagcggcaggagaactgcacccatcggactgcacctgcagacctccgcagccagtcctcagcgattggtacctacctggtcccggataaataaaccattttgtattt

SEQ ID NO: 198 - protein, 318 aa, Mus musculus
MWAGVAGLRGSCAGLQALWGGHRAALLLGRSPALHTSVASCGSKNLLKKFASKTRKKFWYEGPSLGSHLTPRPSKHEFLTKTTSMSQEVYDLNVELSKVSVTSDFSACRVYWKTGVSAEQNKHTESVLQRSAAYMRHLLISQQTLRNVPPIVFVQDKRDLVLAEVDRLLAEADFGPPDERDDLDGLRNADAQVPHDSPEPAAHPNLCGIDHEALNKQIMEYKRKKERGLQCQSLAPPSGREQAPEPTRLLRKREKVRSRWQHRDDRSFLLGEEDEDEDSSTEWECHAHEAEDDDDHQEEELGADRGAQRGLCGKREQG

SEQ ID NO: 199 - DNA, 875 bp, Mus musculus
tccatagtgagcaagtcttcttatctcctggtaaatttgtgagtttcgtgtagtttatgtttggttcctctccactaagtgtcacgtgctctctcctcaggcatcttctgatatctcagcaaaccctgagaaatgttccacccatagtgtttgttcaagacaaaagagacttggtcctggctgaggtagatcggttgctggcagaggctgactttggacccccagatgaaagggacgacttggacggtttgaggaacgccgatgcccaggtaccacatgactccccagaaccagccgcacacccaaatctgtgtgggattgaccacgaggcgctgaataagcaaataatggagtacaaacgcaagaaggagcgagggcttcagtgtcagagtctggcgccaccatcagggcgggagcaggcacctgaaccgacccgtctgctccggaagagagagaaggtgcgatcccggtggcagcaccgggacgcttcccccagaagcttccttttgggcgaggaggacgaggacgaggacagcagcacagagtgggaatgccatgcccacgaggcagaggatgatgatgatcatcaggaagaggagctcggagctgacagaggcgcgcagcggggcctttgtggcaagagagagcaggggtagggctggggcctccgagctgccgcccctgcctgtgggtcagactgcaggacagagcctctggtgtaccttctgtagtagtcactcacggaggcggcctgacctcagcggcaggagaactgcacccatcggactgcacctgcagacctccgcagccagtcctcagcgattggtacctacctggtcccggataaataaaccattttgtatttactctgagaa

SEQ ID NO: 200 - protein, 197 aa, Mus musculus
MFGSSPLSVTCSLLRHLLISQQTLRNVPPIVFVQDKRDLVLAEVDRLLAEADFGPPDERDDLDGLRNADAQVPHDSPEPAAHPNLCGIDHEALNKQIMEYKRKKERGLQCQSLAPPSGREQAPEPTRLLRKREKVRSRWQHRDDRSFLLGEEDEDEDSSTEWECHAHEAEDDDDHQEEELGADRGAQRGLCGKREQG

SEQ ID NO: 201 - DNA, 1383 bp, Mus musculus
cacacacgccccggggcttcctgttgtcaggtcaggtctttggtagtctagggcttacacgcgggtccgtcctgcgcccactcgtgtttgcgggccccgcgccccgaagcatgtgggccggcgtcgcggggctgagaggctcctgcgccgggctgcaggctctgtggggcggccacagggctgcgcttcttctcggccgctcgccggccctgcacacctcggtcgcctcctgcggcagcaagaacttgctcaagaaatttgcttcgaaaaccaggaagaagttttggtatgaaggtccctccctggggtctcacttgacccccaggccatccaagcatgagttcctcacgaagaccacctcaaagaagactaggaaggaagacagcatccgcctgagggtcctgaacggccttctctacaaatcattgacggaactgctgtgcactcctcaagtgagccaggaggtctacgacctgaatgtggagctgtccaaggtctctgtgacttcagacttctcagcctgccgagtgtactggaagacgggggtctctgcggagcagaacaagcacacggagtcggtgctgcagaggagcgctgcctacatgaggcatcttctgatatctcagcaaaccctgagaaatgttccacccatagtgtttgttcaagacaaaagagacttggtcctggctgaggtagatcggttgctggcagaggctgactttggacccccagatgaaagggacgacttggacggtttgaggaacgccgatgcccaggtaccacatgactccccagaaccagccgcacacccaaatctgtgtgggattgaccacgaggcgctgaataagcaaataatggagtacaaacgcaagaaggagcgagggcttcagtgtcagagtctggcgccaccatcagggcgggagcaggcacctgaaccgacccgtctgctccggaagagagagaaggtgcgatcccggtggcagcaccgggacgcttcccccagaagcttccttttgggcgaggaggacgaggacgaggacagcagcacagagtgggaatgccatgcccacgaggcagaggatgatgatgatcatcaggaagaggagctcggagctgacagaggcgcgcagcggggcctttgtggcaagagagagcaggggtagggctggggcctccgagctgccgcccctgcctgtgggtcagactgcaggacagagcctctggtgtaccttctgtagtagtcactcacggaggcggcctgacctcagcggcaggagaactgcacccatcggactgcacctgcagacctccgcagccagtcctcagcgattggtacctacctggtcccggataaataaaccattttgtatttactctgagaat

SEQ ID NO: 202 - protein, 348 aa, Mus musculus
MWAGVAGLRGSCAGLQALWGGHRAALLLGRSPALHTSVASCGSKNLLKKFASKTRKKFWYEGPSLGSHLTPRPSKHEFLTKTTSKKTRKEDSIRLRVLNGLLYKSLTELLCTPQVSQEVYDLNVELSKVSVTSDFSACRVYWKTGVSAEQNKHTESVLQRSAAYMRHLLISQQTLRNVPPIVFVQDKRDLVLAEVDRLLAEADFGPPDERDDLDGLRNADAQVPHDSPEPAAHPNLCGIDHEALNKQIMEYKRKKERGLQCQSLAPPSGREQAPEPTRLLRKREKVRSRWQHRDDRSFLLGEEDEDEDSSTEWECHAHEAEDDDDHQEEELGADRGAQRGLCGKREQG

SEQ ID NO: 203 - DNA, 76503 bp, Homo sapiens
  misc_feature (1)...(76503): n = A,T,C or G
gtgagctttcgctttgcaatcaaagctcctggctttccacttcacggactcggccctgaattctttctcactgtggtgccaaaaacctggacaccagctgtggctggcatcccacaggcatcggtagaccctcttgaaccctccagcaacaggtgagggacaggaagatggcagggagggaggccaggatgtcctcaggtgagtccaagtaggaaggcccactgctgggaagggggcctgttgtccagttggtcacccttgagctgtcctgggagatgggtgtgtctgtccagcttcagcctggccaagcttacgcactgactgcggctttctctgctgtcttggctcctgggtggtcatcatcatatgtcatcctctgtggatgacatttcctcaagtccagcgctgggtggctaggataggcctaggatgtccatccagctggctacatcctcaagagctcatgggcccagcaatggcctgaggagtacttcaaggtgtgtccagcacaggtcctgtgcagtgtgacaccccaccaggtgacttcagggtgtgtgcctgctgcctggacccagagggcaagcatgtgaaatcacagctctctctttgggaacaaaaggagaagcagtttttgcatgacttagttcccaagcttagttttcctttggaattgtgagtttggggtcttgaaattctattttccttccacagcttctttctcttcccttttccttgtctcttcagttataatttttttgttgttgttaatattaactgtcaggaatttctgtttccagaacctggctgattacatggtcagtgatttctagggcagcaggagaaatattttaaaagctacttttaagaagcattattttattggagatggtgtatttgttcattctcatgctgctatgaaaaaacacctgagaataggtaattcataaaggaaaggggtttaagtgactcacggttccacattgctggggaggcctcaggaaatttacaatcaatgcagaaggcaggtaccctctccacagggctgcaggatgcaatgaatgcaagcagggcaaatgccagacgcttaacaaaaccatcagatcccgtgagactcactcactatcacaacagcacggggaaaaccacccccacgatccggtcacctccgcttggtcctgctcttgacacatggggattacaattcaagatgagattttgggtggggacacagccagaccatgtcagataggtcactggtctcaaagtcctggcttcaagaaatcattccttcttatcctcccatatttctgggatcacaggcatgagccaccataagctacttaaaaaaaaaaaaaagcctggcagtgtaggcaggaaagttaagggattccttggggcagggttggcaggtaagtagagggattccctgaggtttatgtttcctccagggctgttgcttgccaggcgtttgatgtgcctgccctgagggcagcctgaggcctgacaccaccacccaaagcctggactctgggaccgtggctctcagtgcatgaactcagggaaactctcccttcagagaaaggtgggtagaggtgggtgcctctcccaccttacctgtgggtaggaagggggctgcatctctcaagccagaaacctgaagcaggcaccgagtgctccctgtctgagcctgggtggaagggcagagatatgttcctgagaattcccagcaatctgggggggattcgcacttccttgcagcaggagctctgggttactttgctggttgaagaggaaagtaagtgccaggccctcggcttcgtgaaaggggtgggtgggcaggtcaaggtgggctgtggaactcctctgtgtacacattgaatttagaactttagctttgacccatgcagaagtgaatgtgcacgctctgagaactcatgagaaaatcaccagagaaaacaagccttgagcagagtcccaagaaaccacaaacaaaacatcgagtgcgcagtggctgccggtcctgagatgatcagacccagaataggaatgcatctgtgtttaaaggagtgcaaagcagtgaggaggagaaagcatcagaactattgaagagtccagaacagaagccagggaaattcccagaaatgaaaatcaggacaactaacattagaaacaggatgaattggctaaaaaggttagacatagctaaagagctgcagtgataaaagggctggactgaatgagcccgcttatgtgaagttcaaacacaggcaaagccaaacgtgacctagagacacagacgtgcagtagaaccatgaggaagggcaagggatggttaacacgagagtctcgtgagattgtgatgatctcctgggggaacagcatgcagagggaaggccctggtgacacctgaggccaatggggcattctggactcgaaggttgttgagcagcggccctggcctccacccaccagatgccagtggtggcccctccctgtgatgacaacccaggctgtctgcagacttggcaagctcccctggggggagaaaaattgcccccaggtgacagccattgaattagaggttaagagtgtttcaattgcttatgctgtctttcttagggtgggcagtgcctatgtaggtattcattctgtattatttaaaatgtctacatgtgcaccctttattttaggatatgtttttcaggaataaaataataatatacattctctggcctagtaacagagaatcctactggataaatgaatatggaaaatagttttcctgggagcttatagcagggcttctcagtgttatttgctatttaactccatattgaaaaatgttggcagggcacagtggctcacatctgtaatcccaacactttgggaggctgaggcgggcagatcacttgaggtcagaagttcaagaccagcctggccaacatggcaaaaccctgtctctactaaaagtacaagaattagccagcatgatggtgcatgcctgtaatcccagctacttgggaggctgaggcaggagaattgcttgaaccgggaggcagaggttgcagttagctgagatcgcaccactgcactccagcctgggtgacagagcaagactctgtttcaaaaaagaaaaaagaaaaagaataagaaaaaatatctaggaagaagaactttccaaaaacagctttatctagtgtggggacacaattttgtagtcccaagtactcaggaggctgaggcaggaggaccacttgaccttgggggtttgaggccagcctgggcaagatagaccttatctctaaaaaataaacaaggccaggtgtggtggctcacgcctgtaatcccagcactttgggaggctaaggcgggcggatcacgaggtcaggagttcgagaccagcctggccaatatggtgaaaccttgtctctactaaaaatacgaaaattagccgggtgtggtggcatgcgcctgtagtcccagctacttgggaggctgaggcaggagaatcgcttgaacccaggaggcagaggttgcagtgagccaagatcatgccattgcactccagcctgggtgacagagtgagactctgtctcaaaaaaaaaaggaaagtttattaggaagaatgctgtaacagagtgcagtggggcgcctcagagagaggattgagcgcccagtggtggattttccataggagcatttatggaccttaaggctggagcttagggttgtaaactgagtttcagcatggcattccagagatgtttagaaattttatttacttataaaagttgaaagaggcctggaattgaagcggtgtcatttgtctggggtaatacctgaggtttgttgcctcatgtcaaggaaattgaggacgtagacccacaatgagtgagttttagagtgggagtttaataggcaaaagagaaaagttcccttgtgcagagtgaggggggttctgagaggatttccccctttgcaaccagatggttttatcgatgagcttgagaaggtggtgtctgatttacatagggcacagaggattggttggaccaggtgtgccatttacatagcactggaagaagcggccaactcatccttttattatgcaaatctttttatgcaaatggagtctctacgcgccaggcgccacgttgcctgcttttttactgcacatgtgatgacaaagaaaatggaaggggaacctccatgttgaacatacttggcttccaggtatcccttttctattggcacagctgccggcattcacctatgcaggcttccagctggcttatctgtgtctgcagctcaattttacaagctgctctttgttagaaaagaaataatttgggggctgctttttgttaaaaggaaagccttactgaggactctcttacccttgcagcaggacgagccacagacaaaacctctcagacaccgagttgtagaaggaagggctttattcagctgggagcatcggcaagctactgtctcaaaatgcgaggtccctgaatgcacaatttctgtcctttttaagggctcacaacactaaagatttcatatgaaaggattgtgattgactgagcaatctaggggatacgtaacaggggtgtcgtgcagagagagtcggagagaaacagaacagagcagggagtttcacaatgttcttccatacaatgcctgaaatctatgggtaacatcgggttctaagtcaagagttgatttttaactactaggtttaggccaggcaggcccaggcctggttttgggcctggcgctgggctgcctgtctttgatttcacttccttggtttttttttttaatcaggtactgagtataaaacaatatgaaacaatatgagagggtctctctcttccctcaccctcactaatggcctaaataaacaatatgagagggcctctctcttccctcaccctcactaactgcctaaatgatttctttctagttcctgtatcatgatcagatgccgtcttcagatactagggaagtttgattacttctaaattccccagataaggagttttgcctccagatggcctgtttgatggtcaccaggtggtcttggctcccttctgaattgcccaggtaagaagatttgtctctggggcctgtccaatggtcaccaggtgatttttgccctcctcacagcctaggcaacatagtaagacccccatctctacaaaaaatgcaaaatcagccaggcgtggcagcgcacgcctgtggtcccagctactcagaggggctgagacaggaggatcgcttgaacccaggaggtctgggttgtaatgagccgtgactgcacctctgcactccagcctgggagatggagtcttaaaaaaaaatgtttttccgggtgttatgagtgtgctctccagcttcagtgtgactttgtttgttggagacttgggtaagtatccaaattgtttttcagatgtaaatgttagtagctctcattcatgggaagttatggtctgctctttaagttctatggggctatcttcacatctgtggcacaaggctggtcagttttacatctgagaaaagtgagtctggggaagtgcccctgccatccatcccacagcaggcaagcagcctcctccgcattctcctcttcctcttctcatgcctggtcctctccttttgtcatcttttcttccctcaccccatctttattgtatctctttttgtctgtctctaaacaatattttaattggttgcattgtttttatgttccctgtttttaatattcatgacattcccttcctctcccccttcctgtcttctccacattaagttcaccctctttgtacttttacctgagtgcttccccccgttctcctccaccccaccccacttcaggcaattctgagtggtacagaggtgtcacatccatctcctgggactgtatgagtctgtctcactttcctttgaaagaagcagttggaaattcattctacttcatttttctttctttctttctttcttttgagatggagtctcgctctgtcccccaggctggagtgcagtggcacgatcgtggctcactgcaacctccgcctcctgagttcaagcgattcttctgcctcagactcccaagtagctgggattacaggcgtgagccaccacgcccgactaatttttgtattttcagtagagacaaggtgtcaccatattggccaggctggtctccagctcctagacctcgtgatccgccctcctcggcctcccaaagtgctgggattacaggcgtgagccactgcgcccggcctactttatttttctttctaggtctcaattttccaggggctttaaaggaagacaatcctgtatttagagccttaagtctgttgaaggcaatttcaacgaaagtaatactttttttttgtaaattaagccatcatcttacaagaagaaaatgcctttcactgtttagcagctcgaatggaatggcaggaggaaagtgcggacagcagtcaggaaacatcagtgcctcagttattgctctgttgggcaaaagcaaagctgtaaacattttgacttttccatatttcacggggcgcttatcctccgacttcacacgattcaggtggttaatgacacacctgcttagctgtgcactcctgttgttgggaggcccctgcctgtggatcctctcaagtttgtcaggacgggacaccaacagggctgttaccagtggcaagtttatacgggtctgcagcaactttattcttgcctccttggaggaaagaatttggctgagaggaagaaatagttttaaggcagagatagagaccaaggccagatttagagcaagagtgagagtttattacaaagttttagagcaagaatgaaaggaagtgaagtgcacttgcaagagggccaggtcggcaacttgagagatgagtgtcccacctgaccctcgatttgggatttttggggttttgtgtttcttctcccttgattcttcccttggagctggctgtccacttgcatggtgtcccgccagagcttgggaggggctgcgtgcgcagtgtttactgaaattgtacgcaggctcacttgaggcatttttcccttatcagttgagtgttcctagaggaaggtcatataccagttaaacttcaccattttgcctcttggtgccatgtgtgagcccactcacccaactcctgaggtcttatcagcaagctgctcatcaccagcttcaggtattttctgtctgtttgggagatggcctttccctggctcctgctgtaaccagttattacgcaatgcaccaagatgtaacagtttttgttctttgagataataactggactcttgttttaccttcaagaagattaaggagtacagacacaaaggtgaagttggggcgaaggtttaataagcgaaagaagaaagctctctgccagcagagagggggtcctgaatggggtggccactatgagtcccgttctgggttctctatgaactggaaagaggaagaaaggtgcttagtctgcaggctgtcttcgagaacacgtgactcagcttgtcccgggaccttggcccaggacctactggaaagcttggcccagcaccagttagaagatgaagcgatgattcacagaggctgcttagcctggcccaggacctattaggagctgaagtgacagcttggcctgggaccaaccagaggctgaagtgatgattcacagagggcagacgtacagtccaaacaaaggaaaggagagtgtccacgggaacccactgaagcccactgtgcccatgcccaaaaatgagaagaaacatcttcctgggagcccactgtctatacaaaggacgaaggcatttttatgcccagccttgttcccttatttgagtgagttggaggtttgtgcaagattttatccaagtggaggtttttccatctgtgtagccacgggcatgtctccaggcacaacgccacgtgctagttcccttactggttcctgcagcctgatttccccccaccccaggctgctttctattttatgtggggataaggctctgaccttgggccgggggctctccagggactcttcccttgctgtctacctaaggcaagctaactcctttcagtccccccgtggagtagagacccaactgctgttggggaggttgggcattgctttttttttttctttggctacttcctgctggaaaggggcattgtgtgggggaagagcagctagggttcctcctggggttggtttaagggtccgcggaagaaaggcacatccatgtgtggttttatttgcattaccatttggtgcttgttagcccctcgggaaaggaaacaatttgggttatatcattgagtatgcaaaggccaaacactaatataaaacatataaggaaaagaggttttcgtaggggagctaaccaggcccaaaaccaagactcgaatttattaaaaagggattgtagccaactgggacgggagtttgcattttcccttaatttgttagtgatttcaatttggtttttaaggacttgtaaatttttctctacctgactggaagtgttgatccagaaacagcatgttttatttaagagtgcacaggcgcccactacttcagctataaggacattgagagtttattttgcattaccactgaggctacagaattttggattgttgtgcctttatggctgctacagttgccttccacccttgctgcaatattgtgggaaagagtttctggggcgccagatgagttggtctcccctgtgtgagacacccatggggagccatgagcagcctctgaggagaaaagtctccttattgccttcatgtctttatgccccgagagcacaaccgctcggcggcattccacaggtggctcagggagataacacttccttgaagcaatggagtataatcaaacatcttggctcctcctgaaacccactcccaccttttccgtccctataagttaaagatcttttttttttaagaactatatatatatattttatgtgaagtttactctctataaagtttggatgaagacattttttaaagatcttaagtagtttagacacacgcctttgctcgaggaaattcacagaaaccgagactgctaaacatcttattgagtgactaacgagttctccttcactgattaatccttttcctcatcccttcctccccctcccatctgccctaagaacaaagagcttgtaaaccaataaattaggtggagctaaagagctctggacgcgccttttaaactcttactctgtctctttctaactcctttgtttctgctggactcggggtacccaccgggtagtgtggggctggtttccccaataattttgatagaaatattaagcactgattttcttaagaaggggacaccgccaaaccaagataggcctttggctactgcatgtcctattcctggtttttctaatataggattcttgtgtgcatgtccttttaagttttttctgttaaatctccatatgatgacatagagataagtgaccttccgttttggtatgtgtgagagaatgcactttccagaaaagaggctaaattagggatgttacctgacaatgctaccgtgttagaagggtttaaaaataacacactggggaccactgccactatagtgcctgctcctctccagtgcctggggagaattaagtgtacccaggagccatagagaaagtaaagccctgttccctgaagggatggttttatgttgtggttcatgagagtttcagctagatttagtccaggccttataaggttgccttccctatatctaatggcaatatctttaggataaggatatccatacttagtctagttatccacagtaccatttggaactatacatgctgcgtaggaagaatctttttggcaaatagagttttgaaaaattagagacacagaatgtcctggccaatatcttagacaaccctctttacagggtctgttggtttagacatcccattagtccacaaatttgcagattacttccattaaattttttttttttttttgggaccggggtccagtgcggagtgcccttcctcctgggaaacggggtgaggccggaaaggcggccggccgccccctcgcccgtcacgcaacgcacgttcctggggaacctggtgctaaagcattcgtcgacgacctgcttctgggtcggggtttcgtacatagcagagcagctccctcgctgcgatctgttgaaagtcagccctcgacacaagggtttgaagaaagaaaaaataagagagagagaacaaaaaaaattaaaaaaggaaaaaaaaaaattttttttttttttttgagacggagtctggctctgtcccccaggctggagcacagtggcgcgcgatcttggctcactgcaagctccgcctcctgggttcacaccattctcctgcctcagcctcctgagtagctgggactataggtgcccgccaccatgcccagctaattttttgtatttttagtagagacggggtttcaccatgttaaccaggatgctctcgatctcctacctcatgatccccccgcctcggcctcccaaagtgctgggattacaggcgtgagccaccacacctggccccattaaatattttattattattattatttttgagatggagtctcactctgttgcccaggctggagtgcagtggcatgatctcaactcactgcaacctctacctcccaggttcaaacgattctcctgcctcagcctcccaagtagctgggattactggcatgcgccaccacgcccggctaattttttatttctttttgtatttatagtagaaagggggtttcaccatgttggtcaggctggtctcgaactcctgacctcgtgatccacccacctcagtctcccaaagtgctgggattacaggcgtgagccattgcacccagcctacttctgttaaatattacacaagggtccgagatttcatgtgtgggcatctttgggaaggactgtattagttcattttcatgctgctgataaagacgtacctgaaactaggaacaacaacaacaaaaaggcttaattagacttatatttccacatagctgggcagatctcagaaacagggagggaggtgaaggcacttcttacatggtggcagcaagacaaaatgaggaagaaacaaaagcagaaggccctgataaacccatcagctctcaagagacttattcactatcctgagactagcagaggaaagaccagcccccatgattcaattacctccccctgggtccctcccacaacatgtaggaattctgggagatacaattcatgttgagatttcggtggggacacagtcaagccatatcattcttccccggcccctccaaatctcatatcctcacatttcaaaaccaatcatgccttcccaacagtcccccaaagtcttaactcatttcagaattaccccaaaagtccatagtccaaagtctcatcagaaacacagcaagtcccttctacctatgagcctgtaaaatcaaaacaagctagttacttcctatatacaataaaggtacaggtattgggtaaatacagccattccaaatgggagaaactggccaaaacaaaggggttacaggacccatgcaagtctgaaatccagcagggcagtcaaatattaaggctccaaaatgatctcctttgacttcgggtctcgcatccaggtcacactgatgcaagaggtgggttcccatggtcttgggcagctccacccctgtggctttgcagggtacagcctccctccaggctgctttcatgggctggcgttgagtgtctgctacacgccatgtttagttttccaggtagacggtgcaaactgtcagtggatctaccattctggggtctggaggattctggccctcttctcacagttccactaggcagtttcccagtagggactctgtgtgggggctccaaccccaaatttcccttctgcaccaccctagcagaggttctccatgagcgcccagcccctgcagcaaacttttgtctgggcatccaggcatttccatacatcttctgaaatctaggaagaggttcccaaacttcagttcttgacttctgtgcggtcacaggctcaacaccacatggaaactgccaaggtttgtggcttccagcctctgaagtcacagcccaagctgtatgttggcccctttctgccacagctggagtggctgggacacagggcaccaagtccctaggccgcacacagcaaggggaccctgggcccagcccacaaaaacattttttcctccttggcttctgggtctgtgatggcaggggccaccatgaagacctatgacgtgccctggagacattttccccattgtcttggggactaacatttggctccttgttacttatgcagatttctgcagccagcttgaatttctcctcaaaaaaaaaaatggacttttcttttctacttcattgatcaggctgcaaattttctgaacttttatgttctgtttcccttttaaaacaaaatgcttttttaaaaaattattattattattattattatactttaagttttagggtacatgtgcacaatgtgcaagtcagttacatatgtatacatgtgccatgctggtgtgctgcacccattaactcgtcatttagcattaggtatatctcctaatgctatccctcccccctacccccaccccacaacagtccccagagtgtgatgttccccttcctgtgtccatgtgttctcatggtttaattcccatctataagtgagaacatgcggtgtttggttttttgtccttgtgatagtttactgagaatgatgatttccaatttcatccatgtccctacaaaggacatgaactcatcattttttatggctgcatagtattccatggtgtatatgtgccacattttcttaatccagtctgtcattgttggatatttgggttggttccaagtctttgctattgtgaatagtgctgcaataaacatatgtgtgcatgtgtctttatagcagcatgatttatagtcctttgggtatatacccagtaatgggatggctgggtcaaatggtatttctagttctagatccctgaggaatcgccacactgacttccacaatggttgaactagtttacagtcccaccaacagtgtaaaagtgttcctatttctccacatcctctccagcacctgttgtttcctgactttttaatgattgccattctaactggtgtgagatggtatctcattgtggttttgatttgcatttctctgatggccagtgatgatgagcattttttcatgtgtcttttggctgcataaatgtcttcttttgagaagtgtctgttcatatcctttgcccacttgttgatggggttgtttgtttttttcttgtaaatttgtttgagttcattgtagattctggatattagccctttgtcagataagtgggttgcgaaaattttctcccattttgtaggctgcctgttcactctgatggtagtttcttttgctgcgcagaagctctttagtttaattagatcccatttgtcaattttggcttttgttgccattgcttttggtgttttagacatgaagtccttgcccatgcctatgtcctgaatggtaatgcctaggttttcttctagggtttttatggttttaggtctaacttttaagtctttaatccatcttgaattaatttttgtataaggtgtaaggaagggatccagtttcagctttctacatatggctagccagttttcccagcaccatttattaaatagggaatcctttccacattgcttgtttttctcaggttcgtcaaagatcagatagttgtagatatgcagcgttatttctgagggctctgttctgttccattgatctatatctctgttttggtaccagtaccatgctgttttggttactgtagccttgtagtatagtttgaagtcaggtagcgtgatgcctccagctttgttcttttggcttaggattgacttggcgatgcgggctcttttttggttccatatgaactttaaagtagttttttccaattctgtgaagaaagtcattggtagcttgatggggatggcattgaatctataattaccttgggcagtacggccattttcacgatattgattcttcctacccatgagcatggaatgttcttccatttgtttgtatcctcttttatttcattgagcagtggtttgtagttctccttgaagaggtccttcacatcccttgtaagttggattcctaggtattttattctctttgaagcaattgtgaatgggagttcactcatgatttggctctctgtttgtctgttattggtgtataagaatgcttgtgatttttgtacattgattttgtatcctgagacttcgccaaagttgcttatcagcttaaggagattttgggctgagacgatggggttttctagatatacaatcatgtcatctgcaaacagggacaatttgactacctcttttcctaattgaataccctttatttccttctcctgcctaattgccctggccagaacttccaacactatgttgaataggagtggtgagagagggcatccctgtcttgtgccaattttcaaagggaatgcttccagtttttgcccattcagtatgatattggctgtgggtttgtcatagatagctcttattattttgagatacgtcccatcaatacctaatttattgagagtttttagcatgaagtgttgttgaattttgtcaaaggccttttctgcatgtattgagataatcatgtggtttttgtctttggttctgtttatatgctggattacatttattgatttgtgtatattgaaccagccttgcatcccagggatgaagcccacttgatcatggtggataagctttttgatgtgctgctggattcggtttgccagtattttattgaggatttttacatcaatgttcatcacggatattggtctaaaattctcttttttggttgtgtctctgcccagctttggtatcaggatgatgctggcctcataaaatgagttagggaggattccctctttttctattgattggaatagtttcagaaggaatggtaccagttcctccttgtacctctggtagaattcggctgtgaatccatctggtcctggactctttttggttggtaagctattgattattgccacaatttcagatcctgttattggtctattcagagattcaacttcttcctggtttagtcttgggagagtgtatgtgtcaaggaatttatccattataacaaactgtctctcagaccacagtgcaatcaaactagaactcaggattaagaaactcactcaaaactgctcaactatgtggaaactgaacagcctgctcctgaatgactactgggtacataacgaaatgaaggcagaaatacacatgttctttgaaaccaacgagaacaaagacacaacataccagaatctctgggacacattcaaagcagtgtgtagagggaaatttatagcactaaatgcccacaagagaaagcacgaaagatccaaaattgacacgctaacatcgcaattaaaagaactagaaaagcaagagcaaacacattcaaaagctagcagaaggcaagaaataactaaaatcagagcagaactgaaggaaatagagaccaaaaaaacccttcaaaaaattaatgaatccaggagctggttttttgaaaggatcaacaaaattgatagactgctagcaagactaataaagaaaaaaagagagaagaatcaaaaagacgcaataaaaatgataaaggggatatcatcaccgatcccacagaaatacaaactaccatcagagaatactacaaacacctctacgcaaataaactagaaaatctagaagaaatggataaattccttgaaacaaaatgcttttaacagcacccgtcactttttgaatgctttgcttagaaatttcttccgccagataccctaaatcatctctctcgagttaaaagttccacagttctctagggcaggggcaaaatgccaccagtatctttgctaaaacaaaacaagagtcacctttgctccagttcccaacaaattcctcatcttcatctgaaattacctcagctagaattttattgtccatatcgctatcaaaatgttggacaaagccattcaacaagcctctaggaagttccaaactttcctacactttcctgtcttctcttgagcccttcaaacttttccaatctctgcctgttacctagttccaaagtcacttctgcattttcggatatcttctcagcaacacccgactctactggtaccaatgtactgcattagtttgttttcatgctgctgataaagacatacctgaaactaggaacaagaaaaggtttaattggacttatttccaaatggctggggaggtctcaaaatcatggtgggaggtgaaaggcacttcttacatggtggcagcaagagaaaatgaggaagaagcaaaagcaaaaacccctgataaacccatcaggtctcaagagaatttatcatgagaacagcacaggaaagactggttcccatgattcaagtacctccccctgggtccctcccacaacacatgggaattctgggagataaaattcaagttgagattttggtggggacacagccaaaccatatcaaggaccatgtgttatttattacctgataataaggttggcaaggggtggcatttctgcccagggatagctattcccattgggaattccacctaggaggtctggctagattaaaatttttctatagtctctcccagtttggtgtcacccttgttccttcttagtctccagatctctgtactcttagcaattatgagcatacttttggaatatttaaaggtttcccaagtatggttcttttcctctgcttttaaagcagaagaaggcatttgctatcttattaactttacctagtctaaaggagtaagtcttaccctcagggtgtgtgtttttttgcgtagcgttaaaaatgctcccataccatgctttatttatatccatttttaatggttaaaggtaaagccagcagagggaaccccaagatagtgatatggtttggctgtgtccccacccaaatctcatcttgaattgtaactcccacaattcccttgtgttgtgggaggaacccggtgaaaggtgattgaattgtgggggcgggtctttcctgcactgttctcatgatagtgaatgagtctcaggaaatctgatggctttaaaaacgggagtttgccagcacaggctctctctttgcccaccaccatccacgtaagatgtgacttcctcctcctatttccttgaggtttttttggctgcatagatttgcaccaccatttgtttacactcctgttcaggttctccagtttcctctgggaggaaagtggctgggttcaggccaggacaggtctttaactgaactgcaggtttttccagcagcaaagcttgatatttgaggaggtgattacctgttagccacagacttcctttagaggatagcagtgctgctacattatggggtgtgtaaacagttaacttattcctcatggctaactcaaccatgcaactgcaactgctcagaggcaagctggccattttttagccaccaagttaagctttttgcttaggtaaccaaatggctgctggggtggaccttgagcctaagttaaaactcccaaggctattccctttctttttgagacataaagattaaacgccttccctatgggaagactgagcgtaggtgctttaagtcaggctttagctgattaaaggccttctgagcctcaggtttttaagttagggagtgagtttatagctgattgagtttattttataaggcagtataaagggcaagccattttactgtacccaggtatttacaatttacaaaaacctgtaatgcccaaaaatcctcttagctgtttgagtgttccagggaggagaaatggggaaatagtcttaattatcttctcacctaatgttttggttctttctgacaagactagaccaaggtacctcactgaagtttgacagagctgagcattagatttggaaactttatatcctctacctgctagaaaataaagagcgttagtgccttcttgagaaaccccctcagttggggcacagaggataatattatatacatattgtaaaactttaacctgaggatgagaaaactcagagagattttttgataatgcttgcccaaacaggtgggcactgttttggactccctgaggcagcactgtacaggttaactagttagcctggttggagggatcttttttttttttgagatggagtcttgctctgttgcccaggctggactacagtgccatgatctcagctcactgcaagctccacctcccaggttcatgccattctcctgcctcagcctcccgagtagctgggactatgggcacccgccaccatgcctggctaattttttgtattttttagtggagacggggtttcactgtgttagccaggatggtcttgatctcctgacctcgtgatctgcccccctcggcctcccaaagtgctgggattacaggcatgagccactgcccctggctggttggagggactttcttaaagcaaacaagtattgggagttagggtgcaatggtatgcagaaaaaggcacttgttaggtttaaaactgaatcatttagttccctcaggtatttgagttagcaaagtatacggattaggaaccactggatggattggaactatagctttattaacaagatggaggttctgaactagcctgcatttcccactgggtttctgtacccctaatattggggtgttgcaatgcttgagaaggttttgtgcttttaatttattcataatggcttttaggtttttgttctgtttttcagcttttggctttagcgggtactgcttttggttacggaagaaggtggaatttttaaggtgaatttggaccagtataacagttgtagcctggccaattttcccgtgacttgtccacacctctgggttaacattggtttttaataaggggaggacaaagagtttgttctggagccataaggatggtggctcccatatgggctagaataccttttttttttgcaatagggtttggcttagaagtagcatagcatcttttaagttagattaaacacttggattaaattttggaaagcctctatatatttattagggttattagagaacctgcccaggtccccctttatttgtttaaggtcctgcaatgagcaggaaacttgagccctagtagcaccattgggcatttcctgcaggggcaacagtgaagttgggaatttcttgaggggcactaccagaggagctaatgatctggctattgtggggcaggtaggacacccggaagtttttttcgagggttccccaagggtttttttcttgactctggggaaccatcctttgcaggcttgcctgacgtggctgccaaaagggtggggttaactgtacaatgcttacaaagatttaggttatcttgcaaggcaaagaaaacctgtacactgggaaccttggactatttgcccttttgcctacagaaaagttttagttgttgaatagtatagaaatcaagactttcctcaggccaggtttgtttgttcccaagatggtaataaggccacgcccttgtgtaatagaatatacgccactttctctttagagtcgtagggttaaaggagttccagtgatttagaatgcactcaagggaagtacagaatgcagatggtttgttacccatctagagagtgggagacaaggtgttccttagtccccttccttgctttggcgtgaccaagggtggaaggaaagagagaaaaggtgttgcccttttgcccttctcctctttccttctcttctctgggtcctggcaaccattataggtgccaccccatggatacaagtgtgacctttactcatggatccagaggaggtagtatgcaggactagtcacacttacctgtgcaagaccctagctttccaccctgttggattcttagacccactcagcctaaaggctcccaaggtacccaataggcctgggagagattatgtagtagttggacttgggcaagactctttaatggagggtgttttaataccatatttggcttcccctgctatggccccagtgaaaaattggaatcccacagaatgggactgattaactttcaaacacaaaattcttttttttctttaaatcccattgtcattgaatgcagaacaggtgccttaaaagaacataagaattgaatggctgcccttcctttgatggggacagtattgaagctaagacctgttttattaggatagcttcctcctggctgttgaaagtggagtttttttgtttacaaataggacatgttgcctgatcactgatagagggacataaaaggaaaaagaattaggaaactagaagtttggggaagagggctgacagggcttcccatggagaaaaatcctattccactaggtggcgccgtagggttgcaaacgttacgtaaaaactctgactccaaattctttccaggcaaaagttagagaggtttggggtttgataggatgtccccatagcatgccccccacccccatgcaaccagcataagaaaattaacttgtcttataaaggaactgcttaaatttattgaacaatgctgaacttttatatgaaagaaaaaagaaccaaatggagaggaggatattcactgagggtgaaatatcctcccatatgttaccatgaatatttattattgagggatagaagggaccttactaggtaaaaatttagactaaaatattgaattccctgcttctaggaagttacaaaaacaataactttttgaattacattcctgattactaagacactgactaactttacccagcaagatctcagtattctgtgcttctcaatatcccaccctttcccctttaaatttgaagccctcaaagtcatctctgaagaaaagcataggcctgtctcctgggcacgtccttaactttggcaaataaattttctaaaatgattgagatttgtcttgtcactttcttcgattgacatccggtaaccacgaagggatcctgagtgaaagtagcctggcctggggcagtttgcctttcagtgcttggtactggctcgggcaccttgtagcccaaaccaacaggacaatttgccgaagtctgggacctcttcctccagggatccctgatcttccaatgtttctcagctgggggggtctgaggtttattcactgtttaaaaaaaaaaaaactccctttttgtgggagtttttccactggcttccatcatggaaggtgagtttgtctgtttttgcattggcagagagcagtctccagcttgggccctatcactaggtaagaaactggtttggaattctgtcttgcaaattctttaaatgactaaaattagcactaacaaccagctggtgctaacttcctgcttacacttggagtgcttagaaatcgtatattttgtgtgatcattgttagttttgcttaactgtttttgttgcttgtctctgctttgtgtgtgtgtgtatgtgtatatgtttcagtcctttccccaatcagatgtgaccaactctgaaccctctagctcatgactgtggaatcttccatgctggagaaatagagcaccttgcttccctcagccttccggggcattctcaggcaactgagaatcacctgagggtgtctgggagaaacgctccctaagacgtgcagcagctccaaataggtttcctctttcagaagaacatatttagggtctcatctcagccggcaggtgcatataaggaaccgacccgtcctgcaacttgagcccctgacacacttgtgccaggtagccgtgacacaggtagaccaaaccggttcaggaggtaacggccctgaaaagccaggtctgcaagcagcacattttgggtccgacatatgtcccgacttcatcaaatctgaaaaggagctctaaattatgaggaacaagtcctctaagaccccagcagctgcagaacacaaaattcccctttagaaactctggctggctatatgcaaagtacttatggcaaatcacaaatcatcatgcaaatatttaaacaagtggaccactataactaaagcagattctaagttacaatgacctaaatggggatcttttgagatgcccgaattagtgtacctgagaaccaggataaaaaatgcaggcacaacaaataagcaaccagaatgggagagttattttcagtggtacctggagagtagcaaaaggggtgaagactgcctcatctccctataggaggcaaaccagcaacttagaaatgctaatcaagaactctctaatcttttacgtctcttaaagaaatccttgaaatcccttattcccacttggtaactccacctacactcccactgtaccctgacctctctgaacttccccagaccagatctgtcccacttttctccttcatgtttaacactcgctcaacaaaaggcaggcaggaatcggacttcaaagaccccagctgctgctgattccccgacagccccaatggcagcgtctcatctggaagatgtagaaaaggggaatcctatggagatttctcttatgaccaccccattttgggaacaactggtaacaggtagcggagccccagcgattgtctaccaaccttggtcaaaggctgaattgtgagtcatagttaaagaatttcctggcccccataaagatccaatcaggtttgcccaagaatttgagctcagtatcagaacctatgacccaggtcattcagacctttatcagctggtccacatgttggtctcagaagctaaagctaaagaacagctagaaaaagcacaatggtcagaccctataacagatttgacccctgaaggcccagtagagccacaacaaccagcaccccccaaatccagaagacaggtgtaaagatgcacaggagcaagcaatgactgttaaatactattcctccagtgctccaaagggctgtggattggagaaaaatccagcaatgctgccagaacccaaatgcattagttttagattatttcacacatcttgatataacttttagacaatattgtgagatgacagctgattgctttgaaaataaaaatgatacattattaaaggcaaatttattaaacggactagatgatgatttagccacacttgtaaaatgccacatgataaactgggccatagccagaactaatgaactggttaacttagctgaccgattatcccacgctacgataaaaaaggaaaaacagaagattgctggagttatgcatgtacagctaaagcaattaacttcaaaacctatcagccccagacaggtttttaagttctctaggtctgagaacccttccctcccagtctgttgctgctgtaaaagtccgggaccccttaaaagggattgccttaggctgaaatgaaagaaaaggcaggaaaatgcaactcaggaagactaggggtgctccgagaaagtacaggagtttcacgtctccaaatattctaccctgacaaaaaaaactgagggagattaatataataaccatgagctgacaactgcctttattgacacaggcatgactgtatctctgacaaatcccagcttatttagaaaccccattcctcggagtaataaaaaagttaacatggtgggtatgtctaataaaacaatcttacgttttaagtacaaacctttactttcccgtttcattgggttcagctcccccaccacagactctaagtgtgacgtgctcagcaggtcccacatgtctcttatatgccttgcggcccttgtcaatcttttgggccatgatctcctcaacatccataatgccgacatatctttttcatcaaaaggtgaacttttttaagaattggaaccagaggaccaaaaataccaaattaaaataatgtcctgacaatgtaccacaatttagtaccagtaatgttaaaacataatcttgtgaccaggaaaatgaattggagagagaggaggaaatattaggggagaagagaagacattggaataaagaataggaaatgataaaactcctcttagcttccccaattttcctgtttacaccagaagcagaacgcttgctcaaggatgtccgttccacttacggtctcagtcaaatacagatatagggaaaatattctcagccattcccataaaggtagagataaaccctaagaaacccctactcaaccttaaacagttttgtctccgatattgtagaggaagccatagatggaatcgcccctatcatagaagattacctgaaaaggggactcactattccctgcacaagcccctgcaacagccccatattccctgtaaaacaaaaacaaaaacaaaaaaacaagcaggaggggatggagatttgtacaggacttgagggcaataaataatatcgcaatacccagacacccaatagtcccaacccacatatcctatcagctacacccactatcagccagtatttctcagttgcagatctctgcagtgccttctttagtattcctgtagatccagacagctggtatttgtttacctttacttggaaagaagggcaatatatgtggacggtaatgcctcaagggtatacacaaagtcccacttacttttcccaaatattaaaagctgatttagaggatttaatttttccccagggctcaacactcattcagtatgtaggtgaccttctcctttgttcaggcacactatcttcctcccaggaagatggtctatatttactcaaacagccaccaaaggacacaaagtgtccaaagacaaacttcagccatgcttgctgcaagttaagcatttggaggcatattatctcagtcaaaggactgagtattaaccctgacagagtgagaggaattttagctttcccaatgcctgtgactaataaacaacttagaggattttgggtcctggctggctattgtagaaactggataccaaattcttctttatgactcaaactctgtaggcatacttaaaaaatgaacaaactgatcccatcttgtggactcttgagggacaatcagctatacaacaaataaaggaaattctaactaatgccccagccttagggcacccaaactacaaactgcctttctcccttttcacacacaaaactggaggtactgcatccagggtactgatccagaaacatggtgatcatcagaggcctataggctattttagccaacacctggacccggtggcttgagggctgcctccttgtgtgagagcagtagcaaccatggcccttctgtacaagtctgttgaagaaataagtatgggttccccccttaccatttctgtgccacattctcctgagacccttctaaactctcatcatactcaacgtgtgtctgtcaaccggtcagcctcttatcaaattttgcttgtaccatcttccaatattactacttccagtataataatcttaatctggccactctcttgccaggcccttctgacaagacccctcatgactgtgttctgatgactgactgacttctcacctccaggacagacctacaagagatgccactggatcatgctaaaatagaatggtatacagatgggtcttatttaagaggagaggatggaaattttggagcaggatatgctatagtttccttatcagaggtaattaaagccggtcctcttctggaagccagatcatctcaagtggccgagttgattgccctgacccgtggttgtcaattggcaaaatacaaggctgcaaacatttacactgacagctgctatgcttctagggtttgcatgactttgggatgctatggaaagacggaggatatttagcctcctcagggcaacccataaaaaatgtacaacatgtatcagagctgttagaagctattctaaaacccaaatgtttggcaattataaaaatcccagtcactcaaaattagacaccacagaaagggtaaccaattggctgatgccactgctaaaagagcagcacccgagccaccagccccaatccaggaccaaacggccataaaacccgaaacacttagaaacatgttgaaagaaacccagagcagagctcctgcaaaagagaaatctacctggaaacagtcagggagacacttttctcccgaaactgaaatacagtgtggacctaataaccattattccagtgggatgtcaggtgccccttatggaatatgtccataatctaacccattgtaacccagataaaatgatatcccagcataaacaatattactggaaaccatccttcacagtggcacaaaatatttactcttgatgtgttatttgtccctaatataaaggaaagtcgcccagggtcactttccccttccagctggaccttttgaggtatggcagcttgattttattcagctgctatcatctcaagattacaagtatgttttactaatgctctgcatgttttctcattgggttaaagctttccctgcaggcaagccacagccatggcagttggaaaaatcctactagaaaaaattatcccactgtggtgagtcccaggtgaacgtcacagcgacaggggaactcactttactggccaggttattcaaaatatttgtaaaacttggctcatattttcacatttccattgtgcctaccatccccaatcctcaggcctagtggagaggcacaactggctaaattcacctccaggcatttcacctcccctagcccaaagcactccccctagtgctgcttaaactccaatccaccccttttggaaaacaactgtgtcctcaagaaataataacagaggcccatgtgtatgggaacaaacataatcaacccaacttttctcaagggagatatattgcaacattgtgagggacttatcgccttaaaaaaaagccaagatttgataaagaattcctttcatagtgtgctccatgaagataaggtgcctggtcacaatctgcaacccagagattttgtctattggaaaagacatctaataaagaattcccttcaaccccaatggaagggcccacaccaggtactattgactaatctatgtcccataaaattagaaggtgtagactcatggattcatctctctcatcttaaggcacaacctcctgagtggattgtaactcccaccaaagacctttgcctccagttcactaaacattgaccttcaacccaggattagaagcagacaacagctgttgtggactgcttaaacccaagacacaggaccaggcctgtacacaaagaaatgcctatgtttactgcacaataaccattacaattattgtcctagatatactgtcatctgctgtctaataaagaacagggcacttgccttgtctgatttaacaccctttagtaactaagatgaatttcacaaccttgctattattaatcatgtatcccttcaccttcttgccactgccacccactgatgcccatgaaacaaacctgtttctacaatgggctcaggattatgcagacaaattacataagaacacctgcttgatatgcggacttacgcctctttccagtggctccagcctccagtggtgggtatcctccttccaaggtcaggactggatagaataccaaaaatttattacatcacagaaacagtttggtatccttcatgctggcataacaaaagacaatatatatagttggcccattaaaaacactcttggccaggcgcagtggctcacgcctgtaatcctagcactttaggaggccgaggtgggtggatcatttgagatcaggagtttcagaccaggcctggtcaacatggtgaaaccctgtctctactaaaaatgcaaaaattagccaggtgtggtggtgcatgcctgtaatcccagctacttggcaggctgaggcaggagaattgcttgaacccgggagttggaggttgcagtgagctgagaacacgccactgcactccagcctgggcgatggagtgagattccatgtcaaaataaatgaacaaataaaaacactcttaagaacaaaggacatgggaaaagtttttcagtggaaaggaccagctcattagctctcacttcagcatttcccccaactaaaacaaagtggtgaccatgccccaaacaatggcccgttttcacaatggaataatgcaaacttgggatggatttatctggttcaccccttcgtttggccaactcagtcaaaatgttcctttgtgctgggagcaaagaaatcacacccaggacctgtggccaaacagtaggaagatatatggggtggacacctggagaatgttgtgaccacattatcgtattatgagacactgactggcatgccactgactgggtgcagtgaccaactatttattggctagctccaagtgggacatattggctatgtggcactaacttatggctgtggtcacctccagggtggttgggatgatgctccccaggttatgcttgggcacaaggacgagtaattcagaccctgccaaaaacagcaaacctttttcatttacaatctcgttggacacgttcagtattccaatggtatgatcatttaacttcaatctttgtaccacagatagctattgaagatgctatatgggatatagaagccttaacaaattacacccaaaaggccctgaatgatggctacatgagttacctctttgccaaacgacggggtcatgcttatgaggaaagcagtgctgcaaaatcatatggctttagatacactaacggcagcacaagggggcacttgcaccagaacaactgaatgttgtgtgtatattccagaaaatgaagaacataacccggcttatgactgatatgaaaacccagataatcaacctgtcagacccaaaaccctcactgattggttgagcagctggtttggattctggggaacttggtggcacaagctagtgcttataataagaacaatttctgatctgtcctgtttttgcttataatgttgttgtggtatatgtttgcaaataagtccatgtgtaactgaaagggctagggtaatgactgctcagagaattgctctaattcaggaggcagtaatgtagcctgacctagcttccagttttgccctccttttgttgctataagtctggcctaggtccctatacatttttctttttttcctcttttttcctttcctccctattttttatcttcgtgggacatgatctcctaggaatgagcattcctcgtgacggaggacttgaacttctaggaataaaccatcccagcaacaacaaaccagcaggtgggaagaaaggaggaagcagcaacctgaggccaggaacccacattcctttttaaaatgcttttctccaaaagattttaaagaaaaaaaaggggggaaatgtgaaaggaaattaaattttgggacgccaaattcacttagccaaagggaagagtcaagctgggaactgggtcacgcaaacctgtctcgcccttttggttcctaaataagatggctacaagatgaaaggctacacgcctcccccatattttgcccacaaggagattcctggtgagctgttgaaatttcaccatggtggccaggcgcggtggctcacgcctgtaatcccagcactttggaaggccgagttgggcggatcacttgaggtcaggagtttgagaccagcttggccaacatggggaaacaccgtctctactaaaaatacaaaaagtagctgggtgtggtggcacacagctgtaatcccagctacacgagaggctgaggcgggagaattgtttgaacctggaaggtggaggttgcagtgagccgggatcacgccagtgccctccagcctgggcggcagagagagattccatttcaaaaaaataaaacttaaccatggcaatgcaaattgatagcttatctttacaggtgcagtcaccctagcccatctgattgttcccctaccacattttgtctgcgttatcttatgtaaaatgcagattccccacgtttttcctctgcccgtttgtttgtgaaaactctgcttctcaatactccgccctttcccctttaaatctggggccctcaaaatcatttttggagaaaggcgtagacctgtctcctgggtgcgtccttaactttggcaaataaatctcctaaaatgattagagacttgtctcgtcgttttcttcgattgacaatatatacacacatacatacgcatacacacacacatatatacgcgcacgcacatgcacacatatacatgtccacacacatgcacacacacgtacatatgcacacatacacatgtacacatccacacgcgcccacacacacacacacacagacgtgtctcacaccacagcagccgcctcgggggagtcacagcccacgcatccccaacactgcggtcgcgctcacttctctttccacgcccggggggagcagcttccccgctgggccacgctgactctggggaggcgggcggggcgagaccacttctggggaggacgcccaatctggggactttctctaggtgcccggggagaaggcggcgcagcagcaaagccctggagggcccagtggcggaaacagacggacccctcgcagcctcccgccgacagcggccctgcccaggtctccaggcttcgatgccttcgttgctttgtgcggcgcacccgcctacgtcagttcccagtatttaaacaaaacgtgttcctagctacgcagcgccaggcaaccgggcggttcccacgcttccccgagtggcacaccctccgcgcagcccacggcggcctccccacgcccagctccccgccggccccgcctcgnnnnnnnnnnnnnnnnnnnnnnnnnnnnnnnnnnnnnnnnnnnnnnnnnnnnnnnnnnnnnnnnnnnnnnnnnnnnnnnnnnnnnnnnnnnnncgtatgcccactgtcagacgtcgatgctctcgcccagttgtttaagccccttctcgctcagtcttttccctgcccacccaccgcccacctcgcgccagtcttcgccccgcccattcaccgcccgcctcgcgtcagtcttcgccccgcccaaccaccgcccgcttcgcgtcggtcttcaccccgcccactcgccgttcgcctcgcgccttcgccccctccgccgttgtcgccccgccccttcttgcgtccagtctttgccccgtccctcgccgtcgccccgtccacacgccgtcagcttcgcgtctgtcctcgccccgcccacctaccgcccccctcgggccttcgcccctccgccgtcgttgccccgcccgccttgcaccccgtcttcgtcccgccccgcgccgtggccccgcccacacgccgtcagtttcgcgtctgtcctcgccccgccctgcatcatcgccccgccctgcatcatcgccccgcccacacgccgcctgccaggcgtgagtcttcctcccgctctgcgccgtcgccccgtccacacgccgccaccctcgcgtcagttgtcgctccgcgcctgcgcccgttgtctccctgctcgctccgggtcccggcgccgcgccatgtgggctgcggcgggcgggctgtggcgctcccgcgcgggtctccgggccctgttccgtagccgcgatgctgcgctatttccaggctgcgagcggggacttcactgctctgctgtctcctgcaagaactggctcaagaaatttgcctcgaaaaccaagtaatgcggcgggggcggtgtccctgggcgcggtattccctagggggcggtgtccccgggttgcggtgtccgctcatccgcgttcttgcgcccatgcggcctagctcgccagttcctgcctcctggggtctgcagcagttctagctctcactgtcagcatttgcagcttttgtgttcgtggacgtgtgtcgggttaagaaaacaaagtgacaatgtgtgtttattttgattcttgtcaccagacgtatttttcagaagattagtttcagaaaatgaggaaaaatgaaaaaatataagaatttccttgctaatgttgactttctgtgtgaatttgaagactaaagcttgtcatgataattagtgtttttaaattatgaaagataagtacaataaaatacattgacttttcacactgcttttagttcttctaagtatggtaggtggttgtatgttttctactttaatacactacttttaaagacagttttagaccctgcagaaaaattgcaaaaatagtaccgcgttcctgtgtcctggcacccagctccccctgtgttagcgtcggactttagcttccatcgtgttccagttaatgagccgatattgatgagtgttgctaactgaagctcatactttattcacttttccttggttctgcctgctgtcccttcctgtcccaggtgcccacccaaggtccacgttacattgaattgtcttgtttccttaggctggggtagtgtcccagactgtccctggttttgatggctgtgccagttttgaggggtactggtcaggtgctttgcaggatgcctctctgttggaatgtgcctgtttttttaatgcttagacgtggattatggcttttggggaggaagactacagaggtaaaggccattctcatcgcaccgtatccagggtccacgctggccgtgatcccctgcatgaggtgcttgccaggtttctctaccgtaaagttactctttttgccccctttccttactgtactctgggagaaagtcgctgtgtgcagcccatgcctaatgagtggggaattttgctcataagtggtttgcattctgcacaagggatatgtctcttcaccccatgtattaattcattcatatcaccaagaactcatgggttataatcccgtgttacttagttttgttcgaatgtttccagctcaggcccttaggagctcactaagctcctatgtcctgtttgcataccctgtcattgtggggttttgctgggttctgtgtgtgttaaacactttcctactttctggcactacaagatactccaggctcatcttgtgtgtttcgtaccgcagccctaaaatcagccatttctccaagaagccctcgttccttttattggagagagagattagaaaccatgggtgctgggtgtgttcattgcttctggggtgtctgtcttttgggccatctcatctgacgaaaggatatatgtgtttctactaacccttgtgtaaatatgcacctataaacatttccgtgtatagccatctgtctccaactccagacgtactgtgtggatcattctagcctcctctccttgcttatctgtaagtcgcactccaatggtgagcgtggctcccaccatccatttgcttaattgttcagtctcagtctatgcctataacagtatctgaatcctttacttgaacttccatgggaaacatctttatcaattagcgtatagtgtttatgtgcagtttggtaggtgtctttttaagatcctctctctaaccttgggactagaagtagaatttaggtaaaaattatgaggttgaattaaaaccatcttcagcctcttccccacaacccatgttgttatcaattaaattctgaaattttttaagatgtccagtaatgtaacatctaagtttagccccttataaacagttatggtatcataacctcttaaattagcttatgtaactttttgactttgccatcactaacataatgcttattttctccccaaagaaaaaaggtttggtatgaaagtccttccttgggttctcactcggtgagtataagccatgagccactttataatcttgatgggagtgagggtttaaaagttggcaaaactcttacctggaggtctttccatttctgtattggaggggatagtgtctatgtggatgcgactggatgccattggcaacatggagttttgatcttttcaaaaaaaaatgtactgacattaatgttttctggaaagtcatatcttttatcaaattataatatggtaatatccattcagtttttagtgtgtgtgtactgtaaaagtttatacaatatatggctcccattctgaaaaataaatacatcacgtttccaaaaaattactgaattattccctttagcacggtgaactttatggtatgtgaattatatctcaacaaaaactttttttgagaaaatatttactggcagtacttttaatcttggagggttaccaggtaaaatttaaaaggatcccggtttataaaactttatcttaatgaaagctgaggcagctgagagtgatagctgctgttgatctggttgcccatccagccctcccccagcccctgctgtgtgacttggtgagtttggagttgtaacgctgcccttggggtgtgctcttcttcttgatggagacttacaaaccatccaagttggaattcctcatgaggagcacctcaaagaaaaccaggaaggaagaccatgcgcgcctgagggccctgaacggcctcctctataaggcactgacagacctgctgtgtacccctgaagtgagtcaggagctgtatgaccttaacgtggagctctccaaggtaggctgtgtggccaaagagaagaaatgggttgagacagcaggcctggcacttactttacctggcccagtcttgcctgacaattaaaaaaagacgctttagactgggcgcggtggctcacgcctgtaatcctagcactttgggaggctgaggcgggcggatcacgaggccaggagattgagacgatcctggctaacacagtgaaatcccatctccactaaaaatacaaaaacttagccgggcatggtggcgggcgcctgtagtcccagctactcgggcggctgaggcaggagaatcgcttgaacccaggaggcggaggttgcagtgagctgaggccgcgcctctgcactccaccctgggtgacagagcgagactccgtctcaaaaaaaaaaaaagccactttagcacttatgaagtcttagttctgggttgcagaaatagaaatgatgctcagtctggtcattggagccctggagacagatggtgagtgtctgtgctgtgcagaggcagatgtctcactgcaaggcgggagtcctgtgaccaaacagcacctggcacattgtcagatagtagaaggtctaagcctgccgtgggaagaggatgcatctgcatgtacctcagtacagaggtacaggagatgacttcctctgacccactcagtgagttgtaaggagaaaaggcagcatcgagcatttttgattagtgtctcagggcaagtggctgtgaggcaagcgtggggtcagggttccggtttggttctgcaaaccaggtggtttggtttgcgggtcctggtgaagagaggagggaggttttggtttctggggccctacttcacctggggacatggtgcggcagcaggaggtggcctccagcagcatgccagagccctggcttgggtgggaggggcgtctgcagctgtcgttttcatctcctggatgttgtttgtcttgaaaacccatgtaagctaaaaagtgacctgtggaggggcggggtctcaggtttccctgactccagacttctcagcctgccgagcgtactggaagacaacgctctctgctgagcagaacgcacacatggaggctgtcctgcagagaagtgccgcgcacatgaggtgatgacctttgctttctgaatgtacttgctttttgctcataccctaaatttctcagctgtttcacttgtaggtggacttgaacttttcattgagtatttttgcttttaaagaaaattttggaggcattttcttgaagttcatagtataatttgcatttttgtataagctataatgtaggttagcatttattaaagtgtgccaggatcactagggatctggagatcctgtcagggagttcattagggtaagacgttatttcacctctcctgctgtgttgacatttgcactgagggtacagaaaccatgagggaagactgctggtgccatgctgccagccagtgctgtaggggcgccatgccacatgcctagagtaaaagacaatgttacttttacttaagaatatcccagatgaggctggacatggtgcctctcacctgtaatccccgcaactcgggatgccgaggcgggaggatcacttgaggccaggagttcaggaccagtctgggcaagatggcgagaccctgtctctacaaaaaattaaaaaattaaccaggcacagtggcagcacacgcatatagtcccacctactcaggaggctgaggtgggaggtatcccctggattcctatcagcccaggaatttgaggtggcagtgagccgtgttaatgtacctgcattccagcctgggcaacggagcaagaccctgtttctcaaagaaaaattaaaaaatccgagacagtttatcaaaaattattaattgtattaaatcttgacccttgagcatgcctttttcatattttttgtaatgggaagtacatgtaaatcacctgctgtctggagaatgctgaacagaaaagcatcagtgagcagactgtttaggtttgggtgtttggcagacattctttcaaaaataagcgagtgaacctaccactccggagcaaacaacagaccatatctgttgccagtgataaaatttaagctttcaagtgaaaatcagaattttaggaaacttgtattcaccactgtgagcttgacaacttctaggtacttgagactcttctgatgagattggcagcgaccttaacaaacgtgctgttgtatgataaactgtgtcaatgcttttaaaatctgcataactaggtgagctgttgttttccaaatgaccagtgcatgaggttacaaaaccatacgctgagagatcaattcaaagtgtgagccagatggtgagttttaatgtagcagagtgtgacaggttggttgggtgtggtttcagattcctcattgcaactatttatatgtttatttatttgagatggagtcttgctctgtcgcccaggctggagggcagtggagtgatactggctcactgcaacctctgcctcccgggttcaagtgattctcatgcctcagcctcctgagtagctggggttacagacgcccgccaccatgcccagctaatttttgtatttttagtagagatgaggtttcactatattggccaggccgggacaactgacctttaataaagtacatttgttgaatttttgtgacaaagaagatccatacttttctcatggctgttaaattctgtcttttccaacacataactgggaggcctgaatttttttttttttttttttgctttttttgagacaggatctcattctgtctcccaggctggagtgcagagacacaatcttggctcctgcagcctcaacctcccaggctcaagtgatcttcctgcctcagcttcccatacagctggaagcacaggtgcatgccaccacacttggctaattttgtattttttgtagagataggatctctctatgttgtctaggctggtctccaactcctgggcttaagcgatcctctggcctgagcctcccaaagtgttgagattacaggcatgagctactgcgctggctcttcttgtatttcagtgagaggaaggacagagtgcagaagcagcagtgagatcccagctgtcttccatgaagctggccttggagaatttgcaaatacataaacaattccatgcttttcattgattttgtgggggggagtgtatatatatattttttgttaaaaatgtctatgtaagcatttagtgggtttttaagcgactttaaaaagacgtagcttttagagttctcagttttagtttgtagtatagtaaatattgatagatagaacccacataaacaaatgctctttgggatcttcagtaatttttaagaatgtaaaggatcctgggaccaacaattttgggaattgctgagctggatgataataaagaaattattcagtttcctcctcagttttaaaaaatgcagaaatccaaatccagctcactgtccagctctctcagaactggaattcctcctttctgcctcccttctcatcatgccccatgtttagggtggggacagacgtagaaaaggtggccgtgtgtgggcttcgttccaggcaccctgcctggcttccctgcatcattaccacacacgatgatgcccaggggtctgtgaaactgcatatcagagaatgcttatttcttactgtttaacaaaagcaagaaaatgagagattattgacaagtgttgaaacagcattgttttctgatttttaggtatcagaaaattcagttgagctgaatgtccctcttcccaactcctgcggtcacccaagatttagggtcaccgttttccatagctgtgtaccaaagatctgtggtcacggctttcgctggttatatgtgccgtgcctacattggccctaggtctgtattatgtgatgtgcatgatacaaatatcacttctgtgtctaatatctgggaacctgagggttgtgtcgtgccagggcgtgtccactgggcacaggaggacaggctgttagtgcacagaccctggagcccaaggctacggcgatgagttcagatcaggttatttgtacagatcgcacaagttgcgttgagaaaagtcaaggcaattgcagttatgatgcattttgcatcccttttttgatgtggtagttgactaaagatgactcttctgggctgaggttttcatttttgagtaatacgataaatctcactcctgcctctttttttttttttctttttttttgagaccgagtcttgttctttcacccaggccggagtgtagtggcactatcttggctcactgcaagttccgcctcccgggttcaggccattcttctgcctcagcctcccgagtagctgggactacaggtgcctgccgccacgcctggctaattttttgtatttttagtagagacggggtttcaccatgttagccaggatggtctcgatctcctgacctcgtgatccgcccgcctcggcctcccaaagtgctgggattacaggcgtgagccaccgcgcccggcctctcactcctgcctcttggttacatcttgaatcatatgttcagcactgtcacgcctctccactgagtgtcacggcacagctgtgagggtctgtgcgttctgtctcctaggcaccttttgatgtcccagcagaccctgaggaatgtgccaccgatagtgtttgttcaagacaagggaaatgcagctctagctgaggtaaggttttcaaaaaaactttttaaaatttaaaaatttttatttttttaattagagacagagtcttgctatattgtccaggctagtcttgaactcctggcctcaagggatccttctgtctcagcctcccaaagtgctgggatttataggtgtgagccaccgggcccaggtaataattaactttttataacataaacgcttatatgaataaagttttaaatttaagttttaaatcctgaaaagataatgtacagttaaaaaagagaagaggccaggtgcagtggctcaagcctgtaatcccagcactttgggaggccgaggcaggtggatcacaaggtcaggagttagagactagcctggccaatacggtgaaaccctgtctctactaaaaatacaaaaaaattagctaggtgtggtgacgtgcgcccgtagtctcagctgctcgggaggctgaggcagaagagtcagttgaaccgggaaggcggaggttgcagtgagccgagattgtgccactgcactccaggcagcagagtgagagactccgtgtcaaaaaaaaaaaagagaagaaaccactgagaagggaacaaatgaaaagtaatgaaagaaaggtgcaaatgaaaaggctgtccctttctcctgtgcccctgttcccagccaggtccccagaagtagttgctgtttctggttttaatttttttatgcttatcactgtagctctaactagggtatgaactcaacacggccagagttgccctcccacgcctgtctccccctcccacctctcgaaatggatcagtccactttcgtttcacattattggggcttatgagacttaggtctgtcctgtaaccttaagtgcttttattatcattttccttgctttagagatgggttagctataaagattaaaaacatgtaaatatatacttctctgggtggtggttacctggcagttattaagatatgttataccttcaaaaagtcagtcaaaaatcagcgaatagcgtttgcagtattataggtaactgttgttcagtataggaccagacagcatttggatccacagaagaaaaagatccagtttgacatttttggttttcgttaatcagtgtgtaggtaacactaaaaacattgtacaagtaataagcttgacagattcgtgatttcccttgctagaaaaagaaacgaaggagtgaagttatagtccctgccgtaaggaatcagggacagttcaggtcatggcagtgtgctgtgagggcatgagcaaggtgttccctggggaggacgtgccagtctctctgtctgagctcagcactccaggctcctgtctctggggagggaggtcccatcaggtggtgtgggttccagaacagtcactggacaggggagagtgcatgctatgcttggagcaggatgaggacacccccggaggcaggggataggcaggcagggttcgggtggaatgcattgtccagcagggcttgtgggccattgccgtggtgtgggtggcatcccatgagcctggctgaggagcagttttcttttgtagtttaggctcccagcattgtgactgtccgcatcatcttttaccttgtcttgctgggaggcttttgtcccccaaggcacacaaattctgtggcaaaactgaagcattttgcaaaactaccttagaaaccagttaatggttagttagttaattcaactaacgcttaactggtttcttcataaatttgactaacaagtctaaaatgtagtttttaaaaagcctcacttcgttatcagagaaaatgtgttatgttaaagtaacagtaaggtatttgaaagcacaggctactgaacaggtcctagtatttgggaagagtcggtggaaggaattgtgcaaagtctgatcaaaagctctgcagtcaacaatgctggtgttacgtggagcccggctgtaagtatggtggtggggatgtggctaacgggtttaccctctgtgttcctctgtagcttgatcagttactggcagtcgcagactttggaccccgggatgaaagagacaactttgtacaaaatgatttcaggtgacgcatgtggacatatgttttgattccctggggtacattcctgggtgtggaatcaccattttccagagcagctgcccagcgccacatcccgagtagcctgcatgatccccatggcacttgcctccagggccggcaatccacattcacaggcctgtgctgtggcctggccacgtttacacagtgagggcctcaggggccaccagaggtgcctgccataactcctgcagtgaggagagggcctcttgtcctcttcgttcattcaacacattgtttattgagtgcccactgtgtgccaagccctggtcaagcacttaggatgcagctgtctttggaacctgcgtttcattaggggaggccgacaggaagcagtaaacatcacagatgggtgttaggaggggagtagagggaggtggggcttgggagagcaggtcgggggcgtggaagtttggcctgtgcatgtacacacacatacacatcttttccaaacatgtagtgcctgacagagcctgcaggtcttggggtgtttgtggggggccccattccaagcccacagctgctagagcaggccttgcctgggggccttagacagcagcgtcaacatcgcctggcacctgccagagtcgggtttaaccagcctgccaggtgcatccctgagctggaagcaaagctccacgctgtagcaggcctggcctgaccgtgtcagcaaggggcagtgtgggggcggcagggcagggagctgagcccagggtgtggaaactttccaaagtggagccttggaggatacaggggctgtgacgtggccttgactaggtgctgttcaccaagaatagactcttcatgaaggcgaatgagtggcaggtctgataggcctcacctgcgattctgccagttgaactggcccgaggcactggccatgcttagagaaaaaagttgcaaacgcttttttttttttttttgaggcagagtctcactctgtcgcccaggttagagtgcagcggcgtgatcttggctcactgcaatgtctgcctcttgggttcaggcgatcctcctgcctcagcctcctgcgtagctgggattacaggcgagcgccaccacgcccagctaatttttgtatttttagtagagacagggtttcaccatgttggccaggctggtcttgcactcctgacctcgtgatccgcccgcctcagcctcgcacagtgctgggattacagatgtgagccaccgtgcccggcgcaaatgcatttattgcatacaggacggtgcacctggactgtgctggccgaatgcttctgacactggagaaggcggaaaccaaagcccaccttccttcactcctgtctccagttaccctcagatagacgtttgggagggttctcaggcgagtagatgtaggaagtgtgatgtgctgttgtgttgtggcgacgacactgtggactaggggcatggtttgtgcttggtgtgaagcctcttcttccttcccagggaccctgatgccccacaaccctgcggcaccacagagccgaccacaagctccagtctgtgtgggatcgatcatgaggcgctcaacaagcagattatggagtacaaaaggaggaaagataaagggctcgggggcctggtgtggcaggggcaggtggctgagctgacaacgcagatgaaaaagggaaggaagagggccaagccccgcctggagcaggacagctccctcaagagttacctgtcaggcgaggaggttgaagatgacctggacctggttggtgccccggagtacgaatgctatgccccggacacagaggagttggaggcagagagaggaggtggcagaacagaggatggccacagctgcggagcaagcagggagtagatggagaggctctgcccatcccacatttgcagggaaaagcattggcacgcaacgcagcatgtggcttcattgaggcagttgatggagttaaaccatctgctcttctgctacttcaacattttctagcttttccgtgtatctaaacacaatttgctacacaagtcactgtttttttttccatgcactgtgtgtaatttaaaaattaaatggccatcttatcacagattctcacaaaaagaaaatggtaaaatagtgtctctgagatgctggcatggccacctccacctgcagagccctgccaggtgccagtgagtgcttggcccgaggggtcaggccacagcagtggccggggtaagaactgaacctgcaaacctggggagaacagagggtccccagagcctcccaaccccctggagctgggctccgtccctggggctgctgggctggcacgtggcgccgggggctccatccctggggctgctgggtcggcacgtggcgccgggggctccgtccctgactggcctcttcacagctttgtgcagcaggctccaccttctggttcaggccaaggttgggcagaaagtgagttgggtttgctggggcttcctgggcgaccccggctctgaccgtggttccatcacgcctgaagtagtaacacttttcccttggtgcccgtggccagctagtgtattttctaatccatccaaaggtgaaacagacttggtctttgccttctgaagagtgtgcgactctgagtcatactgaattctttgtgtcacctccgacgcaaagattcgttttgctgtttatcagaagagaaaacacagattccataccttgtcagctcctatttagttcggcttccctcttaatgtcccagcccctgtgagctgtcaggttctaaattcagaattctctcaattctgtcaggttctgcactacgagtcagtgtcatccctccaagccctggctctctgccagtgcagcagggctgtgagaatcaagacggcacagggaaggcatctgtcccagcatttgcacatgacaggtgcccacggtgcaggagtagaatctgtggaagcagcagtggctttagttgctgtgccctgccacctcctccccaaaaaggagaagtgtccaagggatagcagacccgtagcactgagcggcctgccgtgctgaccactggatccaggccacgtgctgcagacagcggctgtgggcgagtgatgaggccactacccagaaagctgcatgtgcactgtgtggggtaaggacagtaggagatgctgctgcaagatgctgactcccttgtttttcttttcatttgtgctctgggactaagctgtgtataagtcatcaaatggcagaagcaagatttttcttttgagatctaggaaattatttgtttatactctacactcttatttcctatatcaggatggggaggccactacctcaggccagttaaactaagaagaaagaatttaaggcaatttgtaaggatagacaaaaccccacatgatggtatgagtaggagagagaaaaaaaaaagggagccagaaattaggttacaaagtgtacaccacacataaaggctgatgcctctgttacaccgtgagccaaatgtttatctctagggtttctggtagccagttgcggggtgtccagtgaaggggtgtacatgtctgtggttaatcatataggtcaggataatgaggtgatactgcagtgacaaatggcaaatctccctggcttacaacaaccagtttgcctcttattcttctaggggaccatcatgggctgaggtcaggccaaggccttttgtatctggtgttactggaacatggctatgtgaattcatttatgtacaagagacctccccatcctgatgtaggaaatgaatggtgatgatttacgagcgcaacatcctaaaaaacgtttttgtatttccctagcaagataacttcaggttacaaggctctggtacttgaccatgatgactccatgagaaaacagcagaacgccagctttgcaggtacctccacagcactgccgggctgggaacagggccagtgcttgcaccagcgctggagggggccacagcagagtaaagacagagtctgccatgcaggagtgcttcgcaggtcaggcactgctctgagtgctttgtgttaacctgccccccgccccctaacttgggaaaggtgttaaagaaggagagaacgccctcaatggtgtgtcctttgcatacacacctttgcatgcatctgatgtgcccaggctgtgttttattgttctagcaatttattgttacaaaacagattgctgccatcaatttgtctcaggtccttctagcacatctgacagggactagtgtctagagccatgaggacagagaccagaagggacaagaaggagtgggcagagggaatggaaggtagagttaggcccagagagccccaggctgctgcccagacctccacgcctgtgccggatgtggtgttggcatccatagcagtctcgcaaagttgttctcattttccaaataaggaatctgaggcccagggagaggtgaagtgctgcaggagatccaaccaggcgccggctcagtgcctcctagaaagaggagtgtgggcacgtttgcaggggatccaaccaggcgtcagctcagtgcctcctagaaagtggagtgtgggcatgtttgcaggggatccaaccaggcgtcggctcagtgcctcctagaaagtggagtgtgggcacgtttgcaggggatccaaccaggcgtctgctcagtgcctcctagaaagtggagtgtgggcacgtttgtaggggatcccaccaggcgtcagctcagtgcctcctagaaagaggagtgtgggcacgtttcagagaaaactggcttaggcctccctgtttctggcgtggccttccctgggagcgagttagggacacggaagctcacccgcttctgaatgggtccactcctggggatttccgcggccttccctgggagcgggttagggacacggaagctcacccccttctgaatgggtccactcctggggatttccgcggccttccctgggagcgggttagggacatggaagctcaccctcttctgaatgggtccactcctggggatttccacggcctttcctgggagcaggttagggacatggaagctcacgcccttctgaatgggtccactcccggggatttccatggccttccctggatgatccactcctggggattttccgcagctctccagatgacgtgcacgcacactaaacacccagaagttagggaggcactgatccagtgaagtcctcagatcaaccttgtgagctttttacaagtacctgtcactgttaaactgctgatgaaatgtgaaacgacttcacaggttttcagtctgataagctctcctgtgtcactgtcccttaccttgttagtaaaggtcaatggttctcaaagttccgggcacatcccctgggggctcataaaaccagactgtcggccacttcagccttctggttcgctgttccttggtaatgcagatggcccagtaagcaactctacaaacattagaacattttgaggtagacaggggaacttaatcaccccttgtaggcccccagaagactggacccaacatccagcacaatgcctctcagccttggctgtgcatctgaaacacctgctgtttgaagacacctgggcctggagacgggccagagccaccttggtggtctgagtatgaggccagcattagaacctctgctctacgggtgactgccctgggttgatttttttccagtattatctttagtacagaatcttttcctctctaagggcctgagaccctctcttaggaatagaagtacagttttcttccccactccttttgtccagaaggaaaacctggttttacatcagaaacttgaggtactttgaaaatttgccagctgccttgaaggagagagggcttgagtgtattttgggggaagaatgaggggacaacagggcagggagaagggacagagctagaggaaggacaggcctgtgccacccaggccagggtaaggggagcagagaccttttggttcctggtttgtgacacaggaagggagggaactggggaggacaggtcatgatcagtgtttcctgattaaaaattttttatttttatttttaattatcatgggcacagagtaggtgtatatatttgtggggtacatgagatgttttgatacagacatgcaatgtgaaaaagcacatcatggagactggggcacccatcccctcaagcatttatcctttgtgtcacaaacaatccgattatattgttttagttatttttaaatatgcaattaaattgttattgactatagtcacccttctgtgctgctgctctactgtggcctcaaagatcataaatgctgtgggtgctggcaagatactgaaataaattaattctgtatttctaaaaataatttcatactttctttttacagaaggaatatatattctttgttgaaaaatgttaaaacagataccaatagaatagaggaaacaaaagccccatgtagtctcagctaccagagacaccactgttaaattttggtgtagcatcaggtgcggtggcacgtgctgttagtactcaggagactgaggcaggaggatcactggagtctgggagtttgaggctgcaagcacattgattgcacctgtgaatagtcactgcactccatcctgggcgacagagtgaggccctgtctcaaaaaaaagatggtaacatcagaatgttaaccgagcatgaggtccccatgcccacatgggcagcacacctgggaagccagccctgatgtcagttaatcctcaggcctctttgaggtgtgccatttgccctagggatgtcctgtatggcaaagggcctgttccagaggcacttgttatgtttacctgtcaccctcaatcccatgccctcgagtagctcttgggcttccttgagccttcgtggccctaattttgaggagtgcagccgttattttgtggagtgttcctcagtttgggcttgtctggtgtttcctcatgatcacatttagtacttgcttttttgcagggacatcacagcagtgatgctgtgctgtcagtgttgggttgtatgttcctggtgatgtccacaatgatgagctgaagaaaggggtgtctgttgggcttctccctgtgaacttactcttaagtatttactttttgaaacaaatgaaaacagagacacaagacaccaaaacctctgggatacgataaaagcagtgctaaaacggaagcttataccattaaatgcctacttcaaacatacaaaagatcacaaattaacaacctaacattgcacctcaaggaactagaaaaataagaacaaatcaaagtcaaagctagcagaagaaataagaaatatgagggcagaactaaatgaagttgagaccaaaagaaaaatacaaaggatcaatgaaatgaaaagttggttttttgaaaaagtaaacaaaattgataggctgatagctagattaaccaagaaacagaagatgcaaataaacacagtcagaaataaaaatggaggcagtacaactaacaccacagaaatgcaaaagatcctcagagactactgtgaatacctctacattcacaaactagaaaacctagaggaaatggataatgcctggaaacatacagactcctaaggttgaaccaggaagaaacagaaatcctgaacagaccaatagtgagtggtgagcttgaatcagtaataaaaagaatctcaacaacagaaaagcccagggccagacagattcatgccaagttctactggacatgcaaagaggaatcggtaccaatcctactgaaactgttccaaaaaatcaaggaggaggaaatcctccctaactcagcctgcaaagccagtatcaccctgataccaaagctaggcacacagccaaaacaacaactacaggccaatgtccctgatgaacataggtgcaaaaatcctgagtgaaatactagcaaaccaaatccaacagcacatcaaaaagataacacacaatcaagtgagttttctttttcaggggtgtaaggatggtttaacatacacaaatgaataaatgtgattcaccacatacacaattaaaaacaaaaaccatggccaggcgcagtgtggctcatgcctgtaatcccagcactctgggaggctgaggtgggtggatcacctgtggtcaggagtatgagaccagcctggccaacatggggaaactctgtctctactaaaaatacaaaaattagccaggcatggtggtgcatgcctgtaatcccagctacttgggaggctgaggcagcagaatcgcttgaactcgggaggcggaggttgcagtgagccgagatcatgctaccacactccagcctgggtgacagagcaagactgtcaaacaacaaacaaacaaaaaccatatgatcatctgaaatgatgcagaattgcccttcataataataaccctcaacaaactagacacagaagaaacatacctcaaaataataaaagccatatacaacaaacccatagccaacatcatactgaatggggaaaagttgaaagcattcttcctagaactggaacaagacagggatgcccattttgaccacttattgaacatagttttggaagttctagttagagcatccaggcaagaaaaagaaataaaaggcatctagccaggcacagtggctcatgcctgtcatcccagcagattgggaggctgaggtgggtggattgcttgagcccaggagtttgagaccaacctgggcaacatgatgaaaccctgtctgtacaaaaaaatataaaaattactcgggcatggtggcatgtgcctgtagtcccaactactcgggtggctgaggtgggaaggtcacttgagcccaggaggttgaggctgcagtgagccatgagtgtgctactgcactccagcctgaatgacaaagcaagaccttgtctcaaaaaacaaaacaaaacaaaaaaaaaaccccacaaaatccaaatgggaaaagagaaagttaaattatctgtttgctgatgatacgatcttatatctagaaaatcctgaagactcttccaaaggactcctagatttgataaattatttcagcaaagtttcaggatagaaaatcaatgaacaaaaataagtagtagttctatacaccgataatgatcaagctgagaaccaaatcaagaactcaattccatttacaataactacaaacaaacaaaatcctaggagtacatttgaccaaggaagtgaaagacctttacaaggagaacttcaaaacactggtgaaagaaatcatagatgacacaaacaaatggaaaaatgtctcatgcccatggcttggaaaaatcagtatcattaaaatgaccatactgcctaaagcaatctacagatacagtgcaattcctatcaaattaccaatgtcatttttcacagaattagaaaaaaaaatcctaaaattcatatggaaccataaaagagcccaaatagccaaaacatcctaagcaaaaagaacaaagcaggaggcatcacgttacctgacttcaaattatactacaaggctatagtaaccaaaacagcatggtactggtataaaaatggaaacacagatcaatggaacagaataaagaacccagataaagccacatacctacaaccaactgatctttgataaagttgacaaaaatatatactggggaaaggacactctattcaataaatgatgctggaaaaattggatagtcatgtgtagaagaatgaaactggaccctatctttcaccatgtaaaaaaattaactcaagatgtattaaagacaaacgtaaggcctcaaactataaaaatcgtagaagaaaacctaggaaaaatccttctggtcattggtctaggcaaaaatttatgactaagacctcaaaagcaaatgcagcaaaaccaaaaatggacaaatggtctctaaaaagcttttgcacagcaaaagaaatactcagtggagtaaacatacaacctgtggaatgggagaatatatttgcaaactatgcatctgacaaaggactaatcagaatttacagggaactcagcaaggtaaaaaacaaataacctcattaaatagtgggcaaatgacatgaacagaagtttttcaacatacaagcagccaacaaaatatgaaaataaggctcaacctcactaattaatagagaaatgcaaattaataccacaatgatatgccatcttataccagtcagaatggctactattaaaaagtcaggaagcaaccgatgttggtgaggatgtggagaaaagggaatgcttataatctgttgatgggaatgtaaaattagtacaacctctatggaaaacagtatggagagttctcaaagaactaaaaatagaattactattcaagccagcgatcccactactacccaaaggaaaagaaatcactatattaaaaggacagttgcactcgtgtttattgcggcactatcacaatagcaaagtcatggggtcaagttaggtgtccctcaactgatgattggataaataaaatgtgatttatatagaaatactaaaaaatttaggatatatgtatacacacacacatataccatggaatactataagaatgaaatggtttttgcagcaacatggatgtaactggaggcagaaacagaaagccatgttctcacttaccagtgtgaactaaacaatgtgtacatatggacatagagaatggaataatagacattggagactccaaaaggtggttgggtaggaagggcatgagagatgagaagttacctattgggtacgatgtacaccatttgggtgatggttacaccaaaagttcagacttcatcactgagacatatccaggtaacaaaaatgcacttgtacccctacatctatttttctaagtatttctgtggaggtagttacagactatgtacatgtcatgtcccttatcaaactttcattttattcagctgtttaatcagcctgatgccaaggtttcctatttgttatattctgttactatgttaattaattaattttttagagagggggtcttgctatgttacttaggctggtctcaaactcttgggctcaagcaatcctcctgccttagcctcccaagtagctgggactgcaggtgcacactgccatgcccaactagttaatttatcttcatgcttaaatcgtcatcagtttggcagaggagaaactgtattagtttcctgtaggtgctaattgccacaagctcggtggctgaaaacagaagtttgctgcctcatacttctgaaggccagacgtccaagatcaagatgtcagcagggctgcattctcatctaaggctctagaggaaactcttcttgttcctcccagcttctggtagcctcaggcatttcttggtttgtgagtgttgttgtttttggaaatataagcaaatgtgtgaacgtgtttgtatttccttcttgtaatgcagcacgtgtgtattgttctgaatgctgctctttgcactttgcattatatcctgagtctcaatatcagcagagagtgtccttcgagttaccatatggaatcatttccttagcccagtacacctttgctcacaccctttttctttgtaccattaaattgtcaagtatattgcatttctatacattataggctcaatgatacattataaacattgttttgtacaattgcattttaaatcagttatgtaatgagagaagaaaatatgaatttatactgtattttataattacatgattacctttactggtgctctttatgtggtctcagattttcatctctagggcggacccccagccctcttttagcctgaagagcttcctgtagtattttttgtaaggcaggtctgctagcagtgaatctttcagtttttgtttatttaggaaagtctttatttcacttctgtttttgaaagatagctttgctgaatgtaggattcttgagtgacagttgtttttttttttttgagcactttgactatgttatcccactgccttctggcctccattatttctgctgagaagtccgctgttaatcttgttgagggttcctgccttatttttctcttgctgttttcaagactttctccttgtctttgccttttggcatttttattatgatgtgtctttggagtttttcatggtgtgtagatttgtgtagattattgagtttttgttgttaattttgggaaattttaggccatcgtttctttgaatatttctcttctcctttctctttcctctcctttccgccatatgtatgctggtgcatttaatcatgtcccacatttctctgaggcatcattcatttttctattcttattgcataatctccattgatcgattttcttttttattttatgtatttatttaaagacagggtctctgtcacccagtctggagtacagtgacatggtcatagcttaccacaacctcaatctcatgggctcaagtgaccttcctgcctcagtatccaaagtagctgagactacaggcatgcaccaccatgcctgactaactttttaaatttttgccgagacagggttttgctattaatgtggtttggttctgtgtccccacccaaatctcaccttgaattgtgataatccccacatgacaagggacaggacaaggtggagataattaagtcatgggggtggtttctcccatactgttcttgtgatagtgagttctcacgagatctgatggttttataaggggcttccttctttgctcggttctcattctctctcctgccgccctgcgaagaggtgccttctgccttgattgtaagtttcctgaggcctaccctgccatgtggaactgtgagtcaactaaacctcttttctttataagttacccagtcttgggtatttctttatagcagtgtgagaatggactattacagctgtgttgcccagactggtcttgaactcctggcctgaagtgatcctcccaccttgcctcccaaaatgttgggattacaggcatgagccaccatgcctggcctgatctatttccaaatttgctaattctttccttggccaggtgaaatgtattgttgaactgttcaagtgaagttttgcttaggctattaaaatttccatctccacactttccatttggtcctgttttataatttctgtgtcattattggtattctgtatttgattcagtgttataatcatatcttcttttatcctgatttcttttagttctttcaacaaattgtaatggctactttgaaggctttttctagtaagtctgacatctggtcactctcatggagagtttctgctgtctgctttatttctggtttataggtcatgctttcctgtttctttgtatgtgctgtgatctttttggaaactggacattttagatcaggggtccccagcccctgggttgtggactggtacccatctgtggcctgttaggaacagggcagcacagcaggaggtgattggcaggtgagccagcattactgcctgagctccgtctcctgtctgatcagtggcagcattaggcattaggttctcataggagcacgaaccctattgtaaactgtgcgtgggagggacctaggttgcatgcttcttatgagactctaatgcccgatgatctgaggtggaacagtttcattccaaaagcatcccccaaccccttcccggtctgtgggaaaaaattgtcttccatgaaaccagtccctggtgcccaaaaggttgggtactgctgtttcagatgatgtacgtagcatctctgggcacggacccttctctctaggcttgttattgtaatttacttgtttatttagtgactggctggcttattttactggagtctacctatgcccaaccccaaactcccagtgttaagtatctaatgttgttcctcagggaactcagccttggccatgtccacagtcaccctgggatttagtaggaacgctcctttgatcagggcgtggctcactttgactctcttttcctggccatacccagctgtctaatccactaatcgctctattgttttaacaacactctggagcataaatcactctacatcctaaagaatcaaatttaggatcctttgaagggtagttcctgaggcctgtgtttgagatttgttctgacttcagcaggctcctcggagctgtctcttttacacgttctcttgggcaaactagcatgtctacagccaagcctgcatctgcgctttcccttcagccgttcactgtttttgagagcactcttaggcttgcacctccccacactttgtttcagtgaaatcagctcctttgggaagagattcggagttatctgttttatagcctgctccctccaggcacaacccctggagcttggtgggtggtgatgagggaaccctggcaagcttccttttgggtgacacccatcatcacccacctaggagttgagattcggggtggggggcgggcagtagcctgaggtcttcttggcttgcctctcctgtggtgaaaccaccaccaggaccccagtattttcagcgccaggtgcccaagagccctcgtcccacagagaccagtgtggaaggaggccctgcctttcccgggagggaacgccatcgtggccggggagtgggtgttgtgtgggtgaggaggaaatgcaagtgtctgcacacatccctgtgtttctaaaacagtattcgtgaccgcctctccgcaggtgcattggtggggccccagagacggggacaggaagaccgggcatccttccttgcagggagtcttgaggtggggtgggtcacgagcctctccagtgttctcagtgccagatcccagagtgtgggggttgcagctcactgagcccagccccctggctctgcagagcggacccccagccctcggccctgtgcatggacccctgtggtgtgtgacccacattttataggaaatcatcttcaccttttccagtgcacttgaatttgccaaaaccacagctttatccacacccaaagcatgacaccaccaaaacaagaaagaaagccaccttgccccctggaatccccccagggcctgcaccccaccctcccgaggcactcggggcctttcctgggaggctcagggctgcccttgggggctcagcttcttcccagcttccccaggcgcacagtgctgagggctggaccatggatgattcgggttttctgggattttagaaattcttagatgtggcctaaggggaaaaggagaaacgaacccaccatgagaatgtctggtttctctttcagccagcggttcaagtggtatttgcaatgttttttattcactttgcagtgtttctaagaatatgcttctaatgtgcagcttctgacaaacagccagagatgaacgttcatgggtgtctggtctgcatgaagggtgtcctgcaggaagagggggcggaggggccctgtttctgcaggcggcttggggccccctggctgcaggcaggagagagggtggtgacttgagatgtgtttcagagttaagtattataatttatctttattatttgcgttttgtggtgcttactcagcattgggcagcatagatacagccattactctaagtgtcagcaaacacagtgtcttatttttaagtgaatgtgttataggaaaggggtcctgatccagaccctaagagagggttcttggatctcgtgcaagaaagaattcagggcgagtccatagggtaaagtgaaagcgagtttattaggaaagtaaaggaataaagaatggctactccatagacagaacagccccaagggctgctggttgcctgtttttatggttatttcttgattatttgctaaacggagtggattattcatgccttccctttgtagaccgtacagggtaacttcctatatggaaacgcctatttaagatgtaaatgctctggttcaaatgcctctgacatttccccctcccttttacaagagaacccttaatcctaagggttgcagagggacagagatccatcttctgtaacttcttcaggctgaatagaggtgatgatattcctgcctaactgttaggtctctcgcattcaggttagacaggagctcccgtgtggcgagagccgttcataactccaagttctggcaaatttaagaatttaagaaatttaaggaaacattctgtaagcttatcctgcaatcctacacagagcacaacagtgatatattccacaacagtaaggcaaaataagtaaaattaccccaagtaaactaaatcagaaggctttccatgaactaggcaactgctggaaccaagctgacaggaggtcgctagctgattccaatgtgcctagaattagaatattgagtcagatttttacatttcccatccctcttgtttcttctgagcagcagccagagttcactggttggttcacaggagtaagcagggttagtctaagttgcaggaaaaaattcttaaaaataactgatgagactagaatttaaaaataggtgtaccatagtttttgaaacataatttctgtctctccagtaccccattttcactaaggacaaatcattgtaagactgatttgctttattatacttggcctgattatttgtataaagtgcagcaagaataattatttttcacatagacttttaaaattggctttgatgaaactgtgttccatagaaggaatctcagataagacttttttcttttattattattattttttattattatactttaagttctaggatacatatgcacagtgtgcaggtttgttacataggtatacatgtgccatgttggtgtgctgcacccattaactcgtcatttacatcaggtatttctcctaatgttatccctccccctgccccacaccccatgacaggcccgcgtgtgtgatgttccccttcctgtgtccgagtgttctcattgttcagttcccacctatgagtgagaacatgcggtggttggtttttctgtccttatgatagtttgctcagaatgatggtttccagcttcatccatgtccctgcaaaggacatgaactcatccttttttatggctgcatagtattccatggtgttatatgtgccacattttcttaatccagtctatcattggtggacatttgggttggtttcaagtttttgctattgtgaatagtgccacaacaaacatacgtgtgcatgtgtctttatcgtagcatgatttataatcctttgggtatatacccagtaatgggatcgctgggtcaaatggtatttctagctctagatccttgaggaattgccacactgacttccacaatggttgaactagttcacagtcccaccaacagcgtaaaagtgttcctgtttctccacatcctgtccagcgtctgttgtttcctgacttttcaatgattgccattctaactagtgtgagatggtatctcattgtggttttgatttgcatttctctgatgaccagtgatgatgagcattttttcatgtgtctgtcggctgcataaatggataagacttttttttaaaagccgagcctagccatggctttgtgccctaaaatacctatgagttaggtaaattcctctcctcttgaggtcacaagataacttggggctcctgagcctgtcataaagtgacatttttcacttaccacaggtcaggccccctgtccagggactatatagacaaggtatgttttcccgaggggcttttattgactctacaagtcaagttggattccttaaaggaaaacacactattccagtcaaagccttggtaaaatagccagtttctccagttgtgtcctgttacaaatgaaaacagattcttattgcacttatgcaaacaactgtattgccataaattaagaatactcacaaatagtttccaaattctggagaaatgaagtacggagaaacaaatatactcaaaattttgttcacaggagtgtgctttactcaattgtttttgtttgtttgtttttgttttttttttgagatagcgtctcgctctgtcgcccaggctggagtgcagtggtgcgatctctgctcactgcaagctctgcctcccaggttcacaccattctcctgcctcagcctcccgagtagctgggactacaggcacccgccaccacacctggccaattttttgtattttttgttttttttttagtagagacggggtttcactgtgttagccaggatggtctcgatctcctgaccccatgattggcccgcctcagcctcccaaagtgctgggattacaggcgtgagccaccgcgcctggcctactcaattgttagaagctgcaaatagcttaagtttccttgactctgaaaaagaaaacaaaggatcagcaacattttaagcgaagttaaaaagattacttcagtttagtccacgcagttaactccagttctgcttgctattcatgaatattttggctttccatgagtcctgaaagttttttcctctattctaatgtcacaacttccaaagctgtcggaaacctgcatttaagtgcacctgtcaaagtcctatggttgattataaaaccaccttttaaagaggaccaaaacaagacaattgtctgtggatgacaaaagtcttaggccagccactattaaagtcaaaattgataatgaaatttggttatttctgtggcatataacaatgttatgtaacaattttcactattaataacatacactaagtcatatcagaattatagaactttcttataattttggaacacataccaataacatatttattcaaatacagcccaaagttagccaaacattatttcatatttgacaatgcttcctgtatgatttttataccaaataagccaaatctcacctttacattagtgtactattaatgctaaaccctaatcttaataaaaccttatagacaaatgtatttaatcttaatcagtttgaccataaggtaagattctttttttgagacagagttttgctcttgttgcccagactggagtgcagtggcacaatcttggctcactgcaacctctgcctcctgggttcaagcaattctcctgcctcagtctcctgaatagctgggattgcaggtgcccaccaccatgcccagctaatttttgtatttttagtagagacagggtttcaccatgttggccaggctgttcttgaactcctgacctcaggtgatccacctgcctgggcctcccaaagtgctgggcttacaggcatgagccaccatgcccggcccctaaggtaagattcttataccttttataaccctttacaatttttttttgttaaagagtggattataagcaggattttgctttaagaaaaacctgttatgtttttattcctatgtttaatttacaggaaaactgaataatacccctttaactttagccaatgtccatacacagaatttcttttacaattaattttttacaaaccttccacaacttgttcaaacctttagcttgatcctaacttaaaacaatactttaaccctttaatctaggcagaaacatccacattcccatgacttcttataatctttaccaaaagtatattctactttccttttcgccttgggtgtggaactatttcttgcgtagtctcaaatacagtgttagcttttagcaccttttgcttttggtgaaaatcttggtaagtcagggatttttcattatgtgccaggtgtggggcctagcctgggacccaccagacagaagtgcagatgagggcagaccctcccgcatggctagggtgtggctctccacatgtccccaggccttagctagaatctaatgtccccaagctaggtaaattggacaattttcaaaagtcaaataagcagtttatgaccttaaagcattgagtaaacttcatatcctacctgcataatttagaccaaatgtctttattttaccaataatctttaaaactttttatttcccaaagattacttcagtcacatgagctaaataaaagttattacactatttacttttctgacaaaatatttgatttaagctgttattgtaattaaaccaattaatcaaaactcttttatattacacacacaacacatataaatagaagacgaaggactcatcccctaagacaggaattgggccctaaacccgggccgccattgtgaaaaaagaaagcacaaccacatggttacaagttcaagctcccagggacctacaagacaagagggaaacctcatccagtttcgtttttttttcagggacctgtagcaacgtttataactgaccagtttgctggggcatcttgaacagtgggcttataggagtcccgctctccgtggtggttcccacatccactcaggggtgtctgggttctcagggacacctgcttcttgctgggcaccgtggcctggacttaccacctggcctccagggttcaggccgtggacatctgccctgaagtagcctgtggggactgtcacgccacagttaatgtcctgggtccttggcatcaagtctgtaaagctgtctttgctttctcaacagcactgtgtgggagttggctgggcctcggcgagtgttgcctgtctctgtcgtcactaggatgttagcgggaaatggtggcgttctctccacgcagttgctgctttgcctgtggatcatgtttttcttctccctattgatcagcacacatcacaaatttgatttgagacggagtcttgctctgtcacccaggctagagtgcagtggcgcgatctcggctcactgcaacctctgcctcccgggttcaagtgattctcctgcctcacctcccgagtagctgggattacaggcacccgccaccgcacccggctaacttttgtattttcactagagacagagtttcaccatcttggcccggctggtctcgaacccctgacctcgtgattcacctgcctcagcctcccaaagtgctgggattacaggcgtgagccactgggcccaggctattttttaattaagttaatagtaagttataaacaacacattataaataatataaattacaaataatacattaataaattaataatacaatttttttaattttaatttttaacatgttaggcattgaggtaagtacagtggataaacacccatcacgcacagaaaaaaggaatgaggaaggcacgtttgccacacatctgctccctgctctgggagccctccctgttccttgtggtttaatcttctagaactctgatggcggcattactgtgagttttgcttctccagaaggcttcttcttaaagctttctgagcactggtactcacaaaactctcccctggtgaaatgaaaacacacacaggcgggaagtgagccagttctcaacttgagtggcttctccccaatgcatgctttttaaaacttccagcgttttctaatcagatctgggcaatattgtggcatcacctcctgcatccgcctttaccctcctcatcctgttctttgtcctaaaaaaggctgtgggaccagccggtctcagagcccaggtggagcctcagctcccctgcgacctgtgcttttccgagggtgccgcctggcagggcctgcgtcagggtcaccctggcaggaccagaggtcaaaggtcaccctggccagaccagagcctcggaggtccctgggctgcagtgagggagatcagaggtcgtgggctggggccagccaagaagagttgggggcagcagggagcacagtctggcccttgacattcccacctgcttgtctgctccacaggacagtggtcaggagggcccgggagtgagtgtgcagggtcctgggtgggctccacatgcatctcatggggcagcaggaccccgatgagggcacccacagggtgggagggtggagagctctgctaaccaagatggggaggcccgggtcagggccagctctgcctccgaggctatatccagcagccttcggccttgccgtgtgagctcgtggaagcccatgcagtgtgtgcccctctggttgtatctggtgaggccttgtacagggatgagctcggacctgagtttcagtcagcagaaaaataagtttctggaggacttgattcttttcagggcattcagttctgtgtttcgcctgtacccaagatgagatttctaatacagtgatgtgtttaaaattaaccatatctccagggcagcatccagctgtgagccttggtgaagaaggtcctggagacgggagtgaatggggtggggccatccttggacacacaggaggttcctgggccctggggatgtgtccgtgggtgctgaggagatgaggggtgcatgctgtctgggttcttttctctccgctccatctcttgcaaggtgaggaggggtctgctgttgattcctgtcctgcctgtggtgctgaagctcccctcaagctgggctttctcagcagggagagtttcttcattgcttgtagaagtttatgcttccctgctttagtctgggcaaattgctccccaaaggacatgagagctgaggctgtgtttttagagatagggagcagctacagggacttagcttcttaatgaattaattcacaaatctcagcagctcctggcgataagatatgcagagctgatggcagggaggacacgaggtggctcaaagggaactaagctttgcgtgtgaatttagggtgaggctaagagccctccaggcaggcagaggagggtgctggagggaggagaggccggtataggaccttcgccttgaagaaagcacccaggtaaggctgggcagtgttgggagagagctttagttgatctttttgtttttggatgttttctgatggtcctctatggctttggaaaatggagagaagacagagaggcgtaggcactgaaggctgcagctgtgattgaggatcacgacgcctgttggggctgctcacctgcctaggcctgggtgaggaggtgctggggcctggctgcacacacgttcctgccccagaactcagttgggggctcggagcaggagaagctgcacacggtgagtgtgtggggcgcagaagcccgtctgcagaggttccacaccatgcagaaagtggccagtgaaagacaaggaggtgttcccgggagtggaagggctggggcctggagaaaggggagatgggaggagttgggggctacagaggacaccacccctggagctggcaagcatggcaggaaggggagagttgagccgagaagggcggccagggcaagacgatgacctggagtgggggccccagaggtcctgctcaggggcctgcagaccagtatgcctggaagattctgcaggccgattatgaggcccaccaaggtaggcagcccccttccagggccgtccttcaagcttggtaactgtgtgggaacaaacaagacctgttgggtgtccagttctgctcttgctgcaattctgaaagtcgaccatttaaagactgttatataaacataatcttttaatgagaaatacttcccttgtattgtttttttgaactcttgacttagtgtagtataggatctggaaataagaaaactggatatctcggaagagaaatataacagcttgtctgttttcttctattgcacaacttaaatatgctacagttaagtgggtcaaaatctacctggaggtgaaagctgggtggatgggggtccattcctctgtgaactggggatggcaacgcagtctccaaagggtaagagcaaacggacaggcctggagggcgcagctcagatgcacccgttggcaaatggacaggcctggagggcgcagctcagatgcacccgttggcaaatggacaggcctggaggacccagctcagatgcgcccgttggcaaacggacaggcctggagggtgcagctcagatgtacctgttgggctttggctgtttttgttgcacacaaaggtctgggaggagcacagaaccctccctgaggatgagattatggaggttgtagcgttgaggaggttcaggtgctgccttatatacttttatgtagtgtgaatttttcaagaaaggtattgtttttgtaatgtaagaaaagattccatattgaggagagtaagtagatctgacaggtgtgcagccttaggcattagttattaaatacatattcatttaattaaaactcaaaaatttaaatgttttcctcctcattagaatatgccattccaaaatatcaccatattattctatctcccaagaactctgtcctcagtatggctcccggtagaatgagggtgagacgttgaaatgtggacgtatcatcactataaaagttacatgtggcaaatgtagtttctaatccctgcttttctttcattttcttagttattagcatcattctccctgatgcttctcgatcacagaagtggccactgtcttactggattaggctctaatccccatgcccttggccaagtcagatttacccttcgagttcactgttgcctgttgggatggccctgccctggatctgtggaatgagcagccgctcctgtttgcaccaactgaaatcctctcttctgcttgaaatttttggtagccttgctggcagctcagaatgaggctcagttaggacggggagctcatgaaccccagggtgcaagtactggatgtggtcctaactagcaagggctccagaaagggacacagtgaaagaaaaggaaaaggagttatttttctgctattggagaggtgacaaataacatgtttgaaagcagcgttgttgtgacatgcccttctgcattgctggcgggtggggtgtcctccctaggggagtggcccgtggtgtctgctggaatcccaaacacattcgccctttgacccagccatacccttgtggggacttaccctgcaccctattctctgcgggaacacaatgggaatgaggaaaagtcacggttgtaaccagagcagtattgtgaagatgaaccttttaaacaaaattctaaaatattaaaatcaatatgaatactctgtaacttcagagaatcaggtctggaataataatattaataagagcgaatatctagtaagggctgaattccctgggtgcccaatatggacttagttgtgtcccactcagctagataggcccagtacaggaaatttctttctttcagagccttttaaacatcagaatggcatgtttttcttaaatgggcagatccttctattctcaaattgcaaagcaaaatgtagatggaatgaaaaatctgtaaggggggcaaacagcattctggtcatacctcttttattttcatttttatttttataactattgtttttattagagacagggtctctctgtgttgcccaggctgatcttcaattcctggccttaagcaatccacccgcctcagcctctcaaagtgctgggattacaggcgtgagtccccgcacccagactgtctcttttattttgaatgctaggttagggtggcatttgtaaataccatggtaaattcctttctctttttctctttcaaggtggatgaagacctgatcattgaagttcaccagttatttttctcaagaatgtgaataacaatgggatttgcactcattatatttttagaatggcttcgcataattttcagtgagtactttggactgttcgtatatcgactctttgccttaacagcttggtttgacttaagcctacactgggtttttctttgattttgcttgggaatggtttgataaaggaaaatggatgattgtataaaataaaactcaacatggaataaatagtaactagaagtgagcaaaatacttctatagaaataaacatcttaagatgactttttaaaaaattatcaagagtatcataaaatatagcagtacattagataatttgggatagtttttctatgaacccatgattacgtaaaattcttgaaacctctaaagaaatgtcctatttttaggttgggcgtggtggctcacgtctgaaatcccagcactgtgggaggcagaggcgggcagatcacgaggtcaggagttcgagaccagcctgaccaacatggtgaaaccccgtctctactaaaaatacaaaaattagccaggtgtggtggtgggtgcctgtaatcccagctactcaggaggctgaggcaggagaattgtttgaacccaggaggcggaggttgcagtgagccaagatcatgccactgcactccagcctgggtaacagagtgagactctgtctcaaaaaaataaaaataaataaaaataaacaaattaattaattttaaaaaagaaatgacctatttggaaaccaaattttctttttggaaggcccccattttgtgttcagtgaaaaattagttggcaagacatggacttctaatcaagttatttttgtagttgtgctcagaatatctgtggaatattagctgacgcagagtagatttttcacgttagatattggaataaagagagttgctccttatcacaaatgtatcatgtttctctatcggcatcacattgtgctaaacccactattgtgttaaatatataaactttgttgtcttttttttataactcaaatacttcaaaaggacagctctagagaaggtaaaatttcacaagactaaaccttgggatacccaaggtattacaatacaaagccttacatttacatggaaaagcaagaagtctggactgaaagctctgaatatatcaccaacaacagcaccactgtaggtggatccagggtttgcagctttgatcttgaggtgagggggcagccagtcatggacgaagcctgcatttgccttcatcgctgccatgccagcctcaggtggtcactcccaggagggtgcatggtgctgcctggaccactgtgcacacttgctggtcgccccccgggagggctcactgtgcacacctgctggtcaccccccgggagggttccctgtgcacacctgctggtcaccccccgggagggttccctgtgcacacctgctggtcaccccccgggagggttccctgtgcacacctgctggtcgcccccgggagagttcgctgtgcacacctgttggtcgcccctgggagggttccctgtgcacacctgctggtcgcccctgggagggttccctgtgcacacctgctggtcgccccctgggagggttccctgtgcacacctgctggtcgccccctgggagggttccctgtgcacacctgctggtcgccccctgggagggttcgctgtgcatagctgctggtcacccccctgcccccccccccaccagagctcgttgtgcacaccttgctggtcaccccccgggagggttccctgtgcacacctgttggtcgcccccgggagggttcgctgtgcacacctgctggtcacctcccgggagggttccctgtgcacacctgctggtcaccccccgggagggttccctgtgcacacctgctggtcgcccctgggagggttccctgtgcacacctgctggtcgcccctgggagggttccctgtgcacacctgctggtcgcccccgggagggttccctgtgcacacctgctggtcgccccccggagggttcgctgtgcacacctgctggtcgcctcccgggagggttccctgtgcacacctgctggtcaccccccgggagggttccctgtgcacacctgctggtcacccccgggagggttccctgtgctgcctgggctgctgtgctgcctacaccactgtgcaagcctgcaggccggcgcccagcagcaagaccctgctcacctaccctgagtgctgttctgcttgccaacagattcgagggatgttctgcagactctgggctgttgagaagtttgtgatccaatgacagatgtcccatttatggatccagttggacatttttgtggactggctttaaggtttcagaacacattaaatactgcctccccaaagttgaaactaactttcagggctgggagtagccttacatcctagccacccttcttcgtacagaaagcaatcccaagtggccctgaagcaggctagtgccgagtgtaaggagagcccggggcctgtgtgcctcacctttggcatgagtgaggctctgtgcacgtaagaaagaccctgtggacctgtccgggaggacctgggtgccagcagggatggccagggtgctgtgggatcactgttgctgccagctagtctctcagagtaaaatgggaaaaaccccatgacagggattggagctggtacttttgttgttgttcaagacagggtctggctctgtcacccggattgaagtgcagtggtgcaatcatggctcactgcagctttgacctcctgggctcagttagtcctctcacctcagcctcccaagtagctgggactacaggtgcgcaccaccatgccctgctaactttttttttttttttaagaaatggggtcttgctgtgttgcccaggctggtctccaactcctggccccaagtgatcctcccacctcggcctcccacagcgctgggactacaggagtgagctgtggcgcccagcctggagctgctgctgatgggaacacactgctcctgtctcctttaagatgggctgaaggggaaatggtagctcatgtaattttctcggcattggaggctgatgtctgttgtcacagaagtgtgggggattttgtacataggtgttctttattttgaagtggtcccaaatgtggagcgttgcctaggggttcccaagtgagcattacgtgagggctgtgctctgatatttctcagtgaaaacttgttcattaagatcattactggaatgaagtaaatacgtgtggaagttttgtgtctgactgtttggggagagtatcactaaaattaggcgttttgtgatgtagactctgtgtaaacaaggacattgtcatgagtatctcccagtaacacactgcagcctaccatggcttttggttagcattcctgagtggaaacgtctttgaactacacagatgctgctccacttacgatggcaatggcctctacgctgacaggacccccttgtgagaggggcattactgaatgcagatggctttcacgctctagtacagttgacccgttgtgagtcaggccattgtgagtcgggcctgtgtgctgtgctgtgtcctcagttctgggtccactctactgtgtgtgattccagagtcccagagcacagggtcccagagcacagagtcccagagcagtgagtcccagagcacagggtcccagagcacagggtcccagagcacagagtcccagagcagtgagtcccagagcacagggtcccagagcacagagtcccagagcatagagtcccagagcacagggtcccagagcacagagtcccagagcacagggtcccagagcacagggtcccagagcacagaatcccagagcacagggtcccagagcacagggtcccagagcacagaatcccagagcacagggtcccagagcacagaatcccagagcacagggtcccagagcacagaatcccagagcacagggtcccagagcacagaatcccagagcacagggtcccagagcacagggtcccagagcacagaatcccagagcacagggtcccagagcacagggtcccagagcacagaatcccagagcacagggtcccagagcacagggtcccagagcacagggtcccagagcactgcactcctcctctgctttgtcgagcagcggctgcctccctccttttctgatggaatgctctagagcaggggttcctaaccgaggactgctacccgtccatggcctgttaggaactgggctgcacagcagaaggtgagcagtgggagagtgagcgaagcttcctctgtatttacagccactccccttcgctggtgatactgcctgagctctgcctcctgtcatatctgtggtgcagtaggttctcagaggagcacgaaccctatcgtgaactgtgcctgcgaggatctaggttgcacactccttatgagaatctaatgcctgatgatctgtcactgtctcccatcaccccaagatgggaccatctagtttcaggaaaacaaattcacgggtcccactgattctatgtaatggtgagttgtataattattttattatatattataatgtaataacaaagacataaagtgtacaataaatgaatgcacttgaatcaccccaaaaccgtccccctgcccctgctgtcggtgaaaaaattgtcctccacaaaacccgtctctggtgccaaagaggctgggacccgctgctcaggaggttcctccctgtcttcctcagtccggcagcccggccttcatgtgactgtgactgctctttacgtgtggaagctcggtaataagaatgtcaacagaaaagactccaaggttaagttgatcatacttgggcttctgtctcggtctgtttatgcttttataataaaatatctgagactggataacttacaaacaacatcaatttatttctcacagttctggaggctggaagaccaagatcagggccctgcagctctgaggtctggggagggctgctctctgcctccaggatggccccttgttgctgtgtcctcacgtggtggaaggtggaagggaaaaagggcctgcctagttcccgccagccctttcataaagtcacaaatcccattcctgaaggctctgcccttgtgactcagtcacccctaagggccccacctcttaatactatcacattgctaatcacatttcaacacatgaatctggggagacatttggaccatagcggcatttgttgcttatagaagtgtgttctgaaaaaacgaaaaatgattttgacacaaaccaatacttttgaaatattctaatatgtttatttggaatatgcctcttaaagaaaactgaagggcctggtgtggtggctcatgcctgtaatccgagcactttgggaggctgaggcagaggattgcttgaggtcaggagttggccaccagccgaggcaacatagcaaaacccaatctccaaaaaaaaaaaaaaaaaaaaaaattagctgggcctggtggcagggacctatagtcccagctatttgggaggctgaggcaggagaattgcttgagtcccagagttcgaggcaacagtgagctgtgattgtgccactgtattccggcctgggcgacaacaaccctgtctctaaaaaacaaacaaaaagcctgaaatgtttagcttttcgttgattttcatggttttttctggcgacctcagaccttctcctttgtcatgaggggagattttcctgattttcctggtgtggtgttcccggggctttgtgcttcctttgagtggcctgggtgtccctggttcttggttactagggatcaaggattctttcactggctcacttgtgagctgttccctggggggcatggacaggcacacacggctctggaggtacctggtgggcagcctggcctccggcggccggtgccaccttcctttgcttcctgtaccccctggatttcgccagacctgcctggcagccgatgtcgggaagttgggcacagagctgagttctgaggcctgggacactgcctggtgaaggtcaccaagtccgacgggctccagggcctccagggcttcagcatctccatgcaggacaccatcacctaccggccgccgaccccagcatgaagaattcagccaagggcgagctcccggatgccaagagcccgtggtgggagatggacgaccaccgtggctgcagctcccaccccttccacgcggtgtggcagacgatggtgcagcctgggctcagagcagctcacatcacgtacacggcaccctcggctgttggggaaagaccgttaaagatgaggagacaaggccttcttccagggcgctgggccggcgtcctcaggcctgggggcccctctcgctggtcctgtgtgaggagctgaaaggtcatctaagggccctggcctcctccagacaccaagggaaccaagagaaccacacagaatcctcaactgtgcagaccattgaccttcgagaaattccagtcatctttttcctggtggatcctgcctgtagagggctgggaaaggctctagaaaagggatgtctcgtgatccaactgtggcttcggttccatatcttgatcaccgcagggcgggaacccaggggtccttgtgggcccacgggaggggcactccgctactcagacctagagtctggatgcttgtaggacctgggcaatgtttaagtttttacttaaaacaaaagaatcgtgtttcccgtctgtacttaggcactaactgctctttggcaccaccgagtacttgcaattatgttctacgttgggggtctgccacagaacagtaaaaacaggatgtagaacaccagaaaataaaaacaatggagtcgtccaacagtggagttactaggacaggacaaagaaattgagtacaggggcccttgctggctgtgaaagagttggtgaagtggagaaggaaggaaggagaaggaaggaaggcacccacactgcaccccaccagggggtcttccaaggctggcctcaccgatttcctctgtaccttgagagtgaaggcagctaatgcccaagggcacactcagctctttcaacagcgagagcaaggctctggggtttttaagtggacactgggatgcacggttatcatttacttagctggagagaggaagaaagcccatgattttggtctgatgtggtcggctggcccagcaggtatcagagctgacacagaaatagggattcattctcagccatgggctgctctttgtaccacacccttcggagtgttccccagcccctcaggcagctatcaagggacagcggatcccagaatgggtagagtagccctgacccaaaaccacacatggacaaaacagagtcggtttatacttattggtgagcactagcagtgtaccagggcaaggccagacaacacttttgcttctaattttataatttagcattaaagaacagtaaaaccaaagagaaggataggagaaaatcactgaggaagtgaaaagaagtgagagtccacataagagaaacctcacattgcatcacacaaacgaggctgcgcataaaatatgtgagggtggacagaggtacagggaaaccgtttctatcttaaaagttaagtgcatgtttgaaaaatggcaagcattctgcttttttaggaaaagaagtaaaatttattaaaaatatgacaattatgataagggacaagttctgaattaggtattatacagttttgccttgttttccatgcaaaatatatactttgaatttttgtgaattactagcttcacaagttcccggccctcatttcacgttcatcttcgttggcagtgcatcctgtggacgatgaacacaaatgcagctgtggccgtgcctggcctgtgtgtgttgaacgcgttcctgccgtgcgggagccacctacccagcggagcctcagagtctgagttctcaatgtgagcctcattttattttattttaaaatgcagttgtaaactttccccttaaacaattcagaaagcagcagtcttatgtggtcttttagaaaacaaactcaaatggaagagtgtccttgtatattaatgaacaaaatttacttctgaatgtgagtttgtttttggtgcttggaaccagcacttcatggaagagaacagcaaaaagtgagcagcagagagatggtggtccaaggagttaaaagttattttaatcacagcgggcaacttgggaagagtttcatggtgtcagaagtctatatgacaggaagggaagagagtacctcaaaggaggaaggaaggagagaagatgtggtaggtgaagttgtaatgtgatttaatgatggctgagaacttgtacaaaacccagaaaatgaagataaattagatatgaaggaagaaaaaggtcaaagatgagattgtaaaactgtgatacagactggctgaaattggagtttgggtcttaactgcccctccaaatccctcctccagtttgtgtgagtgtttgtcaggagcccggtttttgctctgccttgcctggccacaccgggccctgttttggtgctgaagtctggtgttggaaggctgcggcactcatagggtaagacccctgtctcccaatttccttcgtctctctgagctgcaatttcctcatctgtagaatgagacaatgacagatcttggatcagttgagcaatttgtttctcagattgttcaattgaagaatttgttcctagatatttgtactaaaacatactaaaactaaagtgagaacatcatattagttaacaggaaatcgttctgacatacgcagtaaaagggaatcggaagcatcatttccaaattgcaccacacattcagccaaaattggagtccgccgtcttgcgatgaacgcctcccatggtctcgcacttcgctttgtgtttgttcccacaggagtcaacattttgggtgtgtatgccaagaggtgacacgaaacagaagttgggatcactgtggttaacctgagcatgttggagaccaaggagaggctgatgttaatgttggatttttgtgaaaatgattcctttcaaagaaagacctgtgacagttggtaattgcagctaatgtgtttccacaaacagccattttgtgttggcaatcacaccgtccaccatcagggttgctgacaggagcagtgttcaggagtctcagacagtggattgtgctgcttcaggcgcctggtggctggagggtttgcaggctgccaggggcctcagctgaagacctggacccacaggacccacagaggcaaattgttcagttgactgtacagtgtgagaatgaaacattaattccccttctccacctcatatgagaaatgtgaattgtcttttttaaatttgggaatctgggttatagtatgtgtgagtcaattttttcaacaatgactttttttttggctc

SEQ ID NO: 204 - DNA, 1637 bp, Homo sapiens
cctcgccgtcgccccgtccacacgccgtcagcttcgcgtctgtcctcgccccgcccacctaccgcccccctcgggccttcgcccctccgccgtcgttgccccgcccgccttgcaccccgtcttcgtcccgccccgcgccgtggccccgcccacacgccgtcagtttcgcgtctgtcctcgccccgccctgcatcatcgccccgccctgcatcatcgccccgcccacacgccgcctgccaggcgtgagtcttcctcccgctctgcgccgtcgccccgtccacacgccgccaccctcgcgtcagttgtcgctccgcgcctgcgcccgttgtctccctgctcgctccgggtcccggcgccgcgccatgtgggctgcggcgggcgggctgtggcgctcccgcgcgggtctccgggccctgttccgtagccgcgatgctgcgctatttccaggctgcgagcggggacttcactgctctgctgtctcctgcaagaactggctcaagaaatttgcctcgaaaaccaaaaaaaaggtttggtatgaaagtccttccttgggttctcactcgacttacaaaccatccaagttggaattcctcatgaggagcacctcaaagaaaaccaggaaggaagaccatgcgcgcctgagggccctgaacggcctcctctataaggcactgacagacctgctgtgtacccctgaagtgagtcaggagctgtatgaccttaacgtggagctctccaaggtttccctgactccagacttctcagcctgccgagcgtactggaagacaacgctctctgctgagcagaacgcacacatggaggctgtcctgcagagaagtgccgcgcacatgaggcaccttttgatgtcccagcagaccctgaggaatgtgccaccgatagtgtttgttcaagacaagggaaatgcagctctagctgagcttgatcagttactggcagtcgcagactttggaccccgggatgaaagagacaactttgtacaaaatgatttcagggaccctgatgccccacaaccctgcggcaccacagagccgaccacaagctccagtctgtgtgggatcgatcatgaggcgctcaacaagcagattatggagtacaaaaggaggaaagataaagggctcgggggcctggtgtggcaggggcaggtggctgagctgacaacgcagatgaaaaagggaaggaagagggccaagccccgcctggagcaggacagctccctcaagagttacctgtcaggcgaggaggttgaagatgacctggacctggttggtgccccggagtacgaatgctatgccccggacacagaggagttggaggcagagagaggaggtggcagaacagaggatggccacagctgcggagcaagcagggagtagatggagaggctctgcccatcccacatttgcagggaaaagcattggcacgcaacgcagcatgtggcttcattgaggcagttgatggagttaaaccatctgctcttctgctacttcaacattttctagcttttccgtgtatctaaacacaatttgctacacaagtcactgtttttttttccatgcactgtgtgtaatttaaaaattaaatggccatcttatcacagattctcacaaaaagaaaat

SEQ ID NO: 205 - protein, 341 aa, Homo sapiens
MWAAAGGLWRSRAGLRALFRSRDAALFPGCERGLHCSAVSCKNWLKKFASKTKKKVWYESPSLGSHSTYKPSKLEFLMRSTSKKTRKEDHARLRALNGLLYKALTDLLCTPEVSQELYDLNVELSKVSLTPDFSACRAYWKTTLSAEQNAHMEAVLQRSAAHMRHLLMSQQTLRNVPPIVFVQDKGNAAELDQLLAVADFGPRDERDNFVQNDFRDPDAPQPCGTTEPTTSSSLCGIDHEALNKQIMEYKRRKDKGLGGLVWQGQVAELTTQMKKGRKRAKPRLEQDSSLKSYLSGEEVEDDLDLVGAPEYECYAPDTEELEAERGGGRTEDGHSCGASRE

SEQ ID NO: 206 - DNA, 1450 bp, Homo sapiens
gtgagctttcgctttgcaatcaaagctcctggctttccacttcacggactcggccctgaattctttctcactgtggtgccaaaaacctggacaccagctgtggctggcatcccacaggcatcggtagaccctcttgaaccctccagcaacagttcctgtatcatgatcagatgccgtcttcagatactagggaagtttgattacttctaaattccccagataaggagttttgcctccagatggcctgtttgatggtcaccaggtggtcttggctcccttctgaattgcccagaaaaaaggtttggtatgaaagtccttccttgggttctcactcgacttacaaaccatccaagttggaattcctcatgaggagcacctcaaagaaaaccaggaaggaagaccatgcgcgcctgagggccctgaacggcctcctctataaggcactgacagacctgctgtgtacccctgaagtgagtcaggagctgtatgaccttaacgtggagctctccaaggtttccctgactccagacttctcagcctgccgagcgtactggaagacaacgctctctgctgagcagaacgcacacatggaggctgtcctgcagagaagtgccgcgcacatgaggcaccttttgatgtcccagcagaccctgaggaatgtgccaccgatagtgtttgttcaagacaagggaaatgcagctctagctgaggtggatgaagacctgatcattgaagttcaccagttatttttctcaagaatgtgaataacaatgggatttgcactcattatatttttagaatggcttcgcataattttcatgcatcctgtggacgatgaacacaaatgcagctgtggccgtgcctggcctgtgtgtgttgaacgcgttcctgccgtgcgggagccacctacccagcggagcctcagagtctgagttctcaatgagtcaacattttgggtgtgtatgccaagaggtgacacgaaacagaagttgggatcactgtggttaacctgagcatgttggagaccaaggagaggctgatgttaatgttggatttttgtgaaaatgattcctttcaaagaaagacctgtgacagttggtaattgcagctaatgtgtttccacaaacagccattttgtgttggcaatcacaccgtccaccatcagggttgctgacaggagcagtgttcaggagtctcagacagtggattgtgctgcttcaggcgcctggtggctggagggtttgcaggctgccaggggcctcagctgaagacctggacccacaggacccacagaggcaaattgttcagttgactgtacagtgtgagaatgaaacattaattccccttctccacctcatatgagaaatgtgaattgtcttttttaaatttgggaatctgggttatagtatgtgtgagtcaattttttcaacaatgactttttttttggctc

SEQ ID NO: 207 - protein, 172 aa, Homo sapiens
MACLMVTRWSWLPSELPRKKVWYESPSLGSHSTYKPSKLEFLMRSTSKKTRKEDHARLRALNGLLYKALTDLLCTPEVSQELYDLNVELSKVSLTPDFSACRAYWKTTLSAEQNAHMEAVLQRSAAHMRHLLMSQQTLRNVPPIVFVQDKGNAAEVDEDLIIEVHQLFFSRM

SEQ ID NO: 208 - DNA, 864 bp, Homo sapiens
acacgccgcctgccaggcgtgagtcttcctcccgctctgcgccgtcgccccgtccacacgccgccaccctcgcgtcagttgtcgctccgcgcctgcgcccgttgtctccctgctcgctccgggtcccggcgccgcgccatgtgggctgcggcgggcgggctgtggcgctcccgcgcgggtctccgggccctgttccgtagccgcgatgctgcgctatttccaggctgcgagcggggacttcactgctctgctgtctcctgcaagaactggctcaagaaatttgcctcgaaaaccaaaaaaaaggtttggtatgaaagtccttccttgggttctcactcgacttacaaaccatccaagttggaattcctcatgaggagcacctcaaagaaaaccaggaaggaagaccatgcgcgcctgagggccctgaacggcctcctctataaggcactgacagacctgctgtgtacccctgaagtgagtcaggagctgtatgaccttaacgtggagctctccaaggtttccctgactccagacttctcagcctgccgagcgtactggaagacaacgctctctgctgagcagaacgcacacatggaggctgtcctgcagagaagtgccgcgcacatgagcttgatcagttactggcagtcgcagactttggaccccgggatgaaagagacaactttgtacaaaatgatttcagggaccctgatgccccacaaccctgcggcaccacagagccgaccacaagctccagtctgtgtgggatcgatcatgaggcgctcaacaagcagattatggagtacaaaaggaggaaagataaagggctcgggggcctggtgtggcaggggcaggtggctgagc

SEQ ID NO: 209 - protein, 242 aa, Homo sapiens
MWAAAGGLWRSRAGLRALFRSRDAALFPGCERGLHCSAVSCKNWLKKFASKTKKKVWYESPSLGSHSTYKPSKLEFLMRSTSKKTRKEDHARLRALNGLLYKALTDLLCTPEVSQELYDLNVELSKVSLTPDFSACRAYWKTTLSAEQNAHMEAVLQRSAAHMSLISYWQSQTLDPGMKETTLYKMISGTLMPHNPAAPQSRPQAPVCVGSIMRRSTSRLWSTKGGKIKGSGAWCGRGRWLS

SEQ ID NO: 210 - DNA, 1413 bp, Homo sapiens
acacgccgcctgccaggcgtgagtcttcctcccgctctgcgccgtcgccccgtccacacgccgccaccctcgcgtcagttgtcgctccgcgcctgcgcccgttgtctccctgctcgctccgggtcccggcgccgcgccatgtgggctgcggcgggcgggctgtggcgctcccgcgcgggtctccgggccctgttccgtagccgcgatgctgcgctatttccaggctgcgagcggggacttcactgctctgctgtctcctgcaagaactggctcaagaaatttgcctcgaaaaccaaaaaaaaggtttggtatgaaagtccttccttgggttctcactcgacttacaaaccatccaagttggaattcctcatgaggagcacctcaaagaaaaccaggaaggaagaccatgcgcgcctgagggccctgaacggcctcctctataaggcactgacagacctgctgtgtacccctgaagtgagtcaggagctgtatgaccttaacgtggagctctccaaggtttccctgactccagacttctcagcctgccgagcgtactggaagacaacgctctctgctgagcagaacgcacacatggaggctgtcctgcagagaagtgccgcgcacatgaggcaccttttgatgtcccagcagaccctgaggaatgtgccaccgatagtgtttgttcaagacaagggaaatgcagctctagctgagcttgatcagttactggcagtcgcagactttggaccccgggatgaaagagacaactttgtacaaaatgatttcagggaccctgatgccccacaaccctgcggcaccacagagccgaccacaagctccagtctgtgtgggatcgatcatgaggcgctcaacaagcagattatggagtacaaaaggaggaaagataaagggctcgggggcctggtgtggcaggggcaggtggctgagctgacaacgcagatgaaaaagggaaggaagagggccaagccccgcctggagcaggacagctccctcaagagttacctgtcaggcgaggaggttgaagatgacctggacctggttggtgccccggagtacgaatgctatgccccggacacagaggagttggaggcagagagaggaggtggcagaacagaggatggccacagctgcggagcaagcagggagtagatggagaggctctgcccatcccacatttgcagggaaaagcattggcacgcaacgcagcatgtggcttcattgaggcagttgatggagttaaaccatctgctcttctgctacttcaacattttctagcttttccgtgtatctaaacacaatttgctacacaagtcactgtttttttttccatgcactgtgtgtaatttaaaaattaaatggccatcttatcacagattctcacaaaaagaaaat

SEQ ID NO: 211 - protein, 341 aa, Homo sapiens; identical to SEQ ID NO: 205

SEQ ID NO: 212 - DNA, 1805 bp, Homo sapiens
cttcgattgacaatatatacacacatacatacgcatacacacacacatatatacgcgcacgcacatgcacacatatacatgtccacacacatgcacacacacgtacatatgcacacatacacatgtacacatccacacgcgcccacacacacacacacacagacgtgtcctcgccgtcgccccgtccacacgccgtcagcttcgcgtctgtcctcgccccgcccacctaccgcccccctcgggccttcgcccctccgccgtcgttgccccgcccgccttgcaccccgtcttcgtcccgccccgcgccgtggccccgcccacacgccgtcagtttcgcgtctgtcctcgccccgccctgcatcatcgccccgccctgcatcatcgccccgcccacacgccgcctgccaggcgtgagtcttcctcccgctctgcgccgtcgccccgtccacacgccgccaccctcgcgtcagttgtcgctccgcgcctgcgcccgttgtctccctgctcgctccgggtcccggcgccgcgccatgtgggctgcggcgggcgggctgtggcgctcccgcgcgggtctccgggccctgttccgtagccgcgatgctgcgctatttccaggctgcgagcggggacttcactgctctgctgtctcctgcaagaactggctcaagaaatttgcctcgaaaaccaaaaaaaaggtttggtatgaaagtccttccttgggttctcactcgacttacaaaccatccaagttggaattcctcatgaggagcacctcaaagaaaaccaggaaggaagaccatgcgcgcctgagggccctgaacggcctcctctataaggcactgacagacctgctgtgtacccctgaagtgagtcaggagctgtatgaccttaacgtggagctctccaaggtttccctgactccagacttctcagcctgccgagcgtactggaagacaacgctctctgctgagcagaacgcacacatggaggctgtcctgcagagaagtgccgcgcacatgaggcaccttttgatgtcccagcagaccctgaggaatgtgccaccgatagtgtttgttcaagacaagggaaatgcagctctagctgagcttgatcagttactggcagtcgcagactttggaccccgggatgaaagagacaactttgtacaaaatgatttcagggaccctgatgccccacaaccctgcggcaccacagagccgaccacaagctccagtctgtgtgggatcgatcatgaggcgctcaacaagcagattatggagtacaaaaggaggaaagataaagggctcgggggcctggtgtggcaggggcaggtggctgagctgacaacgcagatgaaaaagggaaggaagagggccaagccccgcctggagcaggacagctccctcaagagttacctgtcaggcgaggaggttgaagatgacctggacctggttggtgccccggagtacgaatgctatgccccggacacagaggagttggaggcagagagaggaggtggcagaacagaggatggccacagctgcggagcaagcagggagtagatggagaggctctgcccatcccacatttgcagggaaaagcattggcacgcaacgcagcatgtggcttcattgaggcagttgatggagttaaaccatctgctcttctgctacttcaacattttctagcttttccgtgtatctaaacacaatttgctacacaagtcactgtttttttttccatgcactgtgtgtaatttaaaaattaaatggccatcttatcacagattctcacaaaaagaaaat

SEQ ID NO: 213 - protein, 475 aa, Homo sapiens
MYTSTRAHTHTHTDVSSPSPRPHAVSFASVLAPPYPPRAFAPPPSLPRPPCTPSSSRPAPWPRPHAVSFASVLAPPCIIAPPCIIAPPTRRLPGVSLPPALRRRPVHTPPPSRQLSLRACARCLPARSGSRRRAMWAAAGGLWRSRAGLRALFRSRDAALFPGCERGLHCSAVSCKNWLKKFASKTKKKVWYESPSLGSHSTYKPSKLEFLMRSTSKKTRKEDHARLRALNGLLYKALTDLLCTPEVSQELYDLNVELSKVSLTPDFSACRAYWKTTLSAEQNAHMEAVLQRSAAHMRHLLMSQQTLRNVPPIVFVQDKGNAAELDQLLAVADFGPRDERDNFVQNDFRDPDAPQPCGTTEPTTSSSLCGIDHEALNKQIMEYKRRKDKGLGGLVWQGQVAELTTQMKKGRKRAKPRLEQDSSLKSYLSGEEVEDDLDLVGAPEYECYAPDTEELEAERGGGRTEDGHSCGASRE

SEQ ID NO: 214 - DNA, 83413 bp, Mus musculus
  misc_feature (1)...(83413): n = A,T,C or G
ttgtgctcatgcgcccagacagcctagtaatggctgcgcccgaggggtcgctgagaaaacggaaggtcgggggtgcggagcacagtccagcgtcgcaaccttctctggctagagatcccgcagattctccagctcggctgcacacgggcaccttctggctgactagaatcgtgctcctgcgggccctcgctttcatttactgtgagtgtccggtgggagcgggctgttgccggcatcctgtgacctggtcccaaaccctaattgcttccggactcccgtttgtccctctataggcttcaaggatcctgcactaaaaccattctgcccttctgtgagcttccggaccccgccttctcacctcccactcagtggctgcttaaactttatgtcaggtccctcctcggcgtgttcctgggaccccaccccaacccctgcctctccacagccccacttagcacgtgtaagaggcgaaggcagtccccatgcactccctctgcctgcaccctgggaatggcgagacgatgctaattctattcctgttccgaagccctaggggagatgacggtctttagcctgcaacttagacctagcctcgccccttttgccttctctcagtgggtcccccactggacccaaaggttgtgcaacagctccaacctgacctgcttggaagggcacccggcagagggcccaaggatctagccagatttcactggtaggcaagaagtgaggttcaaccaggtcagctctggaaggactccaaggttctgcttaggctctgcagacctttacagtccactgcagcatcccatacctacctgagcctaaagagtcttagcctccttcacttcaggaaaagcggaatcaaaggtactggcaggcaggcaggctggtgtcccccatacacaccgctttttggttttggtttttgttgttgttggtttggttactgtttgtttgttttttaaaacagggttgctctgcatagtcctggctgccctggaacttgttctgtagaccaggctggtcttgaactcctcacagagatctgcctgcctctgcctccagagtgctgggattaaaggtgtggaccactacactgggcactgatgtcccctcagctcctggcctgttattgctacccacagtagtgggccaggagatgtcatatagaaccagttccaaacaactcactatagtgacacctgaacccccagctgaggctgagcgcctgtctactcacactgggcctgccctgcctgtggccatgagacggagctcaggcttaaaacctgtggacatctgtctggtgggagtaactgtgggttccaaatcctcaccctaattcctaatacctagggggtggcccagtgactatgtggacactggtggccatggcccagccttttagtaaggaaggcaaaactgagtgctaagtaagccccagggcccaggacatgccaggctcgtgcatggtgtaccttcggcatctttcagaagagtcatcttagactttgggctgtgtccatgtggctctcatgtggagagtcaggctcatgtgcatttttgtgtgacggactggctacttccgggtgcattggagaactggagttcttaaccaaacggtcccgtgtgtttgcctgcctgagtttccacttattctctctaaagcgggtggaaaaaactatctaggcttgtgctgttttatcccatgcaatactaaggaattctgggaacgttggtactgacacactcagagcaagatgaagggaatctacaggagggatagaattggaaggtacagtggcacctggtggctttgtgctgaagacacttggcagataggctcttgggctctcgggtgggcaatgtcacctttggtcagtataggatctagcatttcagcttgacacaaaaggctgtgagctcaggccgggtgtggtggtgcacgcctttaatcccagcactcgggaggcagaggcaggtggatttctgagttcgaggccaacctggtctacagagtgaattccaggacagccagggctatacagagaaaccctgtcttgtttcaacaaaacaaaacaaaacaaaaaggctgtgagctcctcactcaggcagatatttccagtggctgcttagtgtgtgtgggcaatgtgtgtgtgcaatgtgctttgcttccttattgcttccttatcccatcttcctgtatcatggtttcatgattcctggctgctggataaccagcagtcccagatgtagtttcttctaaaaggctctggacctcactggaccatgagctattctctgagatcccttcaaaataatacttgtccagctagttcacctgaatgttgaattggcactgcttctactatagaaagacttgtaattaaatacagtccagtgcattctgaggctacccctcttaggagcatgggatctacaggtctttccttaagcacaatacatacgtccaaagcacctgttgcctataatctttgcacttgaaaggcagaggcagggagtctggagtttgagcccagcctgagctacataatagcaaggtcctgtcaaagataaataatgactttaaggaaggtgtcgggtcagaagactgtggatgagtaacagtgctgtgtggtcgccagtgagtcctcaaagccagccccagagcctgcctcttagcttcaggcttgcacactccacctggtgttgtgtgactccgatcacagcagtcccaggttgcacccagatggcaagggcgagctccccacagggcaagtgcgcatggcttcatctcccagagcggctaccacagggaagccatggaagccagggcatgccagttcttgagagtggttttcctgtagggattgccccatccgcttgaagtaaagattcactcatcaccctgatacctggcctctagcccctgagaatgctcaccctgtgtatcaactgccgtgcaccttgttcatgctgtgcacgtgtccagtgacaccactgttactgacaaaggagagaatgcattcaggggttggcttagtaagcgaacggcggtgagtgacaagcccttggctttagctctgctgtctattgacaacacccagggcctgtgtattttaggcaccaggcttgttcctggacaatgtctttcttgaagcccaaggaacacccaggaggctggagaggggacactgggcaactgatacgatctggctactgctgctcttgggaagggctgggctctggacatgaatacgcacggcacaggacttcccagcctcagctgggggaccgcagtgtccggagcgtggggtagttctgctcagcctatcactctccccaagtgtgatgaggaagctgtatgagagcaagatagttccactccagggaggtttaggtgtgtgtcccaagcattggctgtatatgttccttgtatttgcttggtcacctttcctcatttacatatggtctggttgacctcttagctgaggagagaaaacagaaagtgccctcgatagccatgaactggtcatttggtgttttgtctaaaacctttgctgctaaacctgtgtcacataggctgcccctcccctcgcccttcccttttggtttgttgagctctgtgagtgctgggatggcaagcatgagccgccaggcacagcctaggtttccttttgtatttgcttctaattgtttggttttatctgtaccgcattcaggcagtggacctcttgaattaatttttacgttaaggtgttgtttgtctgagaccatctttttgcacatggatttggtattagcttgcttaggggcctgggtatggatggaggtgcattttgctcaggttttgttttggcttggttttggcaggaggagtatatataccatggtggtagttctggtgggcactttctgctaagtcatcttttaatggatagcattgtcataacaatagcaagcccacccttatgcaacaaggggctagggtgatggagtggggctagtctagagatttcccactcggctccacggctttctgatcctggagcactgccacactaaggaataaggaatcttggggtcaggtcacaattaaactgtagcagttggtccagctgcagctgttgattgtatttcctcagcacattgtctttgcaactttgtgagtctatgtgaatccactgcttggcctccgctcccctccaccgatttctgtttctagttctccttctcttctccttctcctccttttccttctctgccttccccatcttcttttttttttcctttttctttcttctttctcattttcttcttcatttttcttctctcctcctttcttcctcctcttcctcctctttttcttccttctccccagttctccttatcttgtgtcttagttagggttttagtgcttcgaacagacgccataaccaaggtggctcttataaagacaacatttaattggggctggcttacaggttcagagattcaatccagtatcaaggcaggagcatggcagcatccaggcaggcatggtgcaggaggaactgagaggtctacatcttcatctgaaggctgttagcagaatactggcttccagccagctaggatgaaagtcttaaagcccacacccacagtgacacacctactccaacagggccacacctccaaatagtgccactccctgggccaagcacattcgagccaccacatcttgattagtgtagatttgtccagtgaatcctggagatggtcaccctgaatgccacaagtctcttcctcttctgattacattggctcttctgtttccattacagttcatgtgtgctgtcagaatcagtccgtcaggacctacagacagactctgtgtgtgtgtggctgagatggttgattgtggtttcactgatatgcgcagctcttcgaggacacggctgtggcttagctcgccacaccctccatcacttctctctttctcgtgtgatttacagtttcccacagatggagccgtcttacatttattagatttgtacttgtactatttccagttgcttttaaacctttttttttttttttttttttttttttttttgaggcagggtttctctgtatagctctggctgtcctggaattcactctgtagaccaggctggccacgaactcagagatctgcccacttctgcctccccagtgcaggctttaaaggtgtgcaccaccattttttcttttcaaacttagatgatgctgttcattgcttgtgtataagagcacagtcggctcttctgttctgaccttgtgacccatcccatgatcttgattaatttaccattagtgctaacggttgtcatttttgtcttgtttttgtaagttctttgggatcatccacatagaccatcttttgctaatgaagacacttttgcatcccccgtctgtgtgtgtgcctcttaactctctcctctctcataccttttcctttgctttattctactcctccccaaccctgcactaggcacacatagctgaacacccggaagcagtggaagtgccctgtgaaagggaagatcctaggaatggactctgagctcgggctgtcacaatctcacgagtagccaaggctgctggcccttgccgttgcctgtttgtgacctgccctggttagtgtttattgtcaacttgacctggaaagaaggaattttgggtgaagaattgccccttcacactgagctgtgggcgtgtccgtgggacattgatggtaatgattgatagctcgtgcaggagtacccagcccactgtgggcggcaccatcccaaggcaagtggtcctgggctacgtgtgagccagagagcaagctagtagtcagcattgcttcacagtttccgcttgagttcctgctctgacagccctcagtgatctgtgacctggaagcataagccgaaataagccatttccgcccttaagttggtttttaagttgctttaagtcatggtgttcatcacagcaacagaaagcaaactggaacatgttatgttatgttcgtggctccatctcttcctcgtatgtccttatgaccgtagggccattatctcttcataccctgctcacctaagggcctcttctcctgtacccatggaggcctgttcttgcctgtgtccccttgggactgtggaagttgatcttattcgtgtacacttgtgtccatgggggcccattcatgcccacttgtctcacctgtccctgtgtcacccagccactagcatctctttatcccacagggacccagttcctacttgcatccctgagcccatggaggggtggtctgaccctactcacaactcttgcatttgtatgtcttccagttgtggcctttttggtggcattcaatcagaacaaggccctcatcggtgaccggggcctgctgccctgcaaactgtacctgaagaatgtccaggagtacttccagggcagcactggctgggctgcctggacctatgcaccaaccattatgtggttgttggactggtcagacatgaacttcaacctggacctcattgctcttcttgggctgggcatctcgtcctttgtcctggtgaccggctgtgccaacatgatactcatgactgccctctgggccctctacatgtccctggtcaacgtagggcagatctggtaagtagagcctctcccctagtcctttggacatatacctacctcctggccactgaagtgccacagtgagcttgttcaggggtgtatcacaaaatgctaggccttggcagaggctgttgtcaccattcagccaaactctggcttttctctttggggatagaatgtgtgattgtacttagagatctgtgtccccttgagaatatgctgccagcctgcttgagccgtgagttttgataagatggagacagagatcattgggcagctggtggacacactgaggtcagaaggactttgaaacatcgcccttctacccttaccaagaagagtctttgcagcctatgccagatattacatcgggccatggctcaaaacttgccttaatggggccctgtaggagtagaggaggtgttggagttcagaggatctccaagggcagagagtttatggaccacaggaaggcgaaatctgtggatgtggcaagcattatcagtgtgtacatatgggaagtgggtgagggcatgggatctgtactgattgtttttctccttgctgtgacaaaactcctcacaaaagcaagtaagaaagtacgcgtaaatgtacatgcacctacacacacacacacacacacacacacacacacacacacacacacagagagaagcatgcgcgctgtggttacaaacacatacatccgtacctagcttttactcaggtcctagggatttaaacttaggtcctcacatagtgtggtttttttgttgttgttttgttttgttttctgtttttttggttttttttttttttgaaaaagggtttctctgtgtagctctggctgtcctggaactcactctgtagaccaggctgacctcgaactcagaaatccacctgcctctgcttccggagtgctgggattaaaggcgtgtgccaccaccgcccggtacatagtgtggtttggggcttagctatgagtaggagcgagtaagtgtgctgttcacttaactatctcctctatgaacatgtagtaccgtgcacaaaggatggactcactgcctccagcatctgtggttaaaagaaaaaagcctcaagcattcttgttttatctgagagcagtgtgtatctctgccaggcagggcattacttgacttagtttcagaagcagggggctgtcggcctgctcagtgagtccagaccccacagcaggtctcaggctctttcctttcattagcacacattgcattcagctttacttcgtcactgagatgtagctcagacactgtaatatctacttaatgtgcgtgagtcaagcggtatacgcctttcatcccaccactcagggcaggcagcaagttcaaaatgaatctgggctacacagtgagttgctggacagcctaggctacagagcaagactctgtctgaaattggagtaagacaaaccaaaactaaactttacaagtcagtggctttatgtattcagggttcacaaaaccttgctataaagtttaaagcgttctcatctcaacaagagaaccctgtatcttagcccatgaacccactcctccaatggctcctggtaaccaagaagcgctttacatttacacccatggtgcttaaatgccccattgtttactgtggacagaatccctgagtgtgtgtttttatgtgtctggcttcaccctccgcatggtgttctaggacccttcatgagtagcatgtgccagtgtgtctttctttcacaataaaataggtgtgcatgtttggtatggatggcattgggagtggggacactggacgtgcagttcagtgacagagcattgcctagtgactaagttgttgttttattgctacaaagggacactgtgaccaaggcaaacatttgattggggccttgcagtttcagagggttagcccattatcatcacgcatgcaggacaggccctggagcagtagctgagtgctatatcctgattggtaggagagagagagcctgacctggcatgggctgttaaaacctccaagctcatccccagtgaccccattgacacacttcctccagcaagaccacacctcgggttttttgggttttgttttggtttggtttggttttggttagtcaaggcagggtttctctgtgtagtcctggctgttctgaaaatcatggtcttgcactcagagatttacctgctgcctagcgagtgctgagattaagttatgcaccaccacacccactgtaacaccttccaactcttacaattctttccaatattgacaccctctggtgacgaagcattcaaatacatgagactttggggcggggcattctccttcaagccagcacacccatcactgtgcagcatgatgggtcccagtatcagagtcccaggcatcttcccactgttactctaaagtaaaggacactgcggcaacagagcctaccatgttcctttgatgttacttctcttccagtaatctgtgtcaagacacccaagcaccccagatgtatcctggggtataacatttgcagtggcagccaattagatgtatcctggggtataacatttgcagtagcggccaattagaatcttgcatctgctcactccacagtgtcttttgctggcctcttggccctgtctcccccagctttgcctactcagtgcctagcagctgatcctcttggaggtgtgtcctcccgggccccacgctgccccaagctgccccaagctcacaagtgggttttgctcagtgggtaagcataatggtttaacgtataaaaccaagccagagccttaatgttctttcttttttgtgtgtgtttcaggtattcttttggtaagtgacaatcatgcagaaacaaacctgtgtgagggtttgccttgtgtgttggggtatgtatctccgtgcatttcggatatgggggcttatctcatgtttaaatccttactgctggctcttggggtgtgggcatggctctatagtttgttagcaggctggcaagtcctgacattggggctctggtagaagtgagcagctagggtgggttgtgactggggcctcccaggtgaggcacagcactggataataacagagatgttaggctggagagatggttcaggcgttatgtgcacttagtacttctgtagaggaaccaagtttggttccaagcacctacacagaggctaacaaccacttgtacctccagctccaaggggatccagtgtcttcttctagcctctgcgggtgtgtggtgcaaagatatgcatacaagcaaagcacacaggcacataaaataaacataagtcaatcttgaaaagaaggtggctggtgtgatagcacacgcctttaatcccatatagtgagaccccagctcaaaaaaaacaaaataaagtaatggcagctcccgagggcagggttggtgcggctggtcaggacacaaaggtcctgtgtgtctcagggtgtgaagcaagatgtgcatagctgcttcagagaaccctttcttctccagtgcttcagggaacttcagggaataatggtagttagttattactaaggtgatatctagagaaggcatttgggagaagtactggaggcccctccccagtgtgcatcttagagtcctgtggcccactgagcggcacggaggtgtgttcattggacagggcaggcagtgtagcaagtacagggcactggactagtaaagcatttggatgctcccagcccacaccagttgataatcactagcgagtgtctgaagccagcccccaagtggccaggaagctgagagcctggggacttacacgtaaggtggcccaactctagagtcccacaataaaagacaacgatgctttgtaaggggagagtgagggggtgggggagggtgtctttactgacctgcagttctacccaaggacgccacagggggcaccttgaccccactgcagttacccatgctgtgcttgtgtgtctgggccacaccctgcctatcctatgtggcttcagatgtgaggcctgagtcccaagtcactgtcgggtctatgttcttagtctcacctactgagtgttccctgcagttggagaaaaggggatccattggcaaatgcaaggccatcagtctgctgccacagtaaatgtttcccctcatttttagttcccgctgagtgcttcccctcatttttagttccctgagtagacagatacctgtgtatctgctaaactgttcagctgagctgacagcgtctttcccacacagctgagagcaggatcactgtggctggtcgggacacaatagtccaggatgtttgtatctatttcttatttctgtatcaacatcccccagggaaccctgtgttctccagtgcttccgggaacaaaccctcttttcttaatgaacactgcttatctgaaattgcaacaagattacttttttgtctggttatgaatatggaaaccttgaggccttgactcctgtatctgtatgggatccttgctccttggtgtagagggttctggcaatgactggtaaaagtcaagtctgaggcactctgtgtgctcggtgccagcactctccggagctgtggctgtgtcacaggacaggcacgatgagaagtagcaagtgttccacacatcttcaggccactgcttggcagtggctgccccatcttggaatgtgggcagtggggtatccccggggttccaggcacatagcagggaagggggtaagatacaaaagaacttggaattcttatgaacagcagaagaccttcaggtggtcgcctcaggaacttagaggaaaacccctgcctagtcaccattggtctgtgtccttgactgctggcacttacaagctctatcttacctcgtggtacagggacctggaagctggtggtgctgctgtatccctgccttccatttctcttgctgtcacagagaacaaaggcccatctgggtaggcagcacagggcaggcagaggtgcaccaggtgaagacttttctagaagggctggagtgagctgcagccgggaggtgatggcgacccacacctttgatcccagcacttgggaagcagaggcaggcagatctgtgtaagttcaaggccagcctagtctacagagtgagttccaggacagccagggctacacagagaaaccctgtctccacacacacacacacacacacacacacacacacaaaggaaaaaaagaacactggctgctcttctaaagcacctgggttgagatcacagcacccacttaggagctcacaaccataaataactccagttctaggggatcagcgccctcttctggcctctatgggcactgcgcacacatggaacacagacatataggcacaatgcccatatgcacaaagttataaagactcttctggagtttctcttctctggcccgatgttgccacccacaggagctgcagatctcccagtgagcaccgtctgtcaacctggctgtgtgattttgacagggtttctctgtgcagccccctggctgtcctggaactcactctgtagaccaggctggcctcgaactcagaaatccgcctgcctctgcctcccgagtgctgggattaaccacgctcggcttctggctgtgtgatcttaattgtaccagtcatctctgttttacatggaggcttcagtgaactaagagccaaaatgtagagctgcgggctggtagctctctgtggggctttatccccacgaatcgtgatttgacatgcaccgagcttccggagccccgtacagtgtgctgctcactgtgtgtagtatgtctgtatttgtatctatttgtttattcatttcaagaaagaagtcttacctatctaccccatactgttttcaaactccttatcctcccgtttcaccctaccaaatgccagtttacaggcatgcaccaccatacccagcttaacatgaatatattatattagttaaaactgaatcaatacaaatacccatgggtcaataccaaagtcccaccagccctcactggagaacaaggaagctctgagatactcaaaggcattaggtctagaagggtctgtggacagggcctcgtgggggacaccctccgttgtgctagcaacagggtcccggtcacctctgttcttgggcaagtgtgagcagtgatgtggggggactggccttttgtgtacacatcaccattgccagtgaaggattctgggtaaggaggccctgcagtgaggtctcatttcaggtgccctcctatgtctcagacaatcacagttccccaacacactcaagttttttattagtaattttttgctgtctctctgagaggccccccttagctgtggcagctttgagttcctctctgtcacctgtcactatcccagtactatactctcatttctagacaaatgcagttgctgtgtgggctgcaggtgagtggtgacttgtctgggcaacatgcaggtcagagactgggttggaaaagaattcctcctgtcccctgtggatgtaggaaactcctgtccccgagggactgtgattgctgatgtcccgtcacctggttctctagaactgcagtagccttccaggctgagccgcagggcttcaggtctcctgaaggacagggctgctcctggcaggcaccatcccagcacactctgtacacgctgtgactactgtccccagctcagtcactgtccctggcatgggccactgtctcccctgggctccaggccattgctgagctctgtgtgcactgggaagggtttagagagggaactgcaaccgtatctctgggtcctgagtcctgtactctgcctgcaaagtttcctcagtcttgttcccagactgactcctaggcatggcccgtgggggacagggagcaacaggatgactgctctggctccaagggctgtcctgggggagatggcttgtgggcatcatgctagaggggctgcctgctgataggactggggagggcctgggagaaaacagcatgatagagtccagccaagtagcacagcctcctccagctaggctcttgggtgatagatactgtaaagtcctcaaggtccagataggcagtcaggaaatgtggcacattccggaagcctccggagggttttagaccacaaaacccttttgtatgtcctttgattgtggtgaatggggtataggccttgcctcccaagcgatgcttgggcagtgtaggccacactccacattctcgctgcctgagccccttggcacactggtttttttttctggagagatcacactatctctggtgactgtaaggaagggagaccaggctgctctgtgagtatgggattgtgagaagccctgtgccttaggggagcacacaggtttggggtaactagaggcctttgatgtcctctaggtcccaccaccaccactcaggccagcacgaatctaatactctaaggatatcccaggtatgaaggtccctgggtcgcagagaaggattctagaagaccctttgccatctctgtttcggtccaacatggtcaggataagaaccgggcaccttagcgtttggatgagtccgggttccttcatttcagtaagaagctgtgcctcaccagctgaggacagaagttctgctgtgtcagcttcccccggcagtgtccggatgcagggatgcacagaggcacttgggcatttgccttggatcatgtgcaacccattagctgtaaacacaccgtgagctcacgtgaggacagctttaaagcatgtaacccgagaaagcttcaagccagtgggtaagtcacaggggagagaggccaggggtctgcaggagcagccatggctcccatgcagtccacaagggcccaggcctcacggcagcacgcacggcaggaacggtacccacagattatctcgtgagttctgtgcttttccatatcttttccatagtctaatgattcagggagctttgtccatgccaagtggagagctcggtctgctgtcaggccatccttggcaggccctgggccacatgggatgtttacacgccggggacactcgtgtttcccttcgtggcagcgcctcctgccagccgttgtgaattaaatgctccatgtgacccttcacccttgccgctcttaaattcaagctttaaaaacagcttaatgaggggtttactggcccaattggaagtttttattaagacccattagtgagggagcagagctgcctgcaggaagtgattagcacggtggccaggcccagcaggttccatgaaactgtttccagacctgtggctgacactgcagcggcctgcatgccctctgctgcagtttacagtctttcgctctgctcccagccccagtgctccaggaaagcagtttccttaattaagttatcctcacagtcagcggcagcctcaatggccaggccagccttaagcgcgggagctgccgtcagcaagccaacctaggtctccttcctagggcctgtctctattgacttaacctcttggtaagtcactaggggaggaccaacctcacagagctcatttcctgaaaatgtcaactcaggatgacagcaggccctctgtcccagtaccatgtcccatcacatccttcacgagagcccagaaaaatctggttccagcacgggaggaccactgtgtggcatgttggctgtagactgcctcagtcaaccatttggtaggggcctagggtcagtgtttacccaaatggggacatgagatcagattctcacacacacacacacacacacacacccctcccctgtgtatctctcccttgctcccttccttccccctttttctgatttaaatctagtgaaaaaaaaatcactaattgaatctgaaagagaatgtttccatgtgggatggttcacgcctttaatcctagcaggctggagactgaggcacaaggagtgctgggacagtttgcagagtgagaccccgtctctaattgcctagcatccggaagccctggctttgagtcatgcctgtattccccacactctggaggggcagcccagttcgaggtcaccttgaggctagcctgggctactgggtgttccttattccttgttgctcactcggggtcccgcctgcttctactcccacttcccaaacgtggtggttccctttaatgaacagagttccgagacttagaaaaagagctgcttcactcgagtcctggggctgctggatgggctttatctggaattcctccggctcgcctcttagttttatttttgccagattgtttggagatggggtgtgtctggggtagaaagttgtctccatccccaatcactctcaaggacagctgagcccagcggacttggtctcagttccctatagtgatgatctgtcagatttcaagtttgttccttctgaagctgcctttggttgctgagtggcctcacccatcaagccgtctgtccatcttgctctctggctcaccaccagtctctcactctccagcaccaggccatctttgcttgtttctcttctgctccccgtaggcagaacaggcagaaactcctctcttgtggtcctggaagaactggctttatttatcagatttttaagagtttaaataaaaatttgctttatgttgctgggaacctgggtttgtgcagcaccatgcaaatgccccgccctctgctgtgcaccagctctgataaggaaagggtttattgtccagtgtttggagctgacagcttaggtgatgcaccactgtctgactcctccctggtagtagcagtgcacacacagatgaccactgccctctagctgtgtccctgttccaccctgatgacagtcactgtcgttctataaccttcagcaccgatgccactttggacaggtgccatccaaagagacagacagcaatgccgtgtgtgtagggagttataaattatcttctgcttatcagcttctggattccttatactctggctagaccatgacctaaaaagtatccttttaatagctaaaaacaaagaagttaggtgtgcgcatggacctattctaaacaaagccgccgtgctcaacccagatcctgctctccccaccagataaaccccctgatctctgctagcacttactctggtatttgcagcatgtttctcatttaaaaaattattatttgtatgtgtgtgtctgtgatgtgtgtgagcactcacgtactgtagcacacatgaagaggtcagaggacaattttgtggagttcgtccttccttcctttctttcttccttcctttctttcttccttcctttctttctttctttttttctttctttctttctttctccctttctttctgcctccgtatggtagcttggtttcatttctgttactgtgatcagatatactgaccaaagctacacagtagaggaaatggtttattcagcttacaactctcaagttgcgatccaccatttcaagagcacaaggagccatcacatcatatccataatcaagaacagagagagaataaatacatctgtgctgtcgacggctttctctgcccccacccccagaagtgagatttacttgtttcttcacgcttggtggagaaagttcagcggcgccagcctaggggatggtgccaccaacaatggactggtttttcttcatcaatgaagcatcaagataatccccacagatatgcccacaggttgactcggtcgtgacagttcctcaattgagactctcgccacagttaattctaggctctggcaagtagatatttaaaactgcccatcaaacacctttaccatctttagccatcttgccagtccccgaatttgtatttccagtgaggtctgtgcatggttcgatcttggtgtggcccttttagacattgctcgtgtactgcctgtcaggagtagcaaggacccctcacaggccctgcatgccatttccaacatcctaccataactatgtcacagacatgtttatacttgactttagtccaaggaccaagaagtggttcagatataattgctactggtttgcaatacacacaatctgtgcgttattgtgtctctgcaaatattgttgccttctgggccagatagagagctgcaactattttgtctgttcacttttgcctccctcccacccctgcccctgacatcgagaattggtcctcctttggtggttaagtttttcatctctgatcttatctcaccaacttattctaaactttccagtggaactgcttaaccctcttgatatcttcattttacaggaagcacgttacacaatctatgcttctttctccccatgctgtggaggtttctctctgtagcctctctagtgccactcgactagatgtgttttcgacatttgggtttggagatcgtggggcaggcaggttagctgcctttgcctgattctcttccactagttggtctgcccctctctgcttcctagagatccgtgtaatcctcaggtattggtgtctcgctgaaaacaaacctcagcgtcaacaagcactttttccacttccacgaccttctccccctccagacctagtgcagtattcttttgaagagccatctgttagcgcccccccccacgcccgcatccacaggagacatctgacagcagcaggtcagtgggatcctcatctccttacccagcttgcaactatttgtctgaggcaaggcaggccatcctgtgtgcttcttgcccactaagtgccccccaccctgtgcaagtgtgatgtcctggttgcatcaggcagctgagaggctagagcagtgctttggtctcttcagacgccatcaagatcgccagctggcctggcccctccagcacctgtgtgtcccctgtacttcctgcctcccaggctccttggtagccgtgggtgaacactgccagcaagcctgccttttgccagtgtgaggaacaggaagagactctgctggctgccccagctagtgtccacatgccagtgtctgctgcaaatgctttgatgttcttgaaacagagactcttaaagaggaagccctgctccctgctgtcacaatggcagctcttgtgtgtgcatctgtaggaggagatggccactgatgtggtttggctaccgctaatggctctgaagtgggtaacaggtccttctagacagtccctgtcctctggtccagcatactatgccttctttccaagtatgatcactacgtgtgttaccggtgtcggccgcctcttaggcatgcatctccacggctggcacactgtagctggttttctgtttggtcctcgccatgatagacatctctagggcattcataggctgactgtgaggagaagtcagagatgaggtgagctttattcttattgctgttgcatgttcctgatgtgtgcgtgatgtgtgtatgtagtgcaggtgcacgcgggccttggtgtgcatgtggatggagattcaaggacagttctctagagtcaggtcacccttccacatggcttctggggatcgggtttagattgtcagccttgcacagcaagtgcttttacccctgctccactttgctagtccccagaggcaaacatctgtgtgctatctatgagcactatgtggcttctgtattggctgcctactcctcccctctgtccctgaggactgccaagcaaatattccccaccccacagcctggctttatccttccacatatatcctgtgatatgaattctacccgtgagtctctgcatctctgtgcctgcctgtcttcctactactgtctgccccttgaggctgggcattgcctcaccatagcaagatccctgtccttgtgcaaaagaagggggcatctgctcttgtctttacctagaaagacgtgtgcaccttccctgagtcactgcagcccagggacttggcagggccggcgtggctcattgaggcactggatcacctgttgtctccagtttttcaacaaaatgtttctaagccagaactgctgaccagtagaagagtggacctggggttcccgagaagtgtgcaaaaaaagtgtgtaccactatcaggcttgctggcctcagggacaggccacagcctgagtatgatatggatctgtctcagctctgtcagccaattaagtggagacccatagtcagcggttcaatccactaatagctaaatgcaagatgacgatcaaaagccactgtgaggagcaacatgtgccgtaggcaaccacagggactcaggcaggctgtgagacacagatgactgcagcaggagcacctgtagggccacggagtttctgtctgtctcttagggtcatttccctttgacatcccacagaggtcaccgtgctcacacctctacactacataggaaccctgggattgagccagtcacacactgaggtcccatcagtgtctctgccacagggacatctgagggccagcctggtggagtggtacacttaacctggctagggtggtaactacagggccaagcaggcagatccaaaactcccttctgtggctgaaggtggggagcgaggggtgtgttgtgtgtgtctcactcttctaggggctgccatctcactggtcactttaaacagtacacactcaccatcagagatttctagacttgcccaggtcctagctgcaatgcagctgtcagatgtccagttacccaccaccttatttatcaagtagcacccactctgggaagtgcagctctgctggtttcatggcaggacctctttggcatccaagggccagccgacttctatgttgaggcctgctctcttcccaggttgctcccaagataaaggtgcaagctcctggttcccttgtgccccatagtggtcaggtgtgtcccaaccaacaacggcactgtgacactagccttgtgcctggaaaaacagtgccagcaacaccttagaagatgaacttgcaatagcgccacactattacagaggaactgcagagagagtcagtgctgctggcatcagtgagtggcacggagaaaccagcctcagaccctgacggccaactatagaccactactggagtcgccatgccatcagcttcctgtgtccttcactcttagtccttgtcccccaggctcctgttgacttcccatgttggcaactgtgtagtccactcctggtagcatgttctgcagaatgtgcctcagattgggtccatcccatgcttcctagtggataaactggatgttgggcttgggaggatccctcctccccaccccgccccttccagggagagcttccacacttacctgacgtttccttgttaagatattcctgcttagtgttcctgtgtccagttacagcttcccaaaggaggcaggtacctgagtcagtcccttagtgatggggaccccaagccacttggaggggtgtcacatggtttatatgagttgaagccacacacattgtagagggttaagggtggttcatccaggtcacactgatttgggatcctgctgccgaggttgctgctgagacatcctgagtcaagtcttgctcccctttctctatagatggtcattctgtggaacccctctgcaaggaaggaagggctgccactcccagtggttgtatagcacggggggaggttcattttattctctcagatgatcacccagcatccctgtgctcttttctgtgcctcatgtctgtgattttccccactggtccccgtgccctaaatggcccatcctggaggtttctctgatggtgctcccacctagtgctgctgggtgctccaggcacacacatttgtcctgtgccagccatggattcctcctgtggagtcacctgcagacatggtatgggatgtgtctgctgtctagccagttggtggacagagctaggaaatatgaggttaacaaccccacacaaaggagaggaatgaaatacgggtggcagctgagggaatgctcctgctgtgtgccccttgctttgtcctcagggcagccgtggtgagaggggacaggctgtgtcatcaggcaaggactgggaggaagctgacctggggatgatctgtcaacactcagatctggggtgaggctctaggggacttgtatgttcatcgtcagtactgtagacttgaacctacactgtcacatcatgtctgccagatggttagttttagcttctctttgtacatttgtgcagaagccgagcaggaaatgcatcagagaaatggcctgcaaaccagtagtatctgataaacacaagtggaaggcagatagtgtgtcacactgaacacaggtgaaagagcttgacgcaaatggttctctcttctgccagggcattttgaagcacaaactacaaaagctactagagaagcccagtgggcaggggctagggtgatagccccattggtagaatgctttatctttcaagcatgaggacctaatctgatcccggaccccatgtaaaaaggcggccatggtggaactcatttgtaatccagccagcttaatgtacttgtcaaaccccaggtctcggtgagagaatatctcagaaaatagaagatggctgtgagctgaggaatgatacccaaagctgatctctggcccccacgccatgtgtgcacatggacacgcacagatacacaaacacagagaaaaccaaaccgaacaaacaggtttgctgaagcactttaggccgacaaactcaaaggcatcaagccaccgtctctctcactctggcttcagggatcattgactggtggcctggggtggcaggcatggccagagcagctgaggctgtgtccctccctggaagatggcatggccagtggtcaggaaccatgagtgtatatctcctgcatcctgtcttcttcctgttgtggggtcagagatgtgaggacccatccctaagcttatagcaggacaaggacacttcagaggttcagctcctctggcctgaaaagctgtgtcgccacagctgagtagctagagttcttcctggcaggggagtccacggatttagtactgtaggaagggctacctgctccaggacttgcccaccggactgctgtgtagcccgagaggttctgagctgttttctgtgttactgcaggcagtgtttgggatggaggtgagggcgtgtctgctggaagtgggtacagaggatggcagggggctgcctagatcaccccctccatggctctgtcagcttgtccagaggtttcttggtccactgtagcatgtgtaagcatggtgtaagcattgagatgagcagaagtgtgtgtacacagaagtgtgtgtacacagaagtgtgtgtacaagagtagccatctgtgacgtggggtctgggctaagcagggctaggtgaggaggaataacccaggaggaataagttgtggtttgagcttccaatgcaggtagtggctgggtgagcacagggccagtggacatgcacatggtgctgcaagaggtgccacattgcctaaggagtgaagtccaactcaccaagtgcctttcaggtctatagatgacaggaaaggacacttctctgcccaacttagataggttcagggccccggttcctctcccccatcacatctgaaaatctcccatcagagggctcagcccgggctcactgagctctgatgttcctgtgccggtgtgtggtggtggcaagagcatgtgctgcagccaggtggctcctctgaggggagatgggaggcagagacagaggagagcctacgctggtaggcttccttctgcttttgctctgtttgggccctggcctgtcttggatggtgctgagtgtgtgggggcgtgtcttccgttgctgctcacactgagtgtgtgggggcgtgtcttccattgctgctcacactgagtgtgtggggacgtgtcttctggtgctgcccttcatgccagtcctctcaggtaataccaggggtatgctttactaatctcctaacccaatcacagtgctcagttggaacatggcggggtggtgggagtcagcttgcctgtgaagggggcaaagaatacccgtactgctaccacatacccctctcaggggtcagggcagctgtaagggctcttggagggcaggtagcctctgctctcacctctcggcctgaacgctgacgtgcctcttgtcctcccgtgaaggctgagatggcggctggaggagtgggtgctggagcagaagtgtgaggtaggcttggctccagggaagaaaggagaccctaggacaggtgtacagagtgtaggtcatgggtgctggtcacttcctgtctgggtcattttcttgtgagaattatgtcacctgattcagcttaaatgggatctgtagctggacatggaggcacattcctttcatcccagtgctctggaggcagaagctgacagatctctgcatgtggggccagcctggcctacagagctagtttcaggacagccagggctacacagggaaaccctgtcacaaccccaccccacccctgagaaaacgggatgctttcactagttctctaaatgagctgctttaggctgtcaaaccctgagcagtgccgtagggccccaatgtatggctgcaatgcccacctctgtccagttgtacctgctgggaaccaatgcactggactggtcaactgtcccatgtgcaggtctgtggttgggctgtcctctccagacttcccccgctagtgtcaatggcagtgtcactgtagacctgggggggggcactgcagtgggctgggtgagggaggaacagtgtccaccctgggttcctagcagagcccactggactactctggcctctgacatggaaatatgacagtaatatgtgttttccgatccactttccaggcaagctaacccctccttaaaaagtgtgagaggctttcccacttcagcatcgagctggttatgccattgggggccattaatgtcactgagccacagtcttggttagggcagttgctgggctccttcttacacacccgagacacccagggcagggagcagatggaagttcgtccagccttgtttctgtattaagacccatactactgcccctgagatgggtgggagttgaggtccaatctatggaccgtgggcacccccgctccacatagccatttaaacctaaacccagttgaaataaattttaatttctccctcagtcacatgagccacatttttagatctcagaggctcatatggcccaagccttgaagacagtgagtgccacagggccatggagtctgacacttccttaggatcctggcctgtggctttgaggctgggcagtctgtagctcatttccacacacaggaaacaggagaaagcccaagaaaatgtgtgcccttcagcacgctatctatacgttaaatatttagaatatattaatctgaaaaaaaaatctggctaagtctaatttccgttgaggggaagcatatttgtatttatccagaggcaataaagctgcagaggtcacctctgtggactgcctttccaggctagctggccacacctgtggagatctaagcagtgggggacacccggtggctcagaagtctggttgtcctagcaaccgaacattaacaagcacctgggacctgggttgcagcaagggtcaccacaagggcacgtgggttatggaggtcacttcctgtttcactgagtgcccaaggacatccttaaaatgtgaattagcaatcttccgaacttctcagctttggcctatggttgctagtaagtccatttctttttttctttttcctttttcctttccttttcttttcttttctttcttttgttcttttttcttttctttctttctttctttctttctttctttctttctttcttttttttaacaatttcttgcattttaaggcagggtcccactttgtggccttttgacatcaaacttagggcctcctgcctcaacctcataagttctggcattactggcatgaggaacaagtggctttcttgattacactcatagcatgaagcctgcagccatcgagttgagagacatctgctcactagaaagtgctctccctcttatggtctgcaccctccctgcctcctgcaccctcctcctcccctctctgtggcttgacctctgcactcacactcctggcttgccctccattagtaaattggggtgtgccttattgcttgtggggtgctcagcctaaagcagcagggccatcctggttgacagccctgtatttgtgcctgtgtgtggattcctgtgtagagctgcaggtgcctagctggttctaggggaggaggaggagggaggtggtagggtgaggatgcacacaacagtgttccttccctgtggggacagttctgttgtaaatcccttccagccccaagggcatcttagagtgtgtaaggtgagtggggagtgtgataggaagggacaggtgtgtcagctgttatttgggagtttctgcaagtgggtgatgacccacacgtgtcacacagcgcaactgctactggggctccgtctgagacagaaaccattgtgccccgagtctgctggctgcaagtcaccctagctctgctttccaagtgtggttgttttccagcactctgctgccaagggggccctgggtgtgctggcatctgtctgcaaacccagcaccgttcagctgaggaggcagtgggagctataggtgtgcattcagtatggaatgcatagtgagttccaagtcagcctgggctacaaaataagaaagaccccacctaaaaacaaaagtcaaataacatccaaaccttgggtcgagtctccatcatagctgctacaagacaaacccaaattctcagaaatgaattttcagaacggtatatgggtaaaaccacaaatccaaacttaggtgaacttggaagaatgtggccacgtaggtcctgtagtctggctcacagaacaccgcttccttcgtgtggtctgtggctgcctggtggggcaggaaggcagcaatgttgtagtcctgggacccaacagactccccccccccccgccccccatcacagttgcagactgtggaggacagactctgagattagagacacagatgtagggcttgtggctctttggagattaggggtaacttcaccatgatgtcactgcttaagctagtgcactcccagctttgctaagcactgctgggtaccatgtggcccatcgagtctctgttacccaccagccttccttcccatcccatgctagcaggagagcaaagcaaaattttgctatgctagctcataacttctcctaaaatataacctatgaaaattaaggaaacttttaaaagctgtgggctccctccagggccatcattagaagcccctggggtggcagagggcgggcggctcgttgctggagtgacagccagtcaggagggagtgctttgcccccttctccctgtttttaacgaaggagctaatggatttcctatccctcacgtggatggtgctgtcacttttgaaggatccatctgagctatatttaattactctttctgactatctgaagtcgttctgactagctcatgcagcctggctgctgccttctttctagagtggccatctcaaggaagtggcctcagacgcttcagagctcacgtcttatttatggcgttagcttgacctttgacacaagtaactcttgctctgggtgatatctcaccatgcctcacgctgtatgatgcctgctgcccctgtctagcccccagaattgtatcaggtcactcctaggcctttattcctcacgtggctgatttcatctgtgtcctggctgaccctgacaggggtgacaactggcaccacaccatcatatgactcctgtcctgttcatggtgatcttgagcaagaaacagccttttggggtgaactttcccacctgatgaggtagcatcccaccagaagggccttccaaaagtttctgcctgctcccccttccctatatctcccaccccgtcccagactgttgggccctcggcaaatttgactgtactctgcccttgattggtccccggtcttgcatccagccagactgtgcctacctctcgcctaccatacctgtacatcaagttggtggtcctgagagcccacctcccttatccctcacctcaagctgtccttttccctggctgcttttagcatcaaactctctagcttagcttctaagcccctcatccctgagccactcagccagacagcctccctgtccagggcagctgtcctgtataactgcctggcctccttttgctggctccttgtgtcccttcattctagcatttgttcagctgaccacgcctctgcgtggatgcctggtgtctttcttctttctttgatgtcagtgaacagaggaggcagcgccgttcattggttctgtttgagaataagtaatgtgtagccaagcaaggggtagggtccagaaaggtctctctgcctctgcttctccacccttgtagtctctggggtctaggatcttcttattgcctccaccttacatctggcttcttctggctgtgtccagtctctgtggacacccgagcctcctggacagtgtaagcaagatacccaggcagaggtcccgagcctggtgactaaacactctctgcttccatttcctcacaccgttagtgtctgcacttagattttccctgagtctacagcatgtgtactcttcctcacccaggctggaaggaagataggatgactgcataactgtcctggagagtgggaagccacagtgatcactgcggatagcaggtgggaacgggagactggcgagactggcgtacacagtctttcctctgacacagcatggagatgtggtcagatcacctggcctggctctatcccaggtggtgccacatccttccttctttcccgtctgttcatcatctaggccatttccatatgcaactgggaagattcgtgttgaaatctctctctctctctctctctctctctctctctctctctctctctctctctctcgtttttgttgttgaaacaggatttgtctgtataactgctttagctgtggctgtcctggaactctctgtagactaggctggcctcaaactcatagagatcctcctgcctctgcagggattaaaggtgtgtccctccacgtctctctgtctgtctctgtctgtctctatctctctgtctctgtctctctctctgtctgtctctctgtctctgtctctctgtctctctgtctctcagtcttgcttccctgccccatcctttattctccttctcttccacaggtctctcgctcttgaagcatctgtctccctaagttgtccaaacaagctgaactcactcacaagctggggatggtttgaattcccaatcctcctgcctccacctccagagtgctgcaattacaagtgttcactcgatgctcagtctgtgggtgcggtgctcccaggaagctctctctaccgtctctcttaaacacgaggcatttgttcctccctgggaatcgtttcacacatataccctggcgcatctgacctcatctgtggtatccagtgagcatgcctgctgtgccgcccaagccttatgcccacacccaaaaaacagctccgaatggagagcttctctaagctgtgttgagaggttgcgtggtcccattcatgtcacatgtgcaactcccaggtacagctggttcagcgctcagctgtgtgactggaattgaaaggggcagactgtggaagagaagtttctagaaccagctgtctgtcaccacatgaaggcagtctccacagtgctgtcactcaggaaccctcgtgggcctctcctgacagccacctggcatgcccaactggtgatactctgtctctgttgcctgaagcacaaactatgcaagggcagtgctgtccccagagacctggacagtaggcaagaccctttctggctgccccagtagagaacacttagctcacaggcacagacagtgggaggggcgctgttcagaatgcaattgcacagggttgtgtttgtctcctgtagaaggcgccgtcccgactctgtccactgtataagaatttggtaccctgggcaagaatggttaaccacccacccaccctcactgggtcacttggcccctggcagtgtgctggttatttattttttctggggactcatctcctgccatgctgaagagaacaatggccttccttgtgcacacggtgcagctgctgagacaccacagatccaggcaaggaagccgagcaggtgggagtgcaatagcccttccctcctgggtgtctgtcacaggcttctgccaccaggacagtcctggcttctgtcagaaagaccccagtgagtcccagccattccctgaactggggcaaggcagagacttaagttggaaacagctccttgggccttggctcagtgatgtttatccaaataggacaggaacatcccacaccctctgaaggccgaggggtgtgggggagaccctcacacacaccctccttcctgttctagacagcttgtcttttgtcacccagccctgccctgtcacgcacccccacccccagccctgtcaccctgcctctcagaactggcatgcatctctgggttctgccattgtgtatcaatcactttgaacggtgtcactcactgcagttcgtgttaaaattccattcctacgtctgcagattgaggtggcaattaggcaggctctaagctctggggaatgtgtcccctaaaagctctgacactggatgtggcatctgtcacggtgccagctctaccctgccccagggctagcaaaggggttccagcaaggggtgggcagcttggtgggtgtggggcaagctggtgttctgcttgctcagtatgcagtggagcggagtggactctggctcccagatttgctctctgggcttctgagttcttctacccacccagtggaagaggggattggagcatgtaatctttaaggttcttcctcaaaatggtcaccaatagtggttcgagcggagcttaccagacacttccctacatggacactaccaaccatgaaattccatgggtaacaggcacagccaggtgaaacgcatcccaaactaatgcaaattatcccaagagaaaaaaaccaaagggattgttgtgcagggggaccaccaatgtgaaaggaggactgggggtgggtgggtaattgcttagcacatttttcactgccagcaggacaggattcaatcatgcagtgtacatagggctacaagctccttccctgggcacacagcagcagaagcagccaggctgagggtacccagaacccatcccatcccagagtctgaaaatggcagtaatgccattaagtggggtccctgcttctttttctgggtttgtagctctccctcagccctttggtgacaataaccaaatgctcagccttggagccctgccaagaacaggaaagcttggcgagagaggcccagctccacctgatgcacgcggctctccagctcagcaaaccccggctgctgtggtctcagctcagcttcagcacccactgaagcactgcgcacgaccgcttgcccatccagtgtagcgccctgtcagaaccagcccatggcttatcacttcgcttagctgcaccctgttcatcaagtggatgggtggcttccaaggggacaggcattgaaatggaccaatgaaaaccctagcacagatggggaggggatagcagacttgccagggggatagcaggagaccggaagccaagcaggccgtgacttacggggcagtcctttgagggtggtgtatgaagagtaatggggggtcgtgggtacaggaacaggatcctgatagtcaggaagggattttctgttttagagctattgatgtctacagaactattgtgaaaatatacctggctgccacatctcgactcattcaggaccatcaccacattgcatacttcctcagtttcctctaagtttttctttgttgttttttgctgacccagaccccaggtaacatttagtcaccgtatttcagccgttccagcctgatgacactttttgtctcccttggcttttatgtcttggtagtttggtgtgctgctcagtctgtggagacccctccatgccccagttttctcttccccgaggttagctgctgtgggtcccccatgccccagcttttgtcttccccgaggttagctgctgtgggtttgctgtggaaggatagcacctcccgcacctgctttgacacacactgcaaacctcgctgagttgactttgatcacctgggcaggccaccatagatggccctccccacactgtctgcctgctgaggatggtgactgatgcacagggccgatgcactgtgcggggttgttctgggaaatctgcgcctggccctgtgtctctgttaagtcagctgttggttctgtcagcatggactcatgtgtacctagtttatactctattgtgacttcatgctaattagctattgtataagctttaattctaaactaacttgggtagaaaaaagcagcatgtgtaattccctatacctgtcctcctctgggatgtcctcctgctgctgtccctcctaactgtcccttactctgtgaggtacgtgtgtgcatagttagggccgtcactgcgaacggctaattgtcagcacaaagggataacacagccctgcctggtgtcctgggaccttgttgacagaaaacatccctggccccttggactgccactcctcagatggcaaggacagtaccagcagtagggcttctgctctctcctctttcagtctcacctgtgggctgttctcatggcatttcctatgctgagccccgctggaagaatagcaggtgtccacacacaaacacatagcttctgccctctcgaggcctcacaagtcactcacttgggtttactgatacctgggtgccagctttgcctgactcattcgacctgggcctgagtgggatccatcctcccacagagtttgtcatgtgttgtgactgcacctgtactggcaaatattccttgggcagtacattcaaagcagtgagtttccacataaacctaaaagcaaaaggcttcccacaagtgcccgctggcagtgcacacccaagtgtaggctcggatcacgctgcatcccacacaagacggcaagggtcatctgaactgggcggtacaggtccttcctgtccacaaaagaagggagggcacctggagctgtggcattccctggtcccgggctctgggtcagccactcagagctctgtatcttgtttcctgtgaagacacatggtgacatttgtgtgtctcggtttcactttaaggacttcttggtcaggctgaacttgagggtgattcctttgtaaatgtttgaccccactgacgaaatttcctctctgtgtctcctcttgtgccccaccccaaccccccaacccctgcaggatgggagtcacagctgctggaaacaggattcctggggatctttctgagccctctctggacactgtcccgcctgcccaagaacacccccacatcccagattgtcctgtggggcttccgctggctgatcttcagaatcatgcttggagcggtaggtggaactttcatgtacatgatgtgagaatgatggcctcaggacacacctagtaactcaggcggactgctgggctgggctgggctgggctgggctgggctgggctgggccgggccagctcatctggatcggggttacctccttgatgccgtgtaccagctattctgatgttggcctggccccgcccactgcatcctccacgtcagagtggcccgctgtgaacagtccgctcatcagttgtaccagcatgttcactgtcatttactgtgggaagcagccacagctttgcctttttgtttggaggagatttggggaagagccagtcctttcccgcagtgccttggatgtctctaaggtcatttcagattgatgaatgaaggccatatgccatggaggtgtgttggtaactgttctgcagtgggagcctcgggtctcacactggggcagcttccagccttctgtgtctgtcttttctttgggtccccagcctgctgacttcttggagtgtctctcacctaatccagatgtgtgcacactttgtgcagttcagtgtgaatatcacttaacagcctgtgtggtcggtggccctcgcctgctccagggcttcctacccaagtctgcacaccccccaagccccgccctgctccacccccaattcccgctgtgcccctgccgctcttgcatctactgatgcgcgtggctgacattttcagacattatttgaaacttcgatgtgagagcctttggcttcggggctatacagagcatttggctgttcacttccttgttcttcacttcttgtcctttgatgagatctctattcttccaggattataccacactagattttccatagtgcagccttcttggacataatgtctctacatgggtctctctgctcacttttacgttttcagaggggaccaacccaagcatgcagagaagttgaggcacatcgcaaagcgagtcatgagaacagggtgttcacataagggcaagattcttcaaaccagggcctctttcggtctagaatattccgcatctctctcagactgcccagctcctcaggtgaccttgtgactctctgggcgtggcctagcagcaagagggcagctgtgatctgatctgggaagtccctccattgagactctcttcttaagtgactcagggctgtgtcaagttcatagttaaagctaactaggacaccatctacactgtggataaagacagcctagtctcaaatgaggtacactcccagagtatgagtaccctcaccttcttcaccatcttctgctgagttcactgcataggatgtaggccttggtggagggagcaccataggagagtcctggttgcctccatgggcacatgcagacatgtacccatgtcaggctaagccccttcctcctgctgtctgcagcatgggccttggggcaggagcttttgccatagagattcctgtcctctgaagaggctccgatggtgcactcgtgctggtgtgaacagggaacctgacaagttgtgtgtgggactaaaatgatccaggagcttcatggttttatgcgtgaacactggaagtcacccggctcccgggtgctcttcacatgttatgtgaagcagatcacgtgggacgtgatcctctgtgactgtaactatgctgctgtggccaggggttcctgggaaggcctcggctatgagccactacatctacccatgtcccccaactgtctccagtggctgtgagcgccccccccccatgctgaatcatatgaagggccacagcagcccaacaggaggagggtgggcatgtgtgtgagacccccaagagggctgtgtggagccatgttgccagcagtgacacagatggaatcagtgcttgctaggccacagggatgactctgggctggattctacatctagaatgttgctgtgtgctgctgtctctgaggccagtgtgtgcttggaaaagggcactgaagttctttgctgtcttcagagatagtgcacttattcctagcagcctgaaggtgctatagcttactctcctctcccagctggttctgatgagcccgagacccttcaaaagtgtcaaaaggctccttgtagaaggtggctgtgttacagcaggcggtatgaagacaagctgtgtggagcccagatcttcagggaagcctcgctctgtggagaagcctagctatgcagaaatgctgagtggggtagaaggcccagctctgtggaaaggctcagctttgtagagaaacccagccccatgggaaagatgaactggatgagaaactaagctctggagcaccattgagctgtgtagagaagctggcttgtgtggagaagcacagcccttagagaagctgagttgtctggataagctataagactgtttcatgcaccattcttgtgctaagagttgaatgcacccccatgatgcctgacagagtgagcgagtcattagcacattctgaagcccttttatggcattttgattgactgctagcaccagctgggtaaaaattaccaggtgctctaaaaggtgtaattacttgatacagtcttaggttggatattattaatcttgcttcagtgggaaggatagagagagaggtgccgcggtaatagactgaggggtagcctcgagtccattgtgggctggctcagacctaagaccacaggaccagagagagcctggctcaaaaatcaaccctcaagactgcatcgtctggtggcatttcatatgccccaaaattggttgatcccttggaactgggtcccagaatcccaccgtcatgatgtgctggtacctcgcagggaaggaaaaactgcagcatctgtggcctgtgggaggctgagccaggcactaggactgtcacatcctcaggagtaagaggctgacacgaagcaccctcctccctgtaagattcagctgctgtcagatcccatacgttggtgtggattcatggtttgcagaatccacatccacctttatggccttgacttctgtgagcggcatacctggctatccacaggggaaggccaagcagagatgagaccacaacaagcacaaggaaaggaagttgatgaaggatgtggctgggcccgccctccacaccctactggagggatctgttctgggacgatcagggaggcctggcctcactctgcagagacttgatctaatggtgatgaacttcagcaagccctctgtgggggacagttttcagaattacctgccagcttctgctcaaagatcaaattcacgaaacatggtagagaccaaccaactcaagtcaacaggcaactcaagtcactgagccatctcaagagtgctacaagtcactgtgagccatgtatggtaggagctgctggagaatggaatcttcaaatgtgcatttataataaaattcaagctagtctagtactaaaggcatatagtcccaactctgtaaggctgagacaggaggaccataaacacaggtcagcctgggctacagagaaagtatgaagtgagctgggcctcagtataaagtcaaaagttagtggtagagctctcatcgaatgtgtggacagttctggatcagtgctcagtaccactgtttaaatcagtattctattgccgcaaggagacaccaggatcacagcaactcttatagaagagttgctttcaggtccagatgctagtctgttatcatcatggcgggaagtctggtgatggtataggagccaacatggtgttggagaagtagctgagagttctacatatcctgatccataggcaggggggtggggggctggtatcgggttttgaaacctcagagcccacccctagtgatacagttcctccaacaaggccacacctgctagttctttaatgtaacgcctggtgacattcaaatacatgatcttgtcggggccattcttgttcaaaccaccacagccacacaaaaaagtaaaattatttaaaagtaaaaatataataacatctaaaaccaagaagcagaacatttttgcaaaagaatagccactcttaaattctctctgctgggattaaaggcgtgtgccaccacgtaggcagtttgttttgtttttgaaacaaggtttcacttatgtagacctgtttgtcttggaacttgtgtatatgaagctgacctcaaactcacagggatcctcctgcctctacctcctgaatgctgggattaaagatgtgagtcatcactccaggcccaaaatgccaacgcactgaatagccacaatggtgttgtatgaaaaaactctaggagacagattgcttgattccatgacaattaaatttcggtgatgttacagacccaaatgtaaggttctgtgagtaagatcatgttcagtgagggaagcctgacaaaagggacaccacagatacacacagacacacacagagacacacacacatactacatacacacaagcacacacagacatatagatatggacacataccacatacacatagacacacacagatacacacagatgcacacacacacagagatatgcacagatacacagtcagacgcatgcacagagacacatacagatacacacatatgctcacacacagagacacatagaaacacacacacataccacatacacatagacacacacagagatacacacagatgcacagagatgcacacacagagacacacacacgcagacacatagaaacacacacacatgcacatacacacacacacacacacacacacacacacacacacactcctttcatgaaaggcttcagaacaggtggtccagctggcctctttaggtaggccacaagggctccttcttgggtgatggagacatcagtgactcagtgggacgaggcactgcgagaatgtgtattctcatctcctcaagccagtaactgcgtggcagctcaagagttatttccagacctaatgaggtcagcctactgctgaggaaggttggcttaggggagcagaagttcccctcaaacctgtttgtccatgcattccctcaaaacatgtcccttcgtgagcctggggaggttgaactcagccaaactggccaccatggcaccgccatggcctccccacagcacagaaggagagcagtctatttccctttctggttcttggtgccacagagagcaaggtggtattaggggacagtctactgctaatgggccagtcagggtgacctactacaggagagcacgtgcctgcctgctagagggccatagcagaccttgcactctggccaatcttttcttcatctcacccacgaactcagatcacagatgcttgtcccaggcccagtgacccgagctgctgtgggagtgctggcagcactaactcctgacagctttctcacccagggcaggggcagccctcagggcaggtaggctccttgtaagaggaactctgaggatgaggacagacatcagggaaagttacagcggtgctgtgtgccccctctctgccacacaccgggcagccgactctgagagtcctgggttcactggtacccataggcttcccagccttgcgggatgggaacatggccattggggaaggaccagtggctccacagagtccctgccctccttttctcaactgcaggatcagtgaagcctcccatggctccctcattacaggaaggtctcctgcctccatcccaccagtctgggatgtttttcttagggcatcagtgtcagccacatcgaggcggaggctctcctgctttaggaaacaatagtgatgtaggtgtcaagacagcgggacactgcctttagtgatgcttttttctttttaattcctttgtgtttcttgatcttggatcgtgtgtgtgtgtgtgtgtgtgtgtgtgtgtgtgtgtgtgtgtgtgtgtgtgtgtgagtgtgtgtgtgtgtgtgtgtgtgtgtgtgtgagtgtgtgtgtgtgtgtgtgtgtgtgtgtgtgtgtgtgtgtgtgtgtgtttgtctgtctgcagtgaggtttatatgttcctctgcaaccccagctcctcatctagagccaccagacagagccccggcatcagatagagatgggttttccctgcagactctagaaccggctctgtccttgattatcccacgccgatgaactgtgccgagtgacaggctaacagtctccgttgctgagattctgggaatggagccaacacccttgttgctgggaattctcaggcctgcgcattacccagggggagagagaccccttgcttttcatattgacccctagaatgtgggggtgctgagcacctgcttctctgcacacctcccccctccagcctcacggcctccattcggaggagcatgtgtgggtggcagtcccttctccacgtgctccacacgcctctcttcctggagagccagccctgctgtgagctttacctgtggaagtgctgcgggcccatgagggtagagacgagacagagagcgtaactctggtaaatagcaagtgaaaggagccatcaggtcggggcggaggggctgtccttacccctggccttgcttctgggctgcgtctctgcagtgtgtcctgagttggcaccagtctctactcagttcctgtctctctgctgttcttaaacactttgtgctgccaggtttttatttatatatatatgtaattttaaaattagcatatatttgccgtataatagaacaggtcccatcgtgacatttccatttaggcacataacatgctagttctgatactatttgctttatgtttgcttcatattttagaagttaagaatttactgctctgccagacctgacagcatatgctgttaaccccagcactttggaggcagaagctggtagatgtctgagcttgaggccagcctggtctatatacagtgagaccctgtctcaaaacaaccacaaagaatttaggactcgcgattttcatggaacaaaatgtaagctaaacagtcggttctgtatgcagtgagaacgactgctgatcctggctgcgggggttttatatagtttttcctggaaggagggttaaggctcagaatctgcaatgatgtaagaattagaattctgtgtctcatgccaaggtgatcccaacccacaggctgtagagaacagtggtgaggccctacacgaccagttttgactcaacttcctgcttgttagtagacacagccttgaccactgcccaagtgcatgtgcgtgtgtatgtgtgtgcatgcatatctatgtgtccacgagtacatactgcatgtgtgtgcatgtttgtgtgtgcgtgtttgtgcgtccacgtgtgtgtgtttgtgtgtgcatgcctgtgagactcccccccccagctctgtgtttgtccctagcgcccctcgcacaggtcgtgccctctggtgctccccactctcacacaggaaactgcagcatctgaagtgaagacagaaacctgcagggtcaatagcttccaggtcagaattgagcagtagccagcgcgtgaccaaagacttcctgagaaagcatcccccacccccgggtcagcacgtgtgtctgaaaggctgctgtggggtcacctgggatgccacaaaagctttaggcctgcagatttgacagctcagacgagacagacagatccattgacaaacacagccaccaaaaccaagtcaaagaaagcaggaaacctggatagttttgtgtctgctaaagaaattgaattagaaatcgacagaagaaaaactattccagaaagaatctgtaccccagatggcttcactggtgagctttgtcagacatttcaggaggaaatagcagcagtcctccactgatgccttagaaaatactggaggaggaatggtccccaagtgcctctgacagccagcacagcagcgaccctaaagctcatgaagatatgacatgcagagatgaaggtcagagcccaggacctccacaaagacgcaggaacccttaaaggagtgatcagtgaaatcttggctaaaaaagcacggggacggcaaggctgtggggtcacctgggatgccacaaaagctttaggcttgcagatttgacagctcagacgagacagacagatccattgacaaacacagccaccaaaaccaagtcaaagaaagcagctttctttgaaaatcagctcatgtcatctgctacagtcacaaaatagagacaaagagccatcttcttatcacagcagattaaaaaaaattttttttcaatacacaattccagcttgcctgtagcccaagcacctgggaggctgaagcctagggtgtatacagagcccctgccaaaaggagagggagagggagagagagaaggagagagaagagaaaagagaaaannnnnnnnnnnnnnnnnnnnnnnnnnnnnnnnnnnnnnnnnnnnnnnnnnnnnnnnnnnnnnnnnnnnnnnnnnnnnnnnnnnnnnnnnnnnnnnnnnnnnnnnnnnnnnnnnnnnnnnnnnnnnnnnnnnnnnnnnnnnnnnnnnnnnnnnnnnnnnnnnnnnnnnnnnnnnnnnnnnnnnnnagaagagaagagaagagaagagaagagaagagaagaaagagaggagacctgtggcacatgcctttaatcgcagcactcaggaatccaatctctgagtttgaggccagcctggtctacagagggagttccatcaaagccagggctacacagggaaaccctgtctcaaaaacaaacaaacaagtataagagtacaatgagatcagagaccactcctccagagtgtattggaaatctagtttggaaaacaagaagttaagttgtaatccatagatatgactgcgcttagaaaaaccggtgactgctgagtgtgatggtgcccacctagaatctccacactcagaaggtagaggtgaatcaagactccaagggcatcttcagtgtgtgtggcccaagggcatcttcagtgtgtgtggcccaagaccaacattggcagtgtgacaccctgtcaccatctcccctcaaccccctgggaggaaggacaaaacaagggaagggggagggagagaagggcatagaggaatctaaaaagcaactattaagatgaacatgaggttttaggatgcaaggttaacatcatatatatttttaagaagtatttttattttatatatgtgggtgttttgcctgcatgtgtgtgtgtgtgtgtgtgtgtgtgtgcagtgtgtatgtgcagtgttggaggaggccagaagagggcatcatatccctgaactagagttacagatggctgttagccatcatgtgggtgccgagaattgaacccctgtctcccggaaaagcagccagtgctcttaaccaccaagccatctctccagcccagtgtttcataaactgttaacaagccattacacaataaaaaattgggagtgttatctattgcatcaaagcccctcaaaagccttacagtaaattaatttaaggatatctaagtcctaaaagctatacaatgtagctgaaaggaatttcaaagactatgaatgaagaaacagaccatgtggatcagaaagattcaatattgcatccggcttgcccaattttacctacagattcaaggcagttagcatcaaactcccaatggcctgttagggaaactagccgattctgaattgagtatgaaaatacagaggatctttttaaaaagaacagaattagagggctatgctaatcttagacctcaccttaaagctgaagtgtcgttgcaatctaaggtggaaaacctgcgtcagaggaagagcagagtccaggagcaggctgcatcctctgctcctcatggggacccatccagagcactgatgtggtggggatgccaagccactggacagtgctggaggggtcgcatagagccactgagaaggacattgagaggttatacttcatggggttttttgttgttgttgttgtttttgtttgttttttggttttttgagacagggtttctctgtgtagccctggctgtcctggaactcactttgtagaccaggctggcctcaaacccagaaatccgtctgcctctgcctcccaagtgctgggattaaaggcgtgtgccaccaccgcccggcttgacttcattgatttaaagacccctggaaatgtgaatatgcaaaccacagactggggaaacatttgtggcattcagttttgatatacaacatgtagagcatacattgtaaccatagaaacaagggtaaaagaatgtgttttctttgcaaaggtgggagtgtggggaaaccaagaaagagatcatacttttcagaaagaataaaagcaatgtgacaatatctgccactagggacctgtgacacaaatacctgtgtcaggggatatgtgtagctgcccttggacagccatgctgccccctaggaatgtgtcctctaggctgcaggtatcccgtagttttgcccagaatggccagatgctggagacctccatgtgtcagtcatttaggaaccaatggccacattattacagagcaaagtaacacacaaggaaaggtagctgtgtggttaccacccaaatctatagtcacagacagggagctcctggggcacatgtcccttcaagagacttccctggtcaggcaggatcattgagctgaactgtgatggacttgtcattggtaggacatagaactaaccagaaaggaagcagagaaattgttgtggggatggaaatgcccagtcagacttccaaattcctggcagcaacctgtgtcagaagtcagacacatatagtgtgcacatctgttccatgtaaaaccatagtaagccttctgtcagagcaggtaacaagcctgctcattgtacacaggatgcttcaagatgggccacagcaactacatgccttgcatggtgagtgagtctataaccctgtgtgtccagagagcaggaaaaggacttgtggtggccactggggagaggacttgggcaggactcaagatcagctgtgtctgaatgaagtagccaggcaggtgttgccttgagagttgtcatggctcttgccctctagcagcatctaaagaagtctcatgccacttaggacttggggccatagaggacctctcagagccaagacaactcagcaaagagcagaggtgaccagagaagacctgcgcggtgagtgggagaggaagcaatcaagtgactccgagaactgagtgggagatacactctgggaggaaagagccggctgataagtttggccatagagcagctcctgctggagaaacaagagatggccccagggctgcctgcaatgtgtccagaatgttctaaacctcgcccagcctgactcaagagcttactcagcagctgccacaaaaagccagcaggtcccaggagtggacagcagtcatggagacacccaaaagcacccagtcagctctgggtgatgcctgtcccttcctagacagagtatagcctgggctaagtggtatgcctgcagatgatgttcatgggctgaggtgaggccagatgtgcagcacacagagaacccctgagatgtttcctcgtgggacatttttcacgtggaaggaaatctgtttctgctcgtgcccccttccgagcagggccactcagtcagcccgcagctccaggttgttaggaggtggggtccccaggacggctgcaaagccaagtctctgttagctgggaggctggctgtgcttacgtcacagcccagggactgttctgaacgggatgaaccaggataattttaaaagcagtttccatgttagcatgcaccgccccccaggatgcttcaggagatgatgctcaggccacggaagtgtgggctcgtgggcggctctcaacagttagcaagcagggtggagacattggtagcagggaagggcggctgctgaggaaccaagacaaaaacaggctttgaagttgccggacccttttctcggagttggagtgccactggtaaaatcgtattaaatataatgaaataaatgctggaatgcagagtgcctgtgaagacagaacggaacggatgtccctaccatttccctcgtcctgggcatcctaactcagaaatgagagcaatcattctaattggctttattgcattagcgtgggcagagctagagaaagggggctttcttcctgcctgcccatcagcccccaggacactcagaagggctgacctctgactctgctcagagacatcacgggaatctttggacctcatgcctgctgtgtcatgacctttgatccccaattgcagacctttcgtatagctgtcccagactgggccctggcagcctctttggatccccattcaacagctgtttgtctcacacagcccatgaccctcagaggcttaaagaaagcatcacagcccagcacagctgagggcttttcagaaccctctcatccgttcttggtagcccatcaaaagttattatgcataggtgctgaggtccttttcaagggacgtagcgcaaaagccttacagctctgcttatctctcttctcaagtgcctttgttgcatccggctgtgtcctccatgtgcacatgtacagactgtgtggatgcaggcagcaggacaccaccgcatcacgttgcttgacaacaaggagacagtgcatcagacctgtccagagccatcgggaagactagtgaatctgcagggattagcagctaaaagaggcccggagcttctagaaggaaaaccgatgcttttacaaagaggcagattgttctaagtatttatgcagcatacgctgtagtagaaattgctgctgctttcacacacatctcccagttaacctcttagaccaggagtcagtttgaggcatgtagtggtggtgttttggtgaaaccatactgtaagaccttgggtgtccagggctcggtggactctggctccagcatgagctagccatgtcagggtagctctagtcctgtggacaggaggtgcttctgtcgttttgaaccagatcttagctgaaggttctcaaaatgtaaaaccccagattctgcctagctctgtgctaccctgagctttgctaaaccaaggctttttaacacacctgtctccaccatctagggactatgctgggcccatctgccatacccattcccacacacatatgcacgagcaacctgttagcacgtggctgtttgcttggaggctgcattttctcggttcttgggcgaacagatggaccttccctaacgcttgtgggagttcctttccagcctggaagtgctgggtggtcatcatgccccaggtcccgctgactccagatcatctcagggcacactgagcagtgcttgcaagtgaaaagctctgtcctggaagtgcagagccagggcatcttcattagaggtccccacaccgtccgcactctcagtgtcacagagggcttcccacaactgagccggtctttcagagcagtgccatctcttcgtagcagcatttcatgtgttggtagagctgagccaggagagggctgtagcctggagttcagtcaacaacacgctgtgttcgcgagtgccactggtccactccacaaggatgggggaccatgggctgtgccctctgcttggaaacaagtgggccttaggaagctgtagagccttacttacatcacataagacaggggttacaattggataggcagcagtcgctccaacactaacgtgtgccgtgtacccccgacagcttgcagagctcttgggcattcccatcaggaattcagctctggcaagagaggagcagccccaccttataccattcctgcaaatgccaacatagctttagaccccatcaagccttgagggggggtacaaagggacctcagcccctttcaggccacaggcgtgctatgccaagccagagggtaggcatccaaagcagactcgtggcatggcttttcctgtatgtggtttcctttgcccgtcgggagttttttaagaagcagaaattgcagtcgggagctgctggacaggaacattcatccccactcattgtgagcccaaggtatcagcctggaacattccagcatcatgacgttctccttcccaggctttagagcaagagggtcgtaggagactgaaggtcactctgctccctttaggtctgccatgctaaggcccgtctgtgccattttttttttaccctaaattaattttgggctgaaaaaaggctcaaagaaggctttgttcctctgacactctgaaagaaagacccgtgggaagtctgacatctgcagcaggagcgagcggctgggagtggctccaacgccctccgctcctgaagaatgcttcaggttcctaagtgtctcatctcagctctgagtttgagtgacattttaattattttgtttttttcttcttttcctggtgtgaatctccaaagagtccctctcaggctcggaggggtacagagcactgtgcagctcatggacatgatgagggttagtcctgatggtgcagttcacttccctactcagtgggcgtgttctgtcagcaaccagtggttctactcgacagacacccagagtagaacgttgcagggcggggagtgtacaggcactggaccggcagccctacccagcagcaccgtgttcaagtgaccatggctgtgcaggacgggaattccactggacgccatcatccctggggcatccagtctgagtgtgtttgtttcccaagaggtaacttggttgtctgagtaactcatccttcgagtctttaaatagagtgctcccaggaggcagagcacagttcaactccctgcagtgctcacagctcccttgtggtgtcaggattgctgggagccctgtggggcccgtgacaccctggagatgttgcttctgagagagcgttccctctaaagccagccttcacaagcaggtacccattaggtagtgtcacacatgtcacatgtggccctggtgtgagtactcactcgttcccataggcgctgactaggttcatgtggccccagtgctctcgagatcacttggccctgtctcctgggtgtcagtggctacatttgaacactattcttatgacggcatcagtatctgtccatagcccctttcggctttcatatcagatctaccgcttagcctgtctcctgggctccctcaatgagcgtgtctgaaactagatatgtcttgcttcccacacaagcccacactgcccaggttaccttgcttggatggccacagaagccattattgaccccactgcaaccagaggacactgaacaggcgacttaagtgccaccaggccctggtgagcgagctcctcagagcctcatatcttcctaatgtgggaaggtcatttgtggtgatctcagcatgcctggggtggggtgggggtgctgtttcatgtgatttcagtgtgctggcttttgttagagtggtggtcaggaggcctagacgaacccagtcagctggtggacagctcccacccttgtggcctccccacagatcacgggctttttgagcagcctactctgcctgctgtctctagcgagcctcgctctccccccatgacctggtctaggctctgtgggacttctggttctccatgatgacctcctaccttcttctctgttccagacaagagtccttagcaaacctcccacccacacccagcatcttcaggcccctttcctcttccttccggggcagtccctagcctctccagggataccactctgtcttagttagggtttcaatttcagggtaaaacaccatgaacaaaagcagtttggggagaaagggtttatttcagcttacacttgaagatcacagtccatcactaagggaagtcagagcacaaactcaagcaggacagaaacctggacgtagaaattggtgcagagactacagaggagtgctgcttactggcttgctcttcaggaccaccagcccagtgttggcaccacctacagtgatttggacacaccaattatcagccgagaaaatgtaccacaggcttgcccacggccagtctcatgaaggaattttctcagttgaggttgccgctttcaaaatgatgctagattgtgtcaaattgacataaaaccagccagcacaacctctcctccaggctgtgtctgtcaccccaaccccttgcaagagcaaatcctgattcctagtgaattgatgtgagcaggggcctcattgctcccgatctatctgtggagggcaccattgtgaatgctgaatgcccagagaagcccttcactatctatcctcctgtgaggctatcaatggaagctagttgtctacagatcagaagtggatccttgatagaaccaaccacaccagccccttcactttggatttccaggccccagactgagaaatacatttctgtggtttgtcacttacctgtgtgcacttcgtcacagctacttaagacccgctttgatcttcgcagtatctctgatggactttcctcttctccgtgctgcactaggatgtggcttcttcttcttttttttttttcttttccattttttattaggtatttagctcatttacatttccaatgctataccaaaagtcccccatagatgtggcttcttttatgcccacccagacctcatgggcactcaatccaggtctgcaagcttgtggtagattgatggtggatggaccagtgagcagatggatgttgggtaggtggctgatgagtagtaggtgattgggtgaatggtatgtnnnnnnnnnnnnnnnnnnnnnnnnnnnnnnnnnnnnnnnnnnnnnnnnnnnnnnnnnnnnnnnnnnnnnnnnnnnnnnnnnnnnnnnnnnnnnnnnnnnnnnnnnnnnnnnnnnnnnnnnnnnnnnnnnnnnnnnnnnnnnnnnnnnnnnnnnnnnnnnnnnnnnnnnnnnnnnnnnnnnnnnnnnnnnnnnnnnnnnnnnnnnnnnnnnnnnnnnnnnnnnnnnnnnnnnnnnnnnnnnnnnnnnnnnnnnnnnnnnnnnnnnnnnnnnnnnnnnnnnnnnnnnnnnnnnnnnnnnnnnnnnnnnnnnnnnnnnnnnnnnnnnnnnnnnnnnnnnnnnnnnnnnnnnnnnnnnnnnnnnnnnnnnnnnnnnnnnnnnnnnnnnnnnnnnnnnnnnnnnnnnnnnnnnnnnnnnnnnnnnnnnnnnnnnnnnnnnnnnnnnnnnnnnnnnnnnnnnnnnnnnnnnnnnnnnnnnnnnnnnnnnnnnnnnnnnnnnnnnnnnnnnnnnnnnnnnnnnnnnnnnnnnnnnnnnnnnnnnnnnnnnnnnnnnnnnnnnnnnnnnnnnnnnnnnnnnnnnnnnnnnnnnnnnnnnnnnnnnnnnnnnnnnnnnnnnnnnnnnnnnnnnnnnnnnnnnnnnnnnnnnnnnnnnnnnnnnnnnnnnnnnnnnnnnnnnnnnnnnnnnnnnnnnnnnnnnnnnnnnnnnnnnnnnnnnnnnnnnnnnnnnnnnnnnnnnnnnnnnnnnnnnnnnnnnnnnnnnnnnnnnnnnnnnnnnnnnnnnnnnnnnnnnnnnnnnnnnnnnnnnnnnnnnnnnnnnnnnnnnnnnnnnnnnnnnnnnnnnnnnnnnnnnnnnnnnnnnnnnnnnnnnnnnnnnnnnnnnnnnnnnnnnnnnnnnnnnnnnnnnnnnnnnnnnnatggatggatggatgtgatggttggatggatatgatagatatgatggatggattgattaattgataaatgggtgggtgggtgaatgatgtttgattggtgggtaatgatatggataatgggtgggtggatgataagtgaatggatgagggtgagggatgatgcactggtaggtggggaatgtgttagatagagggagagataggtggttgatggatggtggtagagaatgagtggtgtgtaaatgtgtagcggtggatggagtcagaggaactttcctgggacagtggtagctacaggaactaccacctcagaatgctgggttatttcctctgaggctgttttcttaccttctctctcactagtgtgagaccttacagatgaatctctatatctcaagttaagatttctagttctttcagggatagttgcagaccacctggccatggctttcctgagagaaggtagacaggcccagagctacctgtaggcagtatatggaggtggctgaggcagagccatgaggaccaactgccaggtgctactcccacctctcagctgctctgcctaaggtctcatctgactcacacaagctccttagaagcttctctctccagtgctcagtatcctcagcacggggttcattctgcttacagggacccaggcagcctggagcctgggcttcccatcagcccgactcatcaacgcgagcagccacgtgtgtgtagaagcacattctcatcccccactgagatgcagctgacaaggcctgggaacccgcagtgtgagatctgtacctttgggtcctggtctttcattaaagacacaagtgcattattttaacagctctgtgttatttgtgtgcagtgtgtctacaggtgcatgagggtggagtactcacacatgctgattggtatggggtgtttcctatcatactacacttttttttttttgagacaccatcttttactgaccctggagctcatcgattcacacagcaagccagtgagcttctggggtcctcctgtctctgccactcagggttgacattacccatttcacaccctaatgtttacattgcaagcacattgtttccccatctgtatgtgtatgtgagagagattgcacaaacattcgtgcacgtggaggtcataggacaaccacgagtgtcaatcctgggaatgacaccatcctcgtttgagacaagatccctcattgacttaaagctcaccaagtaggctggagcacctggccagcatgtgtctgtctccaccctcaccccccacccccagcactgggactatacgtgtgcaccaccattggccaactctttatgtggattctgagcattgaactcaagttctcgtgcttgtccagcaagtactttactaagtgggctgtcttcctaactccccaaaaatggctttaaagaaagcacagaacagtccataggtgcagcttagtgattgcctaaaatggaccaggccctaggtttcatccccagaatgcctcccaaagatcacagaggcacccactgtatagagggtgccattctcgctatgagcatattagctttcagtcctcagaaggagccttgcacagttatcacaagctcttggagtacttcccgcaagaaataggcccctcccttattctttgaaacacaacaacctggcctttggggatggatcacttctcattcctagaagtaaatcttgtttgaggtccttgtatctcaactgccagcccatgcctgacgctgtcctctcttcttgcatctgcagggcctcatcaaggtccgcggggacaagtgctggctggatctgacctgcatggacttccactatgaggtgagcacagacctggcagtggctgaagcatcagtctcgctgctctcagaggtcccttcattcctcctttctctgcagcaggggcaggtgaccaggtgacttatagagcatctccctcctgctgggccagttcctctctctggctacctggttccctttcctgtccaggcctccctctaggtcaaggtaggccctctcctgggagctgcagctcaggctgtgtctctcttgcaggtgcacgatgaggctaccccacacctcctgtgtgttgtactcccaaagtcagtcatcatgggcaccaagtctccactcctcaaaacaagcttgcccttcccagatgctcatgagcttgtactggggatgagggcagggacagctttattctgcaaattaatccaagggcatgtgacattgtagtgatgtccatctgcccagcaccccaagccagtggcatgtatctcatgctccctccctctccctgcccagcccacactgcccactgctggagaacaggagttagtcgctgcctctctccattgaaagctgctggtactaagctcaacctttgtcacattttatgctgactctagacacttaagttctctagccgctgaagacacaagcccatgcagctctacctctggtgtgcccatcgctgtcagtcaccttcagggatgcactgtctgctgtggtgagccagggtggctagacttcactttttaaagccttgagagcccccatcaccctcatctatcccagacatcctgtgtctacttgcctagggaccccacacgtctcctctttcctatggtggggttctcaccttgcactgacaggagagcagccattagagtgagtagctggctgtatgcaatgaactatttatacatatagaccacggcacagaggacagggttcagagacctagacagtgaagcctgggctgcccctgaccctcaggcagcagcatcttcctaagatggccccacacccacgtagcatgatgggtgtcaggtctatggacatagtctgcatgcagattagcactggcaagtctagggactgcctggatgcagagttcttggaactgatggaccaatgtctccttgacgcaaagccacatgaggcctgttctgcagaacacactaaagcctttatccacatattcctcatcccacatctcactgtaagcctaggcccactggagagctttgaagcatcactggatccctgtccccttcccgagggcctggccaagcacatgtgagacagggatcgcatcccatccatagaagcacatggccactgctgcactgacccagcagggaaggtcaactgtgaaggttcctgagcctatcggccaggtgggtgaaggcagtgccttcatcttatgggtcagtttgatgctacagtggtgctctgttcaagtgtggtcagtggacaggatatgccactagccagcctgcagatagtagaaatgatccaaaatctagctcttcctggttaaagactggcctagtcatgtaacagtgtgcttgaagagagtgcctgtccaggcccccgtatcaaggaaggggcaactgactcctagaccagagctggcatgactggccttgggacagagccagacccaactgacctgggctgggagggaaggggtagtggggagaaggccctcagcacggggtggggtgctcgctcctcagtgcgccacccacacagtaccttgcctcacttgtgatgactgtccatgtgggtatctgtacctgtgattttggtgacacaagtcacaggcagcagtgcaggatggagagggaagccctggtcggcttcaggcaaaacatgtcaggggcaagtcctccatctcagccctgcagggacatgggcaggcagagagggtacagctgtgcttgtggggcaggccgatgccaggcccggccttgtggaatcgatgcttatggatgggttaaactgtggcccttgagctctaagagaccacagtctcaacctaacagcatccagagacacaggtgtcccaggtgctccacactgtctgtccagtttggctataagctggggttcccacagccatgttcagtcaaatgacaggtagactagaacttggggacatttcgttgagatttgtttgttgtgaagtatacacaataggccaaagaaagatatgtggtctctctggctccccatcattaagtcctgaagcttgagtgtcttggtctgagttggagtgattcgccatgtgggcacgaccatagatagccagcatcagcaccggccctggggtctggtaagcagaacgctcatgccaggtatctctgaccaagctcacccaggagaagcatccccagcacggacttattgtggaaaacagaatacttcccccagggccagcctgccaggagccgtgcgcccagagtctggacaaaggccaagtatagacgctccttggctatggctgttggaagtgtagtattacagccagccagccacgtagcacacagcacattggagagcgccagtggttcctgagttacagctgaccatgtgctggagttcacaccatgaggatcatgcatggccagcccaggaaactaccagggaatggcttctgctgagcttctgtcactcatacaccacggtaaggttgaaaggccctgaagctgatgatcttcatattctttccatatcgtgatgtcctagctccaagcccagcccactagcagccacaccacccatgagactctctacatggtcttctgcgtgatatcagacaccagtccctggaggggggactacatacaatgtgacttcacaggtcctgtattctgtgcctggaagagatgagtgggtttctgggccctgctgcttactgcagtgctctcttcaaatgtggctcacgcgatcactgatgaccattgtgcaggcccggtgctcagctctgtgttgatgtcatacagcctctcccaacatgtcctctgctggacaccatctgccaagaagctcggggctttgtccacagcatgacagtcacagtccactgtgcgcagcatccagagagtgctgtgagatgccatggcccacagcacttgctgatggagacaaatacagatcacccatagcaactgggtaccacagtctgaagtgcagtgaccatagtgcagcagggagtgtttcatgtttgtgtgtttgcctctgaccagtgaatgattccaaaccctcaacagcagatgctgccatccctcacattcagaccttgacacctcctgttgtcgggtatatcactcgtagagaaagcttcattctataacaaagtactatcaaggatggctgccttttgtttccctgagcgttagatgtttggtagcctaagagccaaactgcccacagagggctgtacccgcctctctccctctctctatcccttacacctctctccctttctctctttctctcttcctctcctgtcttctcgttctccttctccccttttatctgtctctccctctctctgtctctgccttccttccccttgcccccccccattctctaatttttcccccaccccccatcaccctgcccgccctttcagcgccttgctcagggcaacatgaatgaggtaataggagtttgcactgttgctttgccgagctgacctttaatccaaggaaataaatcactttcagctcctattattggtgaagccctgcagcctcggcatgcacaaaagaagcctttgtgtggtactacttgtttttaagttagagtgtcaagcccatggtaagagcagctgatgtcacctccaccgtggtcagcacaacaccagtgccatgattatgccgggaactggcaggctcagcatgcatatcccatgggtgtgtggatgcacatccctatgtgtctacatatgtggcatgtgtgtatctgtacgcctatgtatatgtacgttagggtagtatgcctggcacagtggacagcctgctgcaagggctgagaacctgggctctgccgctttcttcccgtccctcctctctctaactgggaatgtgctttgtgcccacaggcagcttggtttagcatcactgtagtctctcctctgtctcttcagtgtaggaggtttcatttcctgtgtaggtttcctatctctaaagatgggaacgatgtccccaggttgcagcaaggatagcactaactcctgagggtgccaaacacttgggggtgggcatgtgtctcagatgctccacacacacactggagctggggcagcccagcctgaagatgccatctgccagtccctcagcaggcgctgggagaaatgcactgtgggaaggagggacctgagggtgctacctcttacacagaatactctcgctgaccacatgcctgcctccacagccctagctttcaggcaacctactgggagggctcggtcagatgaggctggcccgtgtggtctaggaacacatggtcagttgggctgtttcttaacctgaacagtgtgaggatggaggcagatcgctgccctggccactacctccctgcagggacctctgtcatcttgtcatctctctggtctttcagtgcgactctgggaagtcggttgccaatatggttttcagggccctggctccatagagccgtctgtacctgccaaagccatgtggacacatgaaggcccacgtcttctcttccattcttttaaactaactgctgtttccaagagttcagaaagcaacatgctaagatgctatgccagagagcatttcaaatgcctgaattccaggagctcagtgggtagaggtgcttgccaccaagtctgacagttggacttcaatccctaagacccacatgttagagagaacagaccccctccgcttgtcctccaatctccatatgctgtatggcatctgcccatgcacacacaataaataaatacatgtacagtgttttgaatggtggcatcagaaccactgtttcagccatgacagaggtcgggagggactgtcatctggagacacgtcaggtcacacacatggttgggggcgagggtggggttcatgacatctctctatatcatcctttcacctcaggacagtgggtagcagccctcacagaagtcaggcttggtgaggctgtgtgtcccagtccccaagccctccaggaacacccaccaggctcccatccctggagctcagcctgctggccacaggcacaggcccctgtgagcttgtggagtctggctgtgtgtagagtgtgtccactggagagaaggtcctgttctgctaggaggttggctctgaactctcagttctacttggcacatcgtctgggtaccagttcagtgcattttctcctgcttgccaactgcaaggagtggtgtccatgactggatggcacctgagcaaaagaggccacttacctcatgggccaggctctatacaagccacagactcacagggagccatcctctgtctctgtgatatggaacatctcctcacatttgatccatgccacctaacatccctgatgcaagaccccatgcctggaactctggcaagagtaaagccccggtggttgttcctggagctaccatgtgtgagacgaggtgaatacaaatggtgcaaattcctgtccgaccatcttgggacagcctggggcagagagccacagaggagacacttgcctttcagcctccccagctgccgctcctgtttctctttgtcctcactcaaggcccaggaaggccttgcagtcggggttagtgatttcaggccagtcccctctggcctggatgcctctcaggttctgagttgcttcatgggcatcaagctgattattctcctgggacagagccttcaggccaaagcttctggctggtggcatctcacatcatgtcaggctccttcctgggcaccgaggtggcttgtgccccaacactataagaactcattctctttttgttttgttttttagactgggtctctctatgtagtcctggctgtccccatgtagaccaggctggcctcaaatcagagatatgcctgcctctgccttccccaagctggaattaaaggtgtgaactgccatgcctggcaagaactcactagttctttaatacatggctggcctggcccagcagggtctcatgatccaataaagagtggtatccctcatccaccccttggtgctcatacagacacgcatgtgtgggcccatggctggagctgcccccacaaactcatcatcacaaagtacagtaccacctttccccctcctgcacccagaacccacccagtgtgggcctgcagcccacagatcctgcttctaattgcaactgggagacacacactaccagctctcttgggctgtaattggacaagggtcactgaatgccctgcaatttaggggcccactgatctgggaataatttgtcccaaggttgaacgttccccaggaaagctgtaaatgttaactttatggaagcagtgactgttgtatccagccgcccggtcgctgaggcttaatgtgcttgtccgacggcagcttccttgatttgtaggaaaaaaaatggtttttatatgttttccgggcctgtgcatgccaggcccccaggcacaccgtgctgcagagtcaggcctgtacctcacatcactaagaaggataagcaccaggcccagcccaggggtgctaggcttgcatctatctccaggtcagcttctgtgctgaattctcatcagagtgaagacaagcaggtataaggtctgcaggccactgttgtcatagcagaggtgagggcagaaacgcccgactgcccctctgactctgggaccttggactttgtttggtggcacactttcccaggtggctctgggaattaggtgacatagtacacactggaaggtgaagccaagctcggagtgtgtaattccatttcaaaatatgtgagaatttccgatacctttctcttactggtgtctcatgtaattcctttactgcagagagaaggcttcgcatgcctcaggtctcttaagacttgtttttcaaaaatccgttttgtggtccaggatttgggtcattctaagggggcattcctattgggcctgaagatgtgcgctgtgtgcaaggcagaggtcaacaaggctgatgttggttggtagcgcttccagagccaggccctctgtgttcttccttaatctctgtctgcttgtatgcagggaggcggggagggagggagggagagagagagaaagagagagagagagagagagaaattgagattgaaatccccagttaaaactatgtctacactgacttgttctgtcccctttgcttatgtgtttggagctgtgttcggggcataaatgtctgtgctactatacccgtgggcgccctaaatctgcctctccattcctgctctctccctcgctctctgctgcggtgacaggtgcctttgtggaggtgcctgcttcatccttacctcttagcccgcatatgtcctcacattggaagtcacttctcttgggcagtgtgccactgggtctaatgaacttaccctgtctgatggagtcggccacttgctccagctgtactctctgagacagaggtgtctccgtctgtcatcttgctgtctattttctcttcccaccatcgatcttttatctttatattttttctgactttgtgtggatttattgattattttttcccattagtagctgtaactgttcatctggatacttagtcattgtttggtttgttagctagaactttgtgtcaatctttgttattttgtttctgtggtcattttaggatttatactgtggtgtgtgtgtgtgtgtgtgtgtgtgtgtgtgtctatacctgtgtgtgtgtgtgtctgtgtgtgtgtgtgtacctgtgtgtgcgtgtataagacataatcatgagtggccaccttggtttaccttccagtgatactagtttaatccttctgagggagtttgccaacagtattctagcaatgcccactgctattgtcttactgattgcttttaatcatcataaactgtatgttatttgaagttcacatattttagagatacctaagggtcagtgagatgtctcagggaataaacagcccctgctaagccagcacgacgacctgggtttaatctcccagacacccagtggtaggggagatctgactccagaaagttgccctcagccttcacatatgcgctgtggtacgcacggtgtgcacacatgcatgcacgcatgcacataggctaaactaatttttaaagatagttaaagcagaaagcagccctgtgctcctcagtagacttgcagactcctgtgctcggctttccttccgcctcgaagcttcctttaccttctcttggtgcagcttgtaggaggtggaatctctcagcatgctgcctgataatgtctattcccctttagttgagcactttgtgctggcaggttagtgtcctaaggatgttctgtctcctcgcttgcgtcattcctcaggaggagtcctcctctgcttctccaacacatcttcattctatttctatttccgtttacacaaatattgactcgtctgattagggtgacgtcattctcttcctgttctgtatgcttgaggtctgctgagtttcttgtatctatgagtttgtgggtttcatcagcatttgaaacatgttttgtatccaccatcttctggagctcaggctacacaagtattccacatgtgttacatgtgtgttacatgtgtgtcacactgcctaaagctgtcccttggatcactagttccacatgtgtcacatgtgtgtcacactgcctaaagctgtcccttgggtctctagttccacacgtgtcacatgtgtggtacatgtgtggtacatgtgtggtacatgtgtggtacatgtgtgtcacactgcataaagctgtcccttgggtcactagtgctttgtttccctttaattctttttctcgtttggcttcatctcggcttccactgctgtcttcatatacacaccttatgtccttcctcatggagggaccattcttgtgaacctaacttcataaggccatgagaaatcccttgtcctgtgttcttttgatggacagtcctggaagggagacccttttgctcttcagccacttctgctgataaacctgccaagtgcttttttaatggtgtaaatgtaaattccttccctgttaccttttgtgtggtttctgtgtcgctttgcagtttccatgggaatcctactgaacattctgaagtggtttatcccagccttgcctcaggcaatggcatgccagtgaacactctgctcccctgggccctgcctgctcccctcagttgccggtgcctcggaattacacctttatacgttggaatccaaagcttgagctgacaatcttttaaatgtgttagtctcaagtcacatgaaaacaaaacataggagcaaagccaaagctccaatattgctagcttttagactaatggcttttaaaatgcatgtgtttcttgcataagaagaatcgtaaacctgctacagtctcgagagcttttgaatttgagtttgaagggatctttctcttccctgtgtcaggctttgagggtcctgggatgtgaggctccaggtcccgcagggttctttctgtcccacacatcaggggagacgcggcagtgctgctgcatgtggctgtccacacggcagtgagctccttcacagcagagcgaccttcctcatctggaagggagacacctgtttcatggaaatgacagtcctcagaacagccttcctcacagtaagatgaccttcacagtgctgtggccttcctcacatgggggtaacagtgggatgtccttatgtccttcctcatggagggaccattcttgtgaacctaacttcataaggccatgagaaatcccttgcctgtgttcttttgatggacagtcctgtgtcctagctggggcttgaggagaggggacaaggattcccttctcagatgatccattgggtgcacatctagtggggacctgtggtagccatcctctgtgttaatctggaccacagaggaaaccatattgcctcctccagctcacaatgcttaggtcatctgagtggccatccttacgtgagcacatctccttctccaaacctccaatcaccctgggatatgggaagcagccagcagctggcgctcagcaccgaaaaggcacagcttccagacctttcactcaagcccaaagtgaccaccgtgctggctctcagtctccaagagctgattaccatgatccctaggctgctggtctgctctgctcctagaacaccgtggccttgtttgtgctgaggcctcactgtcactgtgagtcattccagggaggggcttggcactgtcatgcccgagtggtaagcagtattctggtgtaagagcagcgactcacccataacaacctagagctcgaggtttggacctgccttgtgcgtacatgcgccaccttcctctgggctccatgtgggaccagtccacagatggcagggactggccagtggtgagggctgcagcaagccagagatcgggtcaacatgtggcacttgataactaagaaatttaattctcagctgggtggtggtgatacacgcctttaatcccagcacttgggagacagaaactggcagatctctgagttcgaggccagcctgatctacagagtgagttccaggacagccagggctacacagagatcttgtattgaaaaagaaagagaggtgggggggagaggaggnnnnnnnnnnnnnnnnnnnnnnnnnnnnnnnnnnnnnnnnnnnnnnnnnnnnnnnnnnnnnnnnnnnnnnnnnnnnnnnnnnnnnnnnnnnnnnaaaaagaaagagagagaaggaaggaaggaaagaaaaggaaggaaggaaggaagaaagaaagaaagaaagaaagaaagaaagaaagaaagaaagaaagaaagaaagaaagaaagagagagagagagagagagaaagaggaaatttgtcttcaggatgacaacaaggtgtccttgtcacaccaaccccaagcatgtgatcttctgtctccaggaagaggagccgacttttctgttctttgaccattcttgtcagggaccaatttgagagcagcccagacctgtatctccccaagatgtgccaccctccagatccccaactaggtatcttcgccctccgtgtttctttgagttcttcttatgtaagatagtctctttgtatcgcatatttgtaaactgtggacccaaggtctggcctacacggtgcctgtcgagacactttgtcactgctgtctgacgagccacggtgctgggcctcagcgggctgccatgtcaggagctctcggggctctgttgtgctttatgggatgcgatgcgatgttgccagcccaccgcagccacacttagctactccacagcttctatgggaacagaaatgagccttgtcgctggcatggtgagcacagaggctgcggccctcccttgtgaccctcaggcctgcaccatgagtcctcagttcacagaacagacccttctggacagtcagacctggcccacagatcaaggaaggctgtgctcccccgggataccgtcagcagaggtgcagcatttggaaaatcgagtggcccaccttgccaggaaggcccgtaatcactgctcacgaacactgccttctgagttattactctcacttttatcccgcacaggaaagcccacaggactggggtcagtggctcctccctgtaaaacccagtttctagtcccctcccccagcaactgcctcactgagcttgcttagaccccttgctgagctgaggtcactgccagagtttctctctttgtagtacattgcactgcaagctgacagacattgtacggatctaaaacactcactgcgcgagtgctgttccatactgagctgaggcgatgtcttccccggctctgtactcctttgccagtgtgcatgtggccatggtcaccctccctcagtccccaaatttccccaccctgatgggacatctgggagtgtcaagagcccattagctgtgacacagtccagtgctaggtgaaccactgtacctccccatccatcgacatccatcgcctctacagatggcgtctccagtcttcaaggccagcggatgtggagctccacactgattcccagaatctgcccaacaggggacagtgacaagggctgcaaatgcagcccagggtggtggcaacaagccaagagtgttttgaggagaaggttgggacaggcagacagaaatcttgcaacaacctctgtctctggcacagggctactgggacactttgcatggactggttgctcattctgttggcaaacaattaaaagggggaggtggtgccccccacggagctaggtggagggtggcctgaagcatccttaaatgaaaaacttggcttctgtcctgtcctactaagctgtttatttttcttgtgatcacatggatggttcaagtagcaggacccctgcgtggggtggagcagagcctgcagaggagcccagcgcttgaggggaggtgttccggcaggcgctccacacctatgacaatggggagggttgacaagtgggttccttaagtgccccatagccaaggtgaaatcccaagggggttgtgcctagggagcagcaaagtacgaagctctgtcaaccaaacatcgtcccagcccttcctctgccaccttcactttctctcgtttgttcagggctgctgctactgtgacacctgtcccctgactctagtttcccttatgctaagcccatgtgctacaccacaagcctgcgtggatctgctggagatcccgagaaggcaaaagcaccccaaggcccatggagcccaacagtgtgtgggagacctgaggtggaccgtgagtgcttgatggcaagccactgtcacctcaggaagccatgagccccaggcagcaaccacccacagttctgctggttcttgtatctttagattcttcatctgttcacaagtgtttaaagatgtctccttcaactacagtttacacttctgcctatagagactgagggtttaaaacataactagaaatttgcttttgcttcaaaaatagcctgcacacagaagtcccccagaccgcacagcctgggccagttgcatatacacagggctggagagcagaaggtttcatcatagccagggcagtccccaccccacccccagccccagccccaggcagccaaggctggtaattcaaagcccacttttgtccccacagactcagcccgtgcccaacccgatagcctactacctgcacaggtcaccatggtggttccaccgctttgagaccctcagcaaccacttcgtggagcttcttgtgcctttcttcctgttccttggacggcggatgcgcattcttcatggagtgctgcagatccttttccaggtaggctgtgccaaggtgccaccactcagggtccccatgtgtctacagcctgcctcatcatttctcagttagccccatggccatggggagaggcctccccagctccgtctcaccccttgcaggtccccactgtgtcccatccagtctggattccagggtccccttctcagcttccatgagcccacggagggttctcgttgcctttggggagctgcccaggagcagcaacacagaccttgctgagctatggctccatgcaccctccctgtgttcttaaagtcaaccctaaaatttcagtttctttctaccaggcatcagggcaagttgttgatttaagacagggtcttgccatgtaactctgactggcctgaaacttatgatttgcctgcctttactccccggggtccgatagcacaggaacgcgctgctctgcttcaccctcatcttgcttttcaagtcagggtctcaataagtggtccaggctgctcttaaacttatgatcttcccacctcagcctccccagcagcaggcatgacgggcccgcgctgccagaccagggtcatcttgtggttttggttctccattttcagtcatgaacagatgttgaccaaggctgacattttccctgtcagtcaggagagggtcgctgggttttttttcctccttcaatattttaatgagatgaattacattactgttgctcaggctgggcacgtttcatattctagaataaactcagcttggtcatgctgcagatattttaatatattgctggagctaatttgccagtgttttgttttagattttgcatgattgtcagtgagagagacctatgtgtagttttccagcctagtgtggattccctgtctgggctcattgccccacactcaaaagacaagcccctctctctgcagggtccatggaggcccaggcagtccattctccgagcctgggcaacgctgagtgtgcacagtcgggcagagcttggaagccttgcagtggcccagcccatgactatgggcatccttctcaaagcagctttgcctgggaataaatacttctttttcagctattttcaaatttactagttaaaaaggagagagggaacgacatgttctcctcagtgcaaagttcggacccatgagcctctttctcctcctcacaccctttctctctacgcaggattggttttaaatcagaactggctgtgagcagattttgagcctcactggcacctgtgccacagtgacctttggctacgaagccatctctggctcctccctctccgccagcacccagtgtgccaataggttagctccattttgttctgtattctaatcaggatacttttagaagcgatgcagagatcacagaaaagtccttgtgccccaggtccccactgtgagccacttcacactgatggggttcacagtggcagtgtgacagtgcacatgactgagtccaaggagcgctctctggtttggacaggggggattgtgtatgcaccatcactgtcacgccttcctcccctgagtctccttagtgaacactggttcatcttcccccgaactgacccctggccttcagtctttccgaaacatcctggagttgggaccacaactctccagccatctctagtcatctctctagccagcttctctcagtcatgtgttcggggctccttgcatctccctatggcttaactgctcatatctcctcagagccagcatctccggggagtacctgtttcccacgagttttctgaaggccacagacagtgctaatcttgagatgacaaaaaaatatgccctactggcccccacacctagacccaccctgcctgggaagcagggccatccagctggatggaccggacacgggggaagagccagagcctcaagtgtgtctccatcttgttctgacccatgtataaggttgggtagagtagtggggatgcttttggacctgatggcctagaaaggaagttggtgcctagaccggcccttccagaatatcacccagagccccagggagtgaggaccaagacaggcacatgtgttgcacactaagcacccagggatgtttgcagagaccaggactgggaatcacttcctgcagagccagctgcacaggtacgagaaacaggtatcaaaagtccacatctgggcatagcagataccttgagtgctggggtctcctggggttcaggtgtcttctcttccttgtgtacaaggggctgtgcagcaagcttctcccagcaacccccatgtggtagaccccagaaaatgaaaaagcctacaccacaccctccaggacctaccaaccatcttgaaccactattaactcctgtagtccttgcagggacagcaagacatccccagtgtttattctgtcaagtaggggatccctggttagcagtttccacctgactctcgtggtggagaacatggaactggccacatcgagtctagagggaatggagctatgcagggctatggcttctccccagtcctggtcccatgtccccagatcccgctgagacacttcctgcccactaggattggtctgagcagtgcatggccttaaccatcccaggagcctgtgtggaaggtgttgggcgtgactgcatgctcttgaccatgcagcgctgtggcacctgagtgcagcctggtgtggagccgcactgctcccactctgacccaccggttcctgtgttccttcctgtgggccagagcttgagttcactcacttcctcccacactcggtttacacagctgctcctaggatccctgcatggccgcaggaggggatgaccccggaaggggcggtatgctcagcctccgctgctgagccaggtcaggacatccgaggcccaccatggtatcagtcctcaccaaggaacaagaaggaggtggggttgggcctgagactcagcaataggaaggcaggaaaggatcttgggagagtcagattttgaggttgaatctactttattaaggcctcatggggctacccggattccttgagagtacacacgtcttctgtggaaggtccctgtgactacagacatgtcctctgtggaaggttcctgtgactgcatgcatgtcctctatagaaggtccctggactgcatggactgcatgcatgtcctctgtggaaggtccctgtgactgcctacatgtcctctgtggaaggtccctgtgattgtatgcatgacctctgtggaaggtccttatgaccacatgcatatcccccggaaggtcctctcaagctcctgcctttcctatggaagcctgcctgcaagaatgtgtcctccgtggtaactgcaagcccagcagggacatcagaaatcccccctcttccttttggggtcatgttgcatctgcctggaacatctgctgtaacctctctggggctaaataccaccaacacacgctcatcttcctctgccgtccccgagcctcacccactccaggccggtcatctgcagagcgcactgagagctcgctgaggactctgccggccaggggtaaacacagatgggctgtgacgagattcatttccctcagaggaaaaggcagcggtgacgctaggaggaaaacaagtaagataaggtccctttggagcacttggaccgagtgtgtgctgcatgatgaattccagtcttactgaacaaataggccatgtggggaggggactctgaactgcgtgggctgagcgggcctgacctctgggctcagtcaccatctgtccacctgggtgaagtgtcacaggctctcctcagtgctttattagaaacaggattccacctggtgacagttaacctgcgttgtcaccttggctctaggtgacaaatccactccaggagacaaatgcctgagcgtgtctgtgaggatgtttcagagagaattaattgaggaggaaaggtcccaccaccctgaacatgggtcgcaccatcccacaggcatgagccccagactagatgaaatgggaagagggagaacagagagctgggcaccagcatccatctctctctgcctcctgaccacaggcagaatgtgcccagccaccttgacttccatgctttcccctccttgatggactgcacatcctccaactgtgagccaaacccttccctccttcagttgcttttgttggcttttccacaacaggtacatacaaagtgggctctgtgacacttggttctctgggatttcccacctgagtacggggagttttgaaaataggttcataccagtggcccccaccaacaaggccatgagctcagggagggtctatgacattcagagctccccgggcatgcaaccatggctgtcaggcagctgaggaggcctcatgcagtgcaaggtcccagcctcacgggagcaggagcagacaaacatctgcagcagatggacatggcatctcagcaaagtggttagtcagagcctcacctcgaggtgctgaggtgcagcctccctgctcaggagctagagatgatttgaattgcctgaggtggctaccagcagaaagaaaacagtgactactgaggactcagtcaccaactgtcaccctcaagaaggtgccgactacagctttcaaggcaacaggttctgccttgcaggcaagactgcagcccagtaggatgtccagtgaccatgtagtggctgggtgccacctgaggccctccctccagcaaccttaagcagcacctgcagacacactgagcgcctgaacagcacttttctatgccttgcttcccatgaaaataaccatgactggggaaagaaggaataaaggttgccatgtgcccctggaagctaagtgggggggatcctggcacagaagtgtgcgccatagacagtccacagaggagaagccaacagggcacacagataagagaggagcagcaacccagcctgttgcaccatgggaagtcttaggatcttcgacctgtgagctaggaactcaagaaggctggtagtcggggcccagtccaaactcaaggaccaagaaccaggaaaggcggttgtctccatgctggctttatccacggaccagggacacccacaggcctgagcaggaagaggtggcatccggccctgggagtagagatgggcctttcctggaccctcttgttctttccagacccttggtgggtgggtgatgcccagggcaatgggtagagcatcatcgttccggctggttttcaaatgcttctggacctgcacagacacccccgaaacagtgctctgtcagctagctggaagtcaggctcccacatacgatgcttattctattatatcaaagtgagccaagcactcagcacacacctgtaacctcacccacaggaaactgacaaaggaggtttgggattttgaggacaacctgggcctagagaccttgtctcaaaaaaacggagctctgtgatacaggctaatttgtatacccattgttttcagtgatcacagtcatgatacattctttattattgtaaagaattttaaagacttaaaaattttaaagatttttttaaaaaatatatgtataaggttggggggaggggggttgtgcacatgtgagtgcagatgctgcagagtccagaagagggcgccagaagccccagagctggagttacaggcaggtttaagctgcatactgtgagctaggtcctttacagcagcagggagtgctcgttaccggtgagctgtttctccaacggcctaaattcggatttgcatttcaccgttttagcactgtgcactggttagctccacacttacacagagtcaggctctgcctgaagagggtttcattttgttctttttagttactagatgggcatctctcacttaaaaaaaaaaacaaaaaacaaaacaaacaaacaaacaaccaaaaacagggtctcactatgtagagcaggctgacctcagactcagagctctgcctcccgagtgctgggatcaaaggcatgtgccaccacacccagctcactgggttttggtggggggggttgttgtttgtttttgttcggttgttttttgttttgttaagatagactctctcgtgtagttgaggctagctttaaacttgcagcccttgtgcgcctcttcctgagttctgggacatgcaccaccacgcccagcacctcacacctcactgcttgaatgagggtgtccttccctcattctctatcacacctctctccaactgtgtggttcccccgttctccatcactcctcctagctgtgtggttcccccattctccatcacccctcctagctgtgtggttcccccgttctccatcactcctcctagctgtgtggttcccccgttctccatcactcctcctcctcctagctgtgtggttcccccgttctccatcactcctcctagctgtgtggttcccccgttctccatcactcctcctagctgtgtggttcccccgttctccatcactcctcctagctgtgtggttcccccattctccatcactcctcctagctgtgtggttcccccgttctccatcactcctcctagctgtgtggtttccccgttctccatcactccttgctccagctgagtggctgactgtcactcttgaacctgctcttccatgtggtctgtctttctcagtggttttggatcaggacccgtgttgtttcttcaagctggttctggtcgtaattttctgagcttctgtgatctgacactgttgtccctaacgtgaggaactcgagggaatgacttgttcatgttccctactctaggactccgttccctgtggatggatgacattttaaatgcaacacatttaaatgaatgtgtgagagtgggcacacactcaggaacagagctgaggctaagcaggagacagcggagcattgaaatgcggctacacagaggatccagtccacataaagtgaatcctggagtgaggaacataaacaagtcactccctcaagctcctctagtcagagacaataaatgcacagatcacagaagcgcctggcctaacagtgatgcactgcatagtctaatcaatccagagccaggaaaaaaaagagaagttgggaccacctgggttctttcactggccctaaagaaaagatggacccatatgaaagcaatgcccagctgtccagtgaggttttatactgcagaccaggccagtcacagaaggtaacaggcaggctggtccagcttctaggaacagacaggggtgctcagatgtcttccacagacacgtaactggcctccacagcaccccagggagccagggcttgcattccttggcacgagagagccgtcctcctgagaccgtggtcaggaggtctcctacatctttctctgttccctgggttcccaggcaccggtcaaccagctttgcatatctccctccgactctggaaagtcagagctgccttcctctgccctcaccccaccccattctctgctccctaggtcatcgtagacctaaacagaacctgcctgtctagatactgtatataccatgtctatccacaatgaataccaaaagggaggggagaggtaaccggccctgcacccatagaagtctcactgtggagtgggtagaggcttctcagctggtataggaagctctggctgtaaactgcataatcttaaaccttccgaccacccaatgacaaggtgggcagcatgtgatgatggcatacgtagccaacaagggatgctaggaaatgcccatgctccacaacgaggcacccaagtgttcaggaggacaggagagggtgcgatacctctgagcagcagggccttgatcagtgcggggatcagcctgaggctgtaagccaggtggcagcaccagatggtaatagtgttgagccacaaccttcagccctctccctcctgcacttgtgggagtgtgaagtcctgtggtggccatcttggaaagtagtctacctcgtggctcagcacaagtcatgtctactgcaggagcacaagcaaggactctgaggtagatgtcacctattgggtgaccctccatagtaccccagaagccaccttgtgtctcccattccgtgaagctcaagagagcccagtatcatcagagtgtgaggagtgctcactgctgtaaggctccacagaatgtctcagagtaggggtgtctgactatcgtaaccacatggtgtgagcctgactcgaagcccctgagctgcacacagcgcaggtgtgttttgccatgtgatctgtatccattcagtctgtttcaaggtctaggctgaggccaggcttcccagtctctgtccttttcatttgtggctggcttccactgccctccaggtctcagccctaggccaccgtgttgtctcctgttcctgttttgctttttgtgaactccagatccctctaggttctcatgcccccacctccaagcaaggtctatacctcaagcccttcccactaggcctgcctcatcccagagctggccccatgatatgtcccagggagcccaggatgctcagggcaccacacggatagatcaagccaagcctccacagcctttcctgggcttgccaattcctgtgtgggttctacatccatgtacagcaagctctgcacctggggtctcagtgggagctacatatttagagaggacttgggaccagaactgagagaatggcagagaggggctcagaagcccccctggagcatttgctgggctaccgaggcgtgggcacccggcacagatacgtacatccctgggtcctaagcttatcatagtgtgagtctgcacccacaggtgatcctcatcatcagtgggaacctgagcttcctgaactggctcaccatcgtgcccagccttgcctgcttcgacgatgcagctctgggattcctgtttccctcaggacctcaaggcctaaagaagcaagtcctggagattcagagggaagatacacaaagggtccagcccaagccaagagacagaggtaaaccagccacacagcagctcccaaccccaccagccccatgaccctcctgcctaagcctcatgaaaatgtagggaggttgggtagccaccaggtcacagcactcaaagggtgtgtactgtaccacaggccctgggagggagcatctactatctagggtcctttatcaggcctgggccaaggtcacttgtctctttagccactcccaggatcccctgcttagacagtcacacttcattcttcacactgctttgggagaagttcttagctccagcataacaggtgtggctcaggtaccttcctcagcccgtgggttgggaggcagtatcttacatgcccggctggatatgtctgtaggtctttttgagccttgaatggcagactagcaggcaaggttttctgaagggatagtgcagctttgccctgggatcaggagcctggctggtgagaaacaattcccccacccccaccctcgggctaggctgcttggtgcggcaagtggtcaacatctccctgggcatcctggtggcctggctcagcgtaccggtggttatcaatctgctaagctccaggcagatcatgaacacctccttcaacccgctcaggatcgtcaacacctatggggcctttggaaggtatggccaggcgtcctggctgggtactgggctccacccttgtgtccatcccgacgcacttttgggaagcatgagcccgaggccctctccacctggggggaggcaggtaccgtggactcactggccgccttcatctcccccagtgtcaccaaagagcggactgaggtgatcctgcagggcacagtgagccccaacgccagcgcacctgatgcagtgtgggaagactatgagttcaagtgcaaaccgggcgacccctggaggcagccatgcctcatctcgccataccactaccgcctggactggctgatgtggttcgcagctttccaggtacccaccatgcgcctcttggaacagcaaaccctgcgtgcccgctctttgcaaagggtgctcagactcccaccaagagggtcatagaggaggggacctctccatagagtagcaggccctgccttgccctagacctgcctgggaaaggttcctgtgatagctcaggtctcctgaggcccagaccagtgctgtggtcctgcctccgcccttccctctcccccccccccccaacgaactagaagcaggcagttcctggaagactaaagagtaggccctcagaggaacccaatcctggtacatgccatactccagccaggcagtggagcacagaagaggagggggtgttcagagtcagaggctgcactgcaggtgccagtgtactggggggagtggctatccctgtacccaacctcacaaacactgtccttccagacctatgagcagaacgagtggatccttcatctggcgggtaagctcctagctggtgactctgaagccctggccctacttgctgttaacccctttgagggcaggactccccccaggtaagagtctccttattcactccagtctgtgatcagtgggcagtgtccactagggcctgggttgggcaccctgatccatgatggcattcagtagcagccagagactagaagactgagcagccctgaactggccccttccctccctctaccctgcctaccattgatgctgacagaaaacacggtcggtcctgtctccctggagaagcctcaggacagctgcacctggagctgcccacagctgtcaggaggggcgctgaggggccgtgagcagctgcgagggtggcagcccaggcaagggatgcagccaagtgctcctcatgccgcctactgtggcactgggggtgtggggaccaccagcctcactccccgtctccctccactccccgtgcccggcaccctacagccaccaggatatctgaactaggcacacactgaagtggaaccacactcctaggtttgctgggaaccagacatctctgacgtagctctgtgtccttccagacacaggagagcttttcactggccaacccctggccggtgtcttgggtttgtgtccctcctgggcttaggatgaggtcacctgattcagaagctctgagggtgtggtcaggtgtaccttgtaaaaacaaagcctgcaggcagatactgcaaatgcaaagatgcaggcgcaggggccctctgtggggtacagaattgatattccctattagtgtatgtgcaaggctgctgagatacagtgaatgccacagagcacaacccagcagcagggccttcatcacattctgcctggttgcagagctgaatgtgacctcagcctgcccccactgccagctgtgacttttgtcaaatgagtggtgactctggagtctccccgtgagaggatgggccagactcctccctaccctgccctgagcctgggtgctgcccataaaataaacacaggagctttgaagagtgggggaagggcctggcaaggggccccagcacccccagcatcaacctcccgcagcacagctttttcttgccgcctctcttcctgtctgtggagaagcaagcagcagcaaacacccagaaaggagccactgcagaaacagaagcaacagcgagggtaatcctgccaaagccatgaagcaaatggccctgctcttagcagggagagccagaagcatgtggactccactctggaaaaggagaagccactcactggaaggccctgtggtggcccagacactcaccacagcagcagtgccagcctggcttcatgtgatcagtgggggccttagattgccacctttacctggtagtgccagggtaccagatagaaagtctgggtttctagcatggagttaggagaagccacacaacagaaggttcagctcagccgggcttggtggcgcacgcctttaatcccagcacttgggaggcagaggcaggcggatttctgagttcgaggccagcctggtctacagagtgagttccaggacaaccagggctacacagagaaaccctgtctcaaaaaaaaaaaaaaaaagaaagaaagaaagaaaagaaaagaaaagaaaagaaaagaaaagaaaagaagagaaggaaggttcagctctgacttgggatccctaacacccaaactgctaagaaaaccacagcaagaactaggaagacattcaactgatcgtgaagacagtcaatggatgacaagggctgattctccccataacaatcgtgaggtgattatgaacacaagactcaagaaaagagtcagcaaagaaacagaagacagagggagaaccaaaggagtcttagaactgaggagtgagaaacgtcgtccctggggtgaagcactggatggggagggggagctgggatgcaaaggaggaggctgtggcctgaggaaggaggaggcagtggcctgtggaaagaggaggcagcgacctgtggaaggaggaggcagtggcctgtggaaggaggaggcagtggcctgtgggaggaggaggcagtggcctgtgaaaggaggaggcagtggcctgtgggaggaggaggctgtggcctgtggaaggaggaggctgtggcctgtggaaggaggaggcagctgtggcctgtggaaggaggaggcagtggcctgtggaaggaggaggcagcgacctgtggaaggaggaggcagcgacctgtggaaggaagaggctgtggcctgtgaaaggaggaggcagtggcctgtgggaggaggaggctgtggcctgtggaaggaggaggcagctgtggcctgtggaaggaggaggcagtggcctgtgaaaggaggaggcagctgtggactgtggaaggaggaggcagtggcctgtggaaggaggaggcagctgtggcctgtggaaggaggaggcagtggcctgtgggaggaggaggctgtggcctgtggaaggaggaggcagtggcctgtggaaggaagaggctgtggcctgtggaaggaggaggctgtggcctgtggggggaggaggcagcgacctgtggaaggaggaggcagcgacatgtggaaggaggaggcagtggcctgtggaaggaggaggcagtggcctgtgggaagaggaggctgtggcctgtggaaggaggagagagctgtggcttgtggaaggaggaggcagtggcctgtgggaggaggaggaggctgtggcctgtggaaggaggaggcagctgtcgcttgtggaaggaggaggcagtgccctgtggaaggaggaggctgtggcctgtgaaaggaggaggcagctgtggcctgtggaaggaggaggcagtggcctgtggaaggaggaggcagtggcctgtgaaaggaggaggctgtggcctgtagaaggaggaggcagtggcctgtgggaagaggaggctgtggcctgtggaaggaggaggcagctgtggcctgtggaaggaggaggcagtggcctgtgggaggaggaggctgtggcctgtggaaggaggaggcagtggcctgtgaaaggaggaggctgtggcctgtagaaggaggaggcagtggcctgtgggaagaggaggctgtggcctgtggaaggaggaggcagctgtggcctgtggaaggaggaggcagtggcctgtgggaggaggaggcagctgtggcctgtggaaggaggaggcagtggcctgtggaaggaggaggcagtggcctgtggaaggaggaggcagtggcctgtgggaggaggaggctgtggcctgtggaaggaggaggcagtggcctgtgaaaggaggaggctgtggcctgtggaaggaggaggcagtggcctgtgggaggaggaggctgtggcctgtggaaggaggaggcagctgtggcctgtggaaggaggaggcagtggcctgtgggaggaggaggctgtggcctgtggaaggaggaggcagtggcctgtggaaggaggaggctgtggcctgtggaaggaggaggcagtgacctgtggaaggaggaggcatccatggcctgtggaaggaggaggcatccatggccagtggaaggaggcagcagcagcctgtgtgagcaaccagctgacaacctagctgagtgtgaaactagaatagcaacaagatccagggtgggcactgcagagtccctaaggaaaagtcccagctgaggctgggaaagcattagtgaagagttcccaaagttggcagaagccccctgacctgagaggtcaatgaaataagggacccccagacggtaaatcatgaagagatgcacaccaaggcaaaggaagcatctagaaactgtagacagtggaggggctgagcggccagagccaccaccttgccatcgagggccaagtccagatctcaccagttcagcaaggctgactggccagagagccttcggagtcccctctttcatgcctcccaaacactgggattacacgtgtgcaccacaatacatgtatgtatgtatgtatgtctctgtgtgtctgtgtgtgtgtatgtgtgtgtatgtatgcatgtgtgtgtgtgtgtgtgtatgtgtgcgtgtgtgtgtgtctgtatgtgtgtgtctgtgtatgtgtgtgtgtgtgtgtatgtgtgtgtgtgtgtgtctgtatgcgtgtgtctgtgtatatgtgtgtgtgtgtgtgtatgtgtgtgttttggagatcaaatttagaacaccttatgtactgagtctatatgtcacctgccttcagaaaagaatctctaaaagaaaagggggactggaaagatggctcagtggttcagagcacttgctactctggcagaggacccaggtttgagtcccagtgcccacatgtgcctcacaatcatctctaactccagttcccaaggacctaaccccctcctggcctccactggcatcaggcacacatgtggtacacatacacacatgcaggctcccctcaaaccaatatggacaagatggaagtaaaacgacagggaaagtcacactaacaataatgatcgtcagaggcagggactgggatgcccttactaaaggatgcacaccatgacaacgctgggaaatacaggaagaaaatgctagggttgaagaggccaaggtgagcccccagctgcagtgggagccctcactcccatcaggctcccgaacgaaacatggcaccaccaagcaggaggaccagtcagtcacctagagtgtgccacccatgtggggccagcaaagtgtgtgggaaggctctgagcagggagaagcaggaggttccatcagagaggcgccatccaactggaagcaaagatgccaccatccctctccgtgtggctgaaacaaggagaggtgtcagcttgaacaccgtaaagcattggagcactgtcaggattgctggggaggaaggggccacagcctccctggaggactcggcaggccctagaaaacaaaagcccagctgagcccagctggggctcatggacagccatttaacccagttggagaccaatccctgtaaaatacacaataacagtagctttgacggccaggagctgaatgtggcacagctgcccttcctcagaaggcccagacatggtcctcccagaccgtaggacatgtctgcctcagggtattcctggcttgggtactgctaactgcccagcagcacaaggtctatagaacctgtaagtatctagaaggccgtgctgagtggaagaagccagtccagaggctcacatgccaaacagttccatttacttaacattcttgaagtgaccaaaagaatacagatagtggggaggagtgatgagacagagtgtcctgctgggcgtgtcgggtcctagctggcatagccagtatagttttggaagaggctacccactgagtctgatcttaaacaccctgctatagtcagtggacttagcttgctttccattgctgatgagtaccatgacccaaaacaactcgggaaagcttacaggttataggccatcattgagggagggccaaggcaggagcctcagaactggagacagaagctaaagcagagaccacagaggaacagagacccatgggcttgctccccatggctttctcagcttgcttgcttctacaacccaggacagtgggttgtagtacctcacagtgtgctgagttcccaaacctgtcattaatcaagaaaataccccaagacagacttattgataggtcactttgatacagactcttcggaagttgacactccgtcttcccagatgacactactttgtgtcgcattgataaaaactaaccagcaggttctagaacgttccaggggtggtgtcagtcttcctcagtatcttcccagacctgtcagggaaagcacctgccctgactctttcccagcttcccaggcccaacactaggcccctgaccaggaccccactcacaccacaccacaccacaccacaccacaccacaccacaccacacccactttggctgtagtgtccaggacctgcagccctagaccttcaaccataacttgaggagaaaatgaaggcaagagggccgattcatagaagatagaatggttgcacaacaggaaccttcccagaggccctgcatccctgccctccccagccttgggaaatgtagggtcaggaccccagattcaggagaagatggactttgtggtgatctccgcagcaccgcctcaccctctcggtgcccaactgtggagttcagtgtggctctctgttcatgacccctcagccccaccctccctcggggacccttacccactcaggtttgtgtaccagaagggggaaggatggcagccccacccacaaccaatgatgcctcaagacccacacccagaaagacagcatcccaagccccaccccagtagcaaggcttgcacacaccctggtaggatgaggtggagagggtgggtcatggagacgggaagcaaagagacgcaggctgacacattgtgccctgcaggtggatccgaggagaacactaccggtacaagttcagcctccccgggggccagcacgccacccagggcaagtggtggatccgcaagcgaattggtccttacttccccccactccgccttgaggatctgaaggaatactttaagactcgggagtggccactaccagaacccccatctagacacacacgctgaaataaagaccagagaccaaccgcttctctacctatactgtgctgcggccacgggacccgcacagggacccggcagcccatggatcctgccaagaagagattggaaaaggatgtgcttc

SEQ ID NO: 215 - DNA, 1902 bp, Mus musculus
ttgtgctcatgcgcccagacagcctagtaatggctgcgcccgaggggtcgctgagaaaacggaaggtcgggggtgcggagcacagtccagcgtcgcaaccttctctggctagagatcccgcagattctccagctcggctgcacacgggcaccttctggctgactagaatcgtgctcctgcgggccctcgctttcatttactttgtggcctttttggtggcattcaatcagaacaaggccctcatcggtgaccggggcctgctgccctgcaaactgtacctgaagaatgtccaggagtacttccagggcagcactggctgggctgcctggacctatgcaccaaccattatgtggttgttggactggtcagacatgaacttcaacctggacctcattgctcttcttgggctgggcatctcgtcctttgtcctggtgaccggctgtgccaacatgatactcatgactgccctctgggccctctacatgtccctggtcaacgtagggcagatctggtattcttttggatgggagtcacagctgctggaaacaggattcctggggatctttctgagccctctctggacactgtcccgcctgcccaagaacacccccacatcccagattgtcctgtggggcttccgctggctgatcttcagaatcatgcttggagcgggcctcatcaaggtccgcggggacaagtgctggctggatctgacctgcatggacttccactatgaggtgagcacagacctggcagtggctgaagcatcagtctcgctgctctcagagactcagcccgtgcccaacccgatagcctactacctgcacaggtcaccatggtggttccaccgctttgagaccctcagcaaccacttcgtggagcttcttgtgcctttcttcctgttccttggacggcggatgcgcattcttcatggagtgctgcagatccttttccaggtgatcctcatcatcagtgggaacctgagcttcctgaactggctcaccatcgtgcccagccttgcctgcttcgacgatgcagctctgggattcctgtttccctcaggacctcaaggcctaaagaagcaagtcctggagattcagagggaagatacacaaagggtccagcccaagccaagagacagaggctgcttggtgcggcaagtggtcaacatctccctgggcatcctggtggcctggctcagcgtaccggtggttatcaatctgctaagctccaggcagatcatgaacacctccttcaacccgctcaggatcgtcaacacctatggggcctttggaagtgtcaccaaagagcggactgaggtgatcctgcagggcacagtgagccccaacgccagcgcacctgatgcagtgtgggaagactatgagttcaagtgcaaaccgggcgacccctggaggcagccatgcctcatctcgccataccactaccgcctggactggctgatgtggttcgcagctttccagacctatgagcagaacgagtggatccttcatctggcgggtaagctcctagctggtgactctgaagccctggccctacttgctgttaacccctttgagggcaggactccccccaggtggatccgaggagaacactaccggtacaagttcagcctccccgggggccagcacgccacccagggcaagtggtggatccgcaagcgaattggtccttacttccccccactccgccttgaggatctgaaggaatactttaagactcgggagtggccactaccagaacccccatctagacacacacgctgaaataaagaccagagaccaaccgcttctctacctatactgtgctgcggccacgggacccgcacagggacccggcagcccatggatcctgccaagaagagattggaaaaggatgtgcttc

SEQ ID NO: 216 - protein, 587 aa, Mus musculus
MRPDSLVMAAPEGSLRKRKVGGAEHSPASQPSLARDPADSPARLHTGTFWLTRIVLLRAFIYFVAFLVAFNQNKALIGDRGLLPCKLYLKNVQEYFQGSTGWAAWTYAPTIMWLLDWSDMNFNLDLIALLGLGISSFVLVTGCANMILMTALWALYMSLVNVGQIWYSFGWESQLLETGFLGIFLSPLWTLSRLPKNTPTSQIVLWGFRWLIFRIMLGAGLIKVRGDKCWLDLTCMDFHYEVSTDLAVAEASVSLLSETQPVPNPIAYYLHRSPWWFHRFETLSNHFVELLVPFFLFLGRRMRILHGVLQILFQVILIISGNLSFLNWLTIVPSLACFDDAALGFLFPSGPQGLKKQVLEIQREDTQRVQPKPRDRGCLVRQVVNISLGILVAWLSVPVVINLLSSRQIMNTSFNPLRIVNTYGAFGSVTKERTEVILQGTVSPNASAPDAVWEDYEFKCKPGDPWRQPCLISPYHYRLDWLMWFAAFQTYEQNEWILHLAGKLLAGDSEALLAVNPFEGRTPPRWIRGEHYRYKFSLPGGQHATQGKWWIRKRIGPYFPPLRLEDLKEYFKTREWPLPEPPSRHTR

SEQ ID NO: 217 - DNA, 122153 bp, Homo sapiens
  misc_feature (1)...(122153): n = A,T,C or G
cgggagtgcgccctccccgcacatgcgccctgacagcccaacaatggcggcgcccgcggagtcgctgaggaggcggaagactgggtactcggatccggagcctgagtcgccgcccgcgccggggcgtggccccgcaggctctccggcccatctccacacgggcaccttctggctgacccggatcgtgctcctgaaggccctagccttcgtgtactgtgagtgccgggcgggcccgggacatccgccagtgtcacctccgcgcaccacgacccccgccctccctcgagactcctccgcgcggtctcgcggccgcggcgcccccacgcagccctccttcctgctggggcccgggcaaggcggggcgggcagggcaggacaaggcttgctggcgacagcgcacccggccctacccctgtcgccgcctcgagcctccggcctgggctcctgggctcccggttccacccgcagccccgaagttgcacggccgcgcctgccaggaccggctcggggctatgcgaggcggggccggcccgggccctggcccaggagttcccaggagagctgggcaggtggagggtcacccgtccgtgcgcaggtcgggggtctgcgtcctggctgcggggcggggggcggcctggagaggcgaggcgctcctgctgtccccgacacagcgctgtgctgacggtgaaggttcccactgtaactggacgcccgcacgccacatccctgccgcgtgcggcccctgccaaaatccgaggagccggcccgggagcctccttcgcgtctcccaggggctgagggaaggtgactggctggtggccagactggagtttctcctttagtgttctcgactagctcagtctgcgttcgggaagattcccagcggaggtctgggggcagctccggaacctcatctgcaagtgaagcctgcgcctcactgtgggatgtggttggccgggtccactggcggagacccttcaccccacagctgtgcggggcccgcgtgcgcagcctacagagcagagctctgagaaaagtcagttcacgctcaaaacctctggatcccctggccaggggcagctggcgattccaactccctctctccccagtccctacaacccagaactggtttggaagagaacggttctgtgatcacggtgacatgtgatcacacggatacatgtttcataagcccaacgtgtcaggagctacgaacctcaagtgaggctctcaaatgagtatggaagtgaggggagcctgccaggccgagatgcagccagcggggcgcgtgggcagtcaccgtcccagagggctccggagctgctggccccgggcgttgcccacgcgttggttgtaggccgtgggcattggacgtctccctttccttccatcgtctgcttccctcacgtgtggaaggaaagggtcaggttgcagaagttcttctttgcacagcctttgtgccacacacgtcgcgggaagtttggtagcctggttgtgctggagtgatgctcagttcgacgttttgtgtgacatttgtgtgatactttccacctcctggtgcaaagtgatgagacgcgctcatcactacaaggtttcctgtgggattgcagtatcggcttcaactgggtctgtgtctctctctctctttctttaaagcaactattttattttatttatttatttttttcgagacggagtctcactctgttgcccaggctggagcgcaacggcaccatgtcggcccactgcaacctccgtctcctgggttcaagcgattctcctgcctcagccttccgagtagctgggattataggcacgcaccaccatgcctgactaatttttaaaaatatttttagtagagacagggtttcaccatgttggccaggctggtctcgaacttctgacctcagggcctcccaaagtgctgggattacaagcgtgagccactatgcccggcctgcaattattttaaaaagtagttcttcccaggttgcttttccctccacagtattaaacagtcattttaaatgttggtgctgtcacttagcaaacgatgaagtagagataaagtgaagctgtgaggctctaataggccttccacaggggagcccgagatacagcaggaagtcccagcggccttgcctccggagcacagcttcataaaaccagctcagactctttcaaacgagctgaggctcctttgatctccgcagggattctctgttcaattcagaaggaactgcttttaagccactgggtcaagcggatattttaagcctggtgcccagcattgaacatttctccttgacatatgcacgttcttctgtcttgtgagtacatttggggtagaatcagtgtttttctgctgtatcaaggaaccagtttcccatctttcagggacatggttttctggctgagctggcccagggcaagcaggcagtcatcctgcatttatctccttctagaaagttctggattttactgggactgtgcgctactccctgttcctcagaatcccagggtttttccaagttgccataggggctctccaaatatttcacttgatactgaattttacaatgtttatagctattgaaacacttgtaattaaacacataaccaaatgtattctgtggaaactccccttgttaaaagacattgaactgagggaggcttacccttaggcagattgtctcagcagacatgtagtaaagatgtacagatcaggagaacacagaaacgcctgccctgtcggggaagcttcgaagccagacctggagaggccggctgccagcgacaggcctctgcattcaacctgactttgcatccgtcctggggctggctccttcccaccgcgggcctgggcgtttccatgtgctgccaccgaggtgtgtaggtgctaggggtgtgctcactgcacacagacgtgcataccgcgggcgtcctggggtgtcgggcatgccctgctgtgctgtgggagccggagtgtgttagcggaaagcggcattttcacagggctcagagttgaagacacacctgtcttcctgacgtgtggactcgggtccctagtgtgattactgcgttgagcagatgctgaagtagcaccctgcccggtgctgacctcctggtgacaacgccactacccccagtggacagcgaggaagcagggtcagccactggcccggctgtgcagcgattgtccgtaggccctggagttcagccctgcccttcattcacgccactgtgcagcctgcgtatcctggacacccggttcacatctgggcagcggcgttctcgggccgtgacggctcctgggaggaccgaggctgcccgaggtggtcggggatgcctgacactgacactgagcttcccctcagcacagatgtcactcccaggaatggctgaaatctggacgagtaaaagcttatgtgacaggagtttccggcctaagcagcgggacctgggtgccatgttcttggtgtgtaggggcagtgccggccgcccatgggtgccggtgcctcctgcagtcaggcctgctgctgtctgtgtgcgcaataaggaaaccgaacccaagagtgggcaccatgcccaggctcaccggaacagagggcagagcagcctggccagaatccctcactgttttatggcaggaacccccagggtcgtgcgtcgacgttgtggcccggcgttccctgcggaagattgaggccctcactggtcaaccctgcagtacgggggcgtgtgtggcaaacagctggtctggagcctcgtcagccaggccggctccttgatgctttgaaatccccctcccagggggcctggccaggtccgtccatgggcggccacaggcagctggggctggactcctggaatttccagcagccctgtgtctgttacagcgccagtggtagagctggattccctgacaagacgggggaaggacagccttgcaggtgctactgaagacaccctaggctagagctgcccaccctgggtgggttctcctggactgaactgacgttggtttgctattgatgagagtcacatagtatatgtacacaatgcattttaactgcctcagaattaaggtgttatctggaaacagtgtaattacagttggtcagaattgggttgatagcagttcactgcagagaactttctggaagctgtgacaggtggaagtagtggggctcagggttggtgggccacaccttagctgtgtggccttggccaagttgctcatcaagaccttcctgtcactgatgaggtgagagtgaccgctgggccgtcctgaggctgacatgggattccttgcctgtgcacacttcccagaaggcggaccaaggacacacccgcctgggagacggctcgcaggcagccacggagtatatatatctgaacgtcggaaaggacctttcctttgaagctcaaacatttatgagatattgttacaattcggaagggatctgtaggtgaaatgtgacatgaagactgggtaacgttggcatttgcagactgactttatgtgtggcacttttcgtgggtgccatggcgtcggcgcagagacactcctgagggatttcgtctgtcggtccatgtgtttgtgggggccgagtcctggacaggcctaggagggaaccgccccggccagggccggctgctcggcgcctgcacagggcatgagtgctgggggctttgggacacacgctccctgctgcctctggggcagatgtccacctgcactgcttgcagtgagaggctggggccccagtggacgagccgtggtgcctgaactgctcccgctgtgtccccgccacgtgaggcatctcttcctgaccgtggtcctgagaccacctggcctctgccttcccagggttaactgtacttgttctctccgtggctgccgacacccttctggccttcagacttagccctcatcactcgtggactcctgaccccacccagggctgaccaccggagccctgctctctgcttcctttgcggctgatattgtccccattccagtgttgttcttgtgcctgtctcccctctagctccttgcagtcagggagaggactttctttatacctctatcccttgtcttctaggggcatctcctgctcagtgaaatgtgctgacccgtagcaggtggtctctaccagggcttagtgtcagcatgggacacttttccagccattaccccttctttcccctctacccacctccagccccgaggtgcggcccagcaggacagatactgccacagccctcccttggttgtgttcatacttcctgggctgctcatgccttcctgtttgctggtggattctctttttgctggagtgtatccccaagcagcttttccagaaaggaccaacttgcccggatctctaattctccatcaaagccactttccctcagagctttgcagcattgaggaggcatcttcaagcatctgactcttcttctccctggaagcttctaaagtctcagtgccttgccctcctgctctccacctttgctctctgttctggttatttatcgaggagtctctgaggctcttttttttgctctcttgtagtggccttggtgagctcttcagcctcaaggcttgtccttggctctggatgaggctcttctggcctctccccaatctgcccatgtgttccaaacaccgcatgccccagctgggttccaaacagggcgggtgggggccactctcctgtctagcttcgtagcgtgggctgaaacctgggaaagtctctccatgaagctgaatggagaagaacatggcttccgcgaggccctaggagccaagcaccacacagaacccaccgcttggctgtgatcccgagtgacggggacagcctggactgcagaaggaatgcccaacgctggcgggaacggaggggcttttcttgctcgtctttccagttccacattgtcacattggagtcctgggctcactgagattatgttgaaaatccgacctctaggggatctccatgctagttttgtcctttaggcgtggaggcatgcgtgccgcactgtggcgtctgttctgtgcgcctgctcaccgcccttccttcttttccgcgtggggcagttttatcgcgtctccccggcagctgcttcggcgaggtggggccgcggtgccattggtagcgtgtctctgagtctcaccgcagcccttgtagcttggcatcctcgtcagatgacacccgaggcagggttgacgtggcaggcagaatcgtttgcacccgtatttgctaaactctcagctgttcttcagaaaatttgaggagaaaatgaaaccaaaaagaatacttgaaaccctgctcagttggttttgttctgagctttcagtggctctaagagctcatgggaaatgagttctttttcttttctccgggccacttgagttctaatgaaatgcaccacttggttttacaagttcttctataaaatacttgcttgtttaaaaagcaaacagcactgccctacttcggagctctgcagcacatcccttaaagaaaaaatacttgaggtcactgtgctgaggcccagaatttaaccacggccagtaagaaccatcaacagagaacggcatttctgggatgactgttttaatcttacaacaatttatctgaaaggagaaaagagaaagctgattttttttttctgattctttttttttttttttttttgagacagagtttcactttttcgcccaggctgcagtgcagtggtgcaatctcctctcactacaacctccgccttccgatttcaagagattctcctgcctcagcctcccgagtagctggggctacgggcacaggctgccacgcccagctatttctttctgattctgaaacaaagtatttatcggccatgcctgctgttggctgctcgggcgacacggtatttcctcggtatttcctcgttgcagctcccaggtcaggctctgggtccctgtgagaggcgggtggccgccatggctctgctgcctcccgtgtggggtagtgacggggccttccgaagcttgactgcttggttagttttgttttgagagcctgtgatgtttcaagatttttactgcatctttttatgtagctatttttataacatgagtagaggttgaaatagtttttttctctctgaaatctcaattcagtctgtcttcctttttcctgataagcaggaagcatcctatgcttcttgccttagaattactgatttaggctattgctttggtgaggccacatcttgttttcctctgtggtcctggagtttgcgttgtggtgaggggtggagcacatccacccttcagctagcgccaattaggtccctgtgggaaaggggccccagcctagcaccaatgaaggctgggccctggagtgtgcagtggctgaacagtcacaacctgtgtttctcccacctgcatacatgccaggacatacacacatgcatccctgcacacgcacacatacatgtgtacatgtgcacacgtgtacagagacatgcatacacccgtgcacacatggacacagggcatccatgcacaggtgcacatgtatacatgtgcacatgtgtacagacacatacacacagggacacatgggcatgtcatacccatatgcacacacactggcctgagctgtggaagctgctggtgcggtccctgcacgtgtggccgccggggctgagggcctaccgcgaggtgtcctctatgttgctaggaggtcagcgctcacagctcaggtcccttccacccagtggtggaggcagtaggggtgtggggagccttctgctgcagccctgtttcccgccctgcgacccaccccgagtcccctctgtgtcccacctcatgtccaccctgtgtccagccttgtgtccagtctgtgtcccgccctgtgtctgccctttgtttaccctgtgtccatcccgtgcccgcctgtgtccaccctcttcctcctcacttggagctgcccccacccacctgccgtcgcagcccctttagaggtcaccagccctgaccctttcgtcgcccagggccctgcggtgctctgcctgtggccctgctcccactgccttggagggaggctgctcacagcgcttcatgccgggcactgagtggtgcagagtcttcgagaaacctttactttttaaaatttttttattaaaaataaaactattaactgaaactgcagactctatggcttttccacccgtgcctgttccgttctgggacccggttttgtcctggcgtctcctccctccctccctggtctgtgagtctcccagactttcctgtgcaggattccgaccttgacagtgtcaagcaggcctgtcatggcgtctgtagagcgtccctcacgttgggtccgtctggtgtttcctcgcaattagactgggtgatgggttttgggaagacgcccacagaggtgcggggcccttcccgtcacaccgtatcagggtcctgacgtccgcacggctttctgatcacccggccaaggtctgcctgccaggtgtgccctctgacaggtccctgctttcccgcccgctctgtcctctggaagccgctcactgggtccagcccccgcctcctgaagggagtgtctgcggacattatgtggaattcctctgtgaggaagatcttgttacttacttgtttgtggtcactgattttgtcactatggacccacgcccatttattttccctctgggtcgtgatcccgtgctgtcaccgtgagtctgtgtctgggtcgtgatcccatgctgtcaccgtgagtctgtgtctgggtcgtgatcccgtgctgtcaccgtgagtctgtgtctgggtcgtgatcccgtgctgtcaccgtgagtctgtgtctgggtcgtgatcccgtgctgtcaccgtgagtctgtgtctgggtcgtgatcccgtgctgtcaccgtgagtctgtgtctgggtcgtgatcccgtgctgtcaccgtgagtctgtctgggtggtgatcccgtgctgtcaccgtgagtctgtgtctgggtcgtgatcccgtgctgtcaccgtgagtctgtgtctgggtcgtgatcccgtgctgtcaccgtgagtctgtgtctgggtcgtgatcccgtgctgtcaccgtgagtctgtgtctgggtcgtgatcccgtgctgtcaccgtgagtctgtctgggtcgtgatcccgtgctgtcaccgtgagtctgtgtctgggtcgtgatcccgtgctgtcaccgtgagtctgtgtctgggtcgtgatcccgtgctgtcaccgtgagtctgtgtctgggtcgtgatcccgtgctgtcaccgtgagtctgtgtctgggtcgtgatcccgtgctgtcaccgtgagtctgtgtctgggtcgtgatcccgtgctgtcaccgtgagtctgtctgggtcgtgatcccgtgctgtcaccgtgagtctgtgtctgggtcgtgatcccgtgctgtcaccgtgagtctgtgtctgggtcgtgatcccgtgctgtcaccgtgagtctgtgtctgggtcgtgatcccgtgctgtcaccgtgagtctgtctgggtcgtgatcccgtgctgtcaccgtgagtctgtctgggtcgtgatcccgtgctgtcaccgtgagtctgtgtctgggtcgtgatcccgtgctgtcaccgtgagtctgtgtctgggtcgtgatcccgtgctgtcaccgtgagtctgtctgggtcgtgatcccgtgctgtcaccgtgagtctgtgtctgggtcgtgatcccgtgctgtcaccgtgagtctgtgtctgggtcgtgatcccgtgctgtcaccgtgagtctgtctgggtcgtgatcccgtgttgtcaccgtgagtctgtgtctgggtcgtgatcccgtgctgtcaccgtgagtctgtgtctgggtcgtgatcccgtgctgtcaccgtgagtctgtgtctgggtcgtgatcccgtgctgtcaccgtgagtctgtctgggtcgtgatcccgtgctgtcaccgtgagtctgtgtctgggtcgtgatcccgtgctgtcaccgtgagtctgtgtctgggtcgtgatcccgtgctgtcaccgtgagtctgtctgggtcgtgatcccgtgttgtcaccgtgagtctgtgtctgggtcgtgatcccgtgctgtctccgtgagtctgtgtctgggtcgtgatcccgtgttgtcaccatgagatggtgtctgggttgtgatccagtgttgtcaccgtgagtctgtgtctgggtcgtgatcccgtgctgtcaccgtgagtctgtgtctgggtcgtgatcccgtgctgtcaccgtgagtctgtgtctgggtcgtgatcccgtgctgtcaccgtgagtctgtgtctgggtcgtgatcccgtgctgtcaccgtgagtctgtgtctgggttgtgatccagtgttgtcactgtgagtctttgtctgggttatgatccagtgctgtcactgtgagtttgctgctcagctcctccagctttgaccactggtgggtttcccctccttccccgcagggatgcttccggcccagcttctgtttctctgccccagccctagaatgagttgtttccaaggagccctggttctttttaggggagcatagaaacttcagtctgggcactgggagggccgttgctcccggggtgtcacagctgctggccctcttcctgggtagagctaggctctgtgtgtcactatctcatttcacacatttgattgcttctctgtcgtatccacctatccatctgtaagtatacgaaggtcaacctggtccatgccgatgactctgactctcacctggcacacggtgtattccagccttccgtcctggaacatggtgtattccatcctcccgtcctggcacacggtgtattccagtcttccctgctggcccatctgaatcctccctctctgctagtgggaacctggctcccctgactcctctagcatctgctcagccctggtgcacgtgcgagaattgtccacccaggcccgggggggaaagccctggagtgcagcgtttgtgtacagctccttctggccttgcggtctccactcagaacattttccggagttgcttaggcggctcctgccctctggccagtgtgtttctgtttcacatccgtgcgtgtggagcctgtattctatctgcatcccccaacctcctggtcgggtcttcccccaatagtttgtgcacattgaagttcatctcgtgtaatgctcagtgctgtgggctttgcctccatcaccccagctccagccccaagtcccccgtgcatgggagtgaccacttcccctgcaccagcccctggcacgcccgggtctgtctcccgtccctctggttttgccttttccagtgtgacatacgaatgaaatcacgcagtatatagcctgttgggtctagattcttttgcttagcaaaatgcacttaagattcatccatgttattgcctgaaccaacagctgcattcttatctctgattatttttctgttgcacaaatgcacctccggttatttatccacttccaccgtgaaggatgtcttccttgtttctagtttttagtggctatgaacagagctgctatgagcatctgcatgaggcttctgtgcgagcacactttcaggttgaaggcctgagaggtgcagtagctgatttgtaaggtaacccttcattatctgggtcagatgccaccgtctgccatccacagtggtaggccacagcatccccggcacagcgagggcactcctgctgtcccgaaccttctgcagcattgggcactgtccatgttcgtgttttttttgttttgtttttttggttttttttttgagacagtcttactctgtcgccgaggctggagtgcagtggcgctgtgtcggctcactccaacctccgcctcctgggttcaagcaattctcctgcctcagccttgcgagtagctgggattccaggtgtgcaccactatgcccagctaatttttgtatttttagtagagacggggtttcaccacattggccaggctggtcttgaactcctgacctcaggtgatctgcccacctcggcctcccaaagcgctgggattacaggcatgagccaccgcgcccggcctgggcactgtccgttttcaagcacttcggccatgtgacgtgtgtgtggtgacagcacgctgtggttttcatgggcatttccgcagtgatgaaggatgttgagcatcttttcacgtgttatttgccatccgtacaccttcctatgtctgttcagaccttgtggcctggttttttcttcccacctttaacattgggttgtttgttttctaattattgaattttaaaagttctttaaatattctagatacaaatcctttatcagatgtgtgatttgccagtattttcttccaatctgcggcttgtgttttcattctgttaaaagtagcttttgcagatcaaaagtttttcagtttgataaagttcaatttacagtttctaatttcatagattatgcttttggtgttgtatctaaaaacttgttgccaaacccaagtcacatagattttcttctatatttccatctggaagtcttatgcttttatgttttacatttaggtctatgatcctttttggttaatttttgtgtaaggtgtgaagtgtgttcaggtccatctttttgcatgtggacatccatctgttccaacatgattgttacagagactcttctttgtttttttatttattttgtagagactgagtctcactatgttgcccaggctgctctggaattcctgggctcaagcgatcctcctgcctcagcctcccaaagtgctgggatgacaggtgtgagccaccacgcccggcccaaggctgctctttgtctgtgtagttgcctttgaacctttgtcagaatttgttcactctgtgtgtcgggtcgggggcaggggggctgtgtctgggccgtctcttccattccattgagttctgcggctcttccttaatcaatactgcgctgtcttgatgtggtcttgattagctttttagtaagtcttgaaattgggtaacatgagtcctccacctctgttcttttccagatgattttggctttttaatccctttgctctcccatgtatattctagaatcagcttgtcagcctcggcggaagcactgactgggtgtttggttcagattgtgccgaatttatggatcaaattgacaccttaatgattttgatttttccaatccatgaacatggtctatctcttcatatagttagatcttgtttcatttttttaatcagtgttttgtagttttccatgtgcagattccgtttatatgtttttagatttataaatgcatggggaaaagtacatgtactagcttcctacatgtctacacagacactcactccaaaccagcatgcacagttacacagacatggaccccaagccagattcctacacgcagtaggaagccgcatgtacttgtggggttgctcttgtgatattgttatcattatgcaatatcttctttcatccctgtgtcattccttgtttgtaaattgatttttttccttttgagatggagtctctgttgcccaggctggagtgcaatggtgccatctcggctcactgcagcctcccgggttcaagtgattctcctgcctcagcctcccaagtaggtgggactaccggggtgcaccaccacatccgactaatttttgtattttttaagtagagacagggttttgccatattggccaggctggtcccaaactcctgacctcaggtgatccacccgcctcagcctcccaaagtgctggaattacaggcgtgagccaccgtgcccgacccttaaatctactttttttttttttttgagatggagttttgctcttgtcgtccaggctggagtgcagtggcgcaatcttggctcactgcaccctccacctcccaggttcaagccattctcctgcctcagcctcctgagtagcttggattacaggtgcctgccacaacgcccagctaatttttgtatttttagtagagacagggtttttccatgttgcccaggctggtctcaaactcctgatctcaggtgatccgcctgccttggcctcccaaagtgctgggattacaggcgtgagccaccctgcccagcccttaaatctactttttatgatgttaatagagccacttccactttcttttgtttgtattttttatttttatttttaatttttttcagccatgatgaattagatccagctttcttttgattcacatttgaatggtgtatcttttttactttcaactgctttttcattcttcacgtttacacatgggaatgtgcttctctcacctgtcagcatctctgggtaagcattcagtgttctacaaatactgacgtccagaggatgtgagagagctgttgtgggtgggcgccgtgggacatgaactcggagacctgtggatgtgagagagccgtcgtggggtgggcgccgtgggacgtgaactcggagacctgtggatgtgagagagccgtcgtggggtgggcgccgtgagacatgaactcggagacctgtggatgtgacagtgccattgtggggtgggcgccgtgagacatgaactcggagacctgtggatgtgagagagccgtcgtgcggtgggcgccgtgagacgtgaactcagagacctgtggatgtgagagagccgtcgtggggtgggcgccgtgagacgtgaactcggagacctgtggatgtgagagagccgtcgtggggtgggcgccgtgagacgtgaactcggagacctgtggtctgcgtagagggcaagtgtggctcacctataggcagtaagtgtcaagccctgcagcgtgtgctgggagtgatgccgttgaccagagccagggtcctcagggtgtgtttcataatggtgaatgctgagtgcagtccggttggtcagctggctgtctgtgtgtagccaggcacgcaatttatatacacatgtctactttacttctatgtgtgtgcgtgtatacacactgcatctgctgcagacacggaatttatatacaagcatctagtttgcttctatgcgtatgcgtggatgcacacactgcgtctgctgcaggcacccattttatgtaacgtgtctggttcacttagatgtgtgtgcgtgtatgcacacactgcgtctgctgcgggcacgcattttatgtaacgtgtctagtttacttagatgtgtgtgtgtgtgtatgcacacaccgcgtctgctgcaggcacgcattttatgtaacgtgtctggttcacttacatgtgtgtgcgtgtatgcacacaccgcgtctgctgcgggcacgcattttatgtaacgggtcgggttcacttagatgtgtgtgtgtgtatgcacacaccgcgtctgctgcaggcacgccttttatgtaacttgtctagtttacttagatgtgtgtgtgtgtatgcacacaccacgtctgctgcaggcacgccttttatgtaacttgtctagtttacttagatgtgtgtgtgtgtatgcacacactgcgtctgctgcaggcacgcattttatgtaacttgtctagtttacttagatgtgtgtgtgtgtgtgcacacaccgcgtctgctgcgggcacgcattttatgtaacgtgtctagtttacttagatgtgtgtgtgtgtatgcacacaccgcatctgctgcaggcacgcattttatgtaacgtgtctggttcgcttagatatgtgtgtgtgtggatgcacacaccgcgtctgctgcgggcacgcattttatgtaacgtgtctagttcacttagatgtgtatgcgtgtatgcacacaccgcgtctgctgcaggttggcttttccagtgtttcccccaaaatcttgagaaagtactcagactcctgagtctagggtttggccccaaaccgtcagccagactctgcctccccttcccgcctgcctcgccccgcattctgagctgcgcccatggtgtccacatgtggtttgttcctagtcatgcttgttttgtcttctttttcttccagtcgtggcattcctggtggctttccatcagaacaagcagctcatcggtgacagggggctgcttccctgcagagtgttcctgaagaacttccagcagtacttccaggacaggacgagctgggaagtcttcagctacatgcccaccatcctctggctgatggactggtcagacatgaactccaacctggacttgctggctcttctcggactgggcatctcgtctttcgtactgatcacgggctgcgccaacatgcttctcatggctgccctgtggggcctctacatgtccctggttaatgtgggccatgtctggtgagtagcaggaatggggcggtcggagcttagggcttgctgtcactcagcacaggcactgcaggtgtcctggcacttggaaagactggacgagcgtttatcttaaattccttcaggagggtattgtcattttacttaggccatggcagagcggccagtgcaccagccacagcagccacccatcttcaggattaaaaccccacctctttgcagtagctcttccttacttaaaggactgcgttgccagcttactggagccagagggatggggaaagggaggcagaagccagtgggtctgtgtctgtgtggacgtgtaggaggctggtttggggtgggtgtctgtgtggacgtgtaggaggctggtttggggtgtctgtgtggacatgtaggaggctggtttggggtgggtgtctgtgtggacgtgtaggaagctggtttggggtgggtgtctgtgtggacgtgtaggaggctggtttggggtgtctgtgtggacgtgtaggaggctggtttggggtgggtgtctgtgtggacatgtaggaggctggtttggggtgggtgtctgtgtggacatgtaggaggctggtttggggtgggtgtctgtgtggacatgtaggaggctggtttggggtgggtgtctgtgtggacatgtaggaggctggtttggggtgggtgtctgtgtggacatgtaggaggctggtttggggtgtctgtgtggacgtgtaggaggctggtttggagtgggtgtctgtgtggacgtgtaggaggctggtttggggtgtctgtgtggatatgtaggaggctggtttggggtgtctgtgtggatatgtaggaggctggtttggggtgtctgtgtggacgtgcaggaggctggtttggggtgggtgtctgtgtggacgtgtaggaggctggtttggggtgggtgtctgtgtggatgtgtaggaggctggtttggggtgggtgtctgtgtggacgtgtaggaggctggtttggggtgggtgtctgtgtggacatgtaggaggctggtttggggtgggtgtctgtgtggatgtgtaggaagctggggatgcgctggctcttgcatgcccagcttggttccgccctcaatgggacagctgggctttgcatggagactgaggatggctcttgtgtctttcgtggacgggagacaggaggcagctggctcagggctgagtggtcggaaccaggaccctgtcccaggatggaaggctgtggtggtgagttggtgcgggcagggcgcagccttgggctgtggagcctgtgttttccatcctggtcagggcggctgagttgaggttggagtgtctggggccacgtgcacttccgggagcctgaatgctctgcctccagcacagcgcctgtggctccggtgttccctggtcggaggctcagattgctctgatctgggcttggtggcacagcccaggccctgcaggctcatgcagggagggctgcagctggcatcagggcacctgtgggggggggtccccactttgtggctgtgctggagtgggcacttgtaaggggggtccccactgtgtggctgttgctggggtgggcaccgctgccaggtccagttgctggtgtttcctcaggtctcagctacacttgagtgtgtcacctcattcaacaagcaggccagacagtgtcaccagggcagggcaggaggcctggggatgccttgggcaccctacaacgtggctccgccccaggacccctccacgcacacatgcctgactttgccgaggcgcccatgagctgtcagcacaggctgaagtggtgtgctggggtcaggcgctctcacgggagtctgcaggcctggggccacatgcaatgcttgtggctgtttgtggtttgcccccgatgccccaggccctgtgacgcacctcccccgcacatcacgttcacatgagctgtctctgctgacggtggcctggtgggggctgtgcttgttgagtgtctggacggtgaagtggctttttctcccttcaccacatgctcttggtgaggacgtcgctctgcagtcttcactggaggtgtgaggttccgccgcctctgggggtctgcaggagtcatgagcccacctgcgtgggaggcttctctctgctccccatttatcgttcacctgagcgtggtttgtcgcagcgtggacttgcacgtttttgttttggtactttgggggtctgtcttcttggtctagaaatttaaacatctgggggtttggcaacatttatgacggagagagccacagcttaataattgttgcataaaactctaagtgattttagagaggactctgactctgctcagagctggccttcctgttacataaagccacgcagccttgcaggacgctggagccctgagcacagcatctgctatagtatctgaagtcgcttcagcttttccagaacattggctctgactccatcgttggctctgactctgtcgttgtctctgactttgtcgttgtctctgactctgtcattggctctgactctgtccttggctgactctgtcgttggctctgactctgtcgttggctgactctgtcgttggctgactctgtcagctgactctgtcattggctgactctgtcgttggctgactgttgttggctgactctgtcgttggctctgactctgtcgttggctgactctgtcggctgactctgtcattggctgactctgtcattggctctgactctgtcgttggctgactctgtcggctgactctgtcattggctgactctgtcattggctctgactctgtcgttggctgactctgtcattggctgactctgtcattggctgactgttgttggctgattctgtcgttggctctgactctgtcattggctgactctgtcattggctgactctgtcgttggctctgactctgtcgttggctctgactccgtccttggctgactctgtcgttggctctgactctgtcattggctgactctgtcgttggctgactctgtcgtctgactctgtcattggctgactctgtcgttggctctgactctgtcgttggctctgactctgtcgtctctgactctgtcgttggctctgactctgtcattggctctgactctgtcgttggctgactctgtcattgtctctgattctgtcgttggctgactctgtccttggctgactctgtcgttgtctctaactctgtcgttgtctctgactctgtcattggctgactctgtcgttggctctgactctgtcattggctgactctgtcattggctctgactctgtcgtctctgactctgtcatctctgactctgtcgttggctctgactctgtcgttggctgactctgtcgttggctgactctgtcgttgtctctaactctgtcgttgtctctgactctgtcgttggctctgactctgtcattggctgactctgtcgttggcctgactctgtcgttggctgactgttgttggctgactctgtcgttgtctctgactctgtcattggctgactttgtcattgtctctgactctgtcgttggctgactctgtcgttggctgactctgtcattgtctctaactctgtcgctgtctctgactctgtcattggctgactctgtcgttggctctgactctgtcgttggctgactctgtcattggctctgactctgtcattggctctgagtctttcgtctctgactctgtcgttggctctgactctgtcgttgtctctgactctgtcgttggctgactctgtcgttggctctgactctgtcgttggctgactctgtcgttggctctgactctgtcgttggctgactctgtcgttggctctgactctgtcgtctctgactctgtcgttggctctgactctcattggctctgactctgtcgttggctgactctgtcgttgtctctgattctgtcgttggctgacgctgtccttggctgactctgtcgttgtctctaactctgtcgttgtctctgactctgtcattggctgactctgtcgttggctctgactctgtcattggctgactctgtcattggctctgactctgtcgtctctgactctgtcgtctctgactctgtcgttgtctctgactctgtcgttgtctctgactctgtcattggctgactctgtcgttggctctgactctgtcattggctgactctgtcattggctctgactctgtcgtctctgactctgtcgtctctgactctgtcgttgtctctgactctgtcattgtctctgactctgtcgttggctctgactctgtcgttggctgactctgtcattgtctctaactctgtcgttgtctctgactctgtcgttggctctgactctgtcattggctgactctgtcgttggcctgactctgtcgttggctgactgttgttggctgactctgtcgttgtctctgactctgtcattggctgactctgtcattgtctctgactctgtcgttggctgactctgtcgttggctgactctgtcgttgtctctgactctgtcattggctgactctgtcgttgtctctgactctgtcgttggctgactctgttgttggctctgactctgttgttggctgactctgtcgttggctgactgtcattggctgactctgtcgttggctgactctgtcgttggctgactctgtcattgtctctaactctgtcgttggctgactctgtcattggctggctctgtcattgtctctgactctgtcgttggctgactctgtcgttggctctgactctgtcgttggctgacctctgtcatgaacacactctcacgttggctctgaatctgtcgttggctgactctgtcgttgactgactctgtcgttggctctgactctgtccttggctctgactctgtcgttggctgactctgtcgttggctgactctgtcgttggctgactctgtcattggctctgactctgtcgttggctgactctgtcgttggctctgactctgtcgttggctgactctgtcgttggctgactctgtcgttggctctgactctgtcgttggctgactctgtcgttggctctgactctgtcgtctctgactctgtcattggctgactctgtcgttgtctctgattctgtcgttggctgactctgtcattgtctctgattctgtcgttggctgactctgtcgttgtctctgattctgtcgttggctgactctgtcattgtctttgattctgtcgttggctgactctgtcgttgtctctaactctgttgctgtctctgactctgtcattggctgactctgtcgttggctctgactctgtcgttggctgactctgtcattggctctgactctgtcattgtctctgactctgtcgttgtctctgactctgtcgttggctgactctgtcattggctttgactctgtcgttggctgactctgacgttggctctgactctgttgttggctctgactctgtcattggctctgactctgtcgttgtctctgactctgtcgttggctgactctgtcgttggctctgactctgtcgttggctgactctgtcgttggctgactctgtcattgtctgtaactctgtcattgtctctgactctgtcattggctgactctgtcgttgtctctgactctgtcgttggctgactctgtcgttggctctgactctgtcgttggctgactttgtcgttggctgactgtcgttggctgactctgtcgttggctgactctctcgttgtctctaagtctgtcgttggctgactctgtcattggctgactctgtcgttgtctctgactctgtcgttggctgactctgtcgttggctctgactctgtcattggctgactctgtcgttggctctgactctgtcattggctgactctgtcgttggctgactctgtcgttggctgactctgtcattgtctctaactctgtcgttggctgactctgtcattgtctctaactctgtcgttggctgactctgtcattggctgactctgtcgttgtctctgactctgtcattggctgactctgtcgttggctctgactctctcgttggctctgactgtcatccgcgcttggctttggcagtggccctgcaggctgctttgctgctcttcagcacggcagcaccgccatcccttccccactgtctcgaccccagaaggaaggaaagatcctctccagaaacttggaccaaagtcaggacacctcaggggtcctccttcctgtggcgggagctgcccttggagcttccttcctgggcaggacggatggtggctccacttcaaagagtactgagagcagcgccagggctggaggggacgatgggaggccgccagcacccagggacaccgccctcgnnnnnnnnnnnnnnnnnnnnctctgtcgtctctgactctgtcgttggctgactctgtcgttggctctgactctgtcgttggctgactctgtcgttgactgactctgtcgttggctctgactctgtcgttggctgactctgtcgttggctgactctgtcgttggctctgactctgtcgttggctgactctgtcgttggctctgactctgtcgtctctgactctgtcgttggctctgactctgtcgttggcggactctgtcgttggctctgactctgtcgttggctgactctgtcgttggctctgactctgtcgtctctgactctgtcgttggctctgactctgtcgttggctctgactctgtcgttggctgactctgtcgttgtctctgattctgtcattggctgactctgtcattgtctctgattctgtcattggctgactctgtcgttgtctctgattctgtcgttggctgactctgtcattgtctttgattctgtcgttggctgactctgtcgttgtctctaactctgttgctgtctctgactctgtcattggctgactctgtcgttggctctgactctgtcgttggctgactctgtcattggctctgactctgtcattgtctctgactctgtcgttgtctctgactctgtcgttggctgactctgtcattggctttgactctgtcgttggctgactctgtcgttggctctgactctgtcgttggctgactttgtcgttggctgactgtcgttggctgactctgtcgttggctgactctctcgttgtctctaagtctgtcgttggctgactctgtcattggctgactctgtcattgtctctgactctgtcgttggctgactctgtcgttggctctgactctgtcgttggctgactctgttgttggctctgactctgtcattggctgactctgtcgttggctctgactctgtcattggctgactctgtcgttggctgactctgtcgttggctgactctgtcattgtctctaactctgtcgttggctgactctgtcattgtctctaactctgtcgttggctgactctgtcattggctgactctgtcgttgtctctgactctgtcattggctgactctgtcgttggctctgactctctcgttggctctgactgtcatccgcgcttggctttggcagtggccctgcaggctgctttgctgctcttcagcacggcagcaccgccatcccttccccactgtctcgaccccagaaggaaggaaagatcctctccagaaacttggaccaaagtcaggacacctcaggggtcctccttcctgtggcgggagctgcccttggagcttccttcctgggcaggacggatggtggctccacttcaaagagtactgagagcagcgccagggctggaggggacgctgggaggccgccagcacccagggacaccgccctcggtgcttcatttctcactgacgatgaacagcatgtttgggctccaggacttcaatgtaaggaggttccacaagtacctgcaacaccttttccaccacctgcctctgcgtagccccaactgggtgggtggggccctccctggctgggctgcagcctctgtctctgtgttaatgcatgggaagggatttgacaaggcgtagacatatttgatggtaaaagtgacgtccttttcatttcacaaggttcagggaccccgtggtgggaggggtggcagttgccacacaaggccaggcactcagagagcccaccctgggcgtctcttctgtcagccgggtcatggtcgtgtcctcctttcaaatggcgtgggaaaagcctgatcctgttgctgtgtgctgggtgtctttgtctgtgatatctgactcctgcctagcactcagtcctgcctgtgagctgacctctgaaacaacagagttaccttcctggctagacggggattagtctccagagcctggcaggtgggtgagcgtctctcatatgggagcctgtgtgtgtctgctggtgcaactgtcatcgggtcatttacacagctggcagatacttgctgagcccctgcttggcaccgtggacactgaggagggggtgccctgacttcagcttggtcaggcccaccagggcacgtgaggtcccttgagaggcagaggaatccatggcagggcatgggccatgtaggtgactgagcccatgttgtttggcttgaggttggacctgtgaacgttctctgttaagcccaccttccgaacagcatacctgtagacgggaactcccacgagaggggcctgtgagcactcacctttccagtctgctctaaaagtctgccatagcctcagcaggaagaccaggactgtccgggcctcacactgtaaaaggcctcttctggccttggatcagttgccttagcggacaccctgccctggataggaggccacaggacagcgtggccgtgggtgccttctgcagaggcttgtccccctcctctctaggacttgctgggagaagcgcttccttctggcttccactcctgcttggagctgtaatggcagagttgggatctgaggtttctgggatttgcaacaatacagtgaattcggaaagcacacaagtggctacatccgctgccagccagctgtcccctccccttcgtggctgctgcggcacatggggctggcagacgccgcaccttgccctccctggctggcctgtggttgcaggtccacttctaaggcgaaagaactcccatgtcccatgtgtcatttgcagataaccacagctgaagccagctccgagactctgcattgacttcttggtgaactctgtgtccaccattagcttgttttggggtgaactctgtgtccaccattagcttgttttggggtgtccatgtcagctgtttccagagggtttcctatcattgctgcataacaagagaaacatttcaggcagctggacgccggggggagaacagtctgtctttgcaccttgtactgaggcttttctggtcctgcggggacttggcaacccagtctcctgcgtccagagctttcttccacagtagctgtggtgtatgaaccgtgacttacttcatttcctagaggtgagtggattccttgaagccacgtaacatgtgtttcccaaccctttctgccaagaccttctacttctccaaatagattcctgaccgtttctgccaatgccttctacttctccaaatagattcccgaccctttctgccgaggccttctagttatccaaatagattgtgaccctttccgttcttaacctaaatctctttcacattttaaacagatattttttcttttttaaattttttaactctgacccagtgccagctgaacttttttcttttttttttgagacagcctcttgctctgtcacccagactggaatgcagtcacacagtcacagcccactgcagcctcaacctcctgggctcaagcaatcctacctgctcagcttcccaaatagctgggactacaggcacccagcaccacacctggctaatatttttattttttgtagagatggatgtctcactatgttgcccaggctggtcttgaactcctgggctcaaagttcaatactcctatctcagcctcccaaagtgctaggattacaggcatgagccaccgtgcccagccaaatattttcctttttttttttttttttgagatggagtctcgctcttgtcgcccaggctggagtgcagtggtgcgaactcggtccattgcagcctccacttcctgggttgaagcgattctcccaccttagcctcccaagtagctgggattataggcatctgccaccacgcctggccaatttttatacttttagtagagatggggtttcaccatggtcaggctggtctcgaactcctgacctccagtgatccacccgccttggcctcccaaactgctgggattacaggcatgagccacggtgcccagccccctattttttttaacctaacaagagatatgtatttctttgactccgaagagtacatcccataatcatcaaggtgcaccaaaggggcagggatgacaattgagacgagatggggtgtttagggcactggggccgtagacagggcgagacttcagcaggcagcaaggaggggccgtagacagggcaagcctggcaggggcagtttgagggagaggacgtctcacattgaaacaatactttaaaataagagatttgtcttcatggactccatgcccgtccatggcagagtggcaggtgcaggacgagcctccccactatgaaaccgtcagcaagtgaaataccagagggcacaggtgcccaggactgctgtccctggaaaggagatacatacagggtggccttggtggccccggccttctgcctgagcaccttgtacaccacagctagggcacccagcagaacacaaggcgtctccaagctcaggaggcagggatcagagttgagggcagcttgcatttgtgcggcaaggcattagagtaaaggagctaacacagacatcaccacagaaagctacatggattccactaagtccttgggtttgttctaagctgtgaacgtggagagtgagagtctttgagggttggtggaaagtggcgggtagagtctttgagggttggtggaaagtggcaggtagggagtggtgaccttagtggtgagtctgagggtcccacagtgctggctgggagacaagcctccccatcagccggtccagaggtgacttgcataagaccctaggcactcagcgcatgcccccagaaaggccacatcttaggaggagggttcctctcgccctagaaaagggctgttctagactgaccctaactgagcttttggaaagaccaagttcatcctccagtagctcagctgcttaccagacagactcattcactctccaaaggaagcagacaaaattaacttctcaatgatgttatgatctttcataatgtcaactagaatcagaaactactacacaagtaaagaaacaggaaaataggatccctatacaggaaacaaaaaagggtcacaagaaactgaccatgatagccaagatagcacacgtagaaaagaggatttgaggcagccattacagatacacaccaggactcaagggaagtattcctctttttttttttttttttttttttttgagacagagtctcattctgtcccccaggctggagtgcagtggtgagatcttggctcactgcaacctccacctcgcaggttcaaacaattttcctgcttcagcctcccaagtagctgggattataggtgtgcaccaccacacccagctaatttttgtatttttaatagaaatggtgtttcaccattgttggccaggctggtctcaaactcctgacctcaggtgatccgcccgcctcggcctcccaaagtgctgggattacaggcatgaactaccacacccagcctagtagtggtcttaatgaatgaacacatgggaaatttagcagagactctgaatctttttttttttttttttttgagatggagtctcgctctgtcgcccaggctggagtgcagtggcgcgatctcggctcactgcaagctccacctcctgggttcactccattctcctgcctcagcctcctgagtagctgggactacaggcgcccaccaccacacctggctaattttttgtatttttagtagagacagggtttcaccgtgttagccaggatggtctcgatctcctgaccttgtgatccacccgcctcggcctcccaaagtgctgggattacaggcgtgagccaccgtgcccggccgagactctgaatctttaaagaagagtcaattggacattttagaactgaaaagtacagtatctgtactgaaaaatctgttgcctgggcttaataacaggttggaggtgggtagaagatagcctcaatgaattttaagagaaatctgtagaaattatccaagctaaagaacaaacagaaaaaagattgaaacgagcagagcttcagtgacatgtgggatagcaccaggtggtctaacatacctgtgattggagccccacagagagaggacacacagaatggggcatatagcaccaggtggtctaacatacatgtgattggagccccacagagagaggacacagagaatggggcatatagcactaggtggtctaacatacatgtgattggagccccacagagagaggacacagagaatggggcaaatagcaccaggtggtctaacatacatgtgattggagccccacagagagaggacgcagagaatggggcacgtagcacccggtgggctaacatatgtgtgattggagccccacagagagaggacacagagaatgaggcatatagcaccaggtggtctaacatacttgtgattggagccccacagagagaggacacagaaaatggggcataaaaagtatttaaagaaataatagctgaatgatataaatgtgtaaatccaagaagctcagcacactgtaagcagtaaaagtaagagaaaatgttatctgggcacattgtagtcaaactaccgaataccaaagacaaagatagcacctggaaggaaaaagacgttacactcaaagaataaagattcaaatatgtctggcttcttataaccactggaggccagaggatgatggactggcatctttagagttctaaagaaaaacgattgtcaacccagagttctatccagtgacaatatccttcaaaaacaaaagcaaaataaagacattttcagataacggaaaactgagagaaggctttgccagcagacacactatagaaatgttaaaggaatatcttcaggctgaaggaattattgcttggcagaaagaattattgctaggcagaaagtcatctatagaaaggagtaaaatccactggacatggtaaaggtagggaaatatgaaatgttctctatttctttttttcttaatttaatacagacacaactaaggcaaaaactgtaatactgtaatatacacaacattagcacaaaggagggaggggatccttcctgaatctgtaacatcactggctctctaaattctacgtgaagcgagaaaatattaaccccaggtctgttgtgagtaggtgagatacctgctgttagccctagggcaatcactaaaagtagtgcaaagatatgtagctgaggagcccatggagtgattgaaatggagtgttaaacatgtttgcttccagtaagaaggcaggaacagaggaacaggacgaaaaaccaggtgagactctgaaaacaaaaaataaccaatgagccatatcaatgattacattaaatgtaagtgactaaatcttccaattaaaagacagagatttagaatcaggccaggcatggtggctcatacctgtaatgccagcactttgggaggccaaggcaggcagatcacctgaggtcatcaggagttcaagaccagcctggccaacatggtgaagcctcatctttactaaaaatacaaaaattacccgggcatagttgcacgtgcctgtagtcccagccactcaggaggctgaggcagggagagtcacttgaacccaggaggcagaggttgcagtgagccactgcactccagcctgggcaacagagtgagactctgtcgcaaaaaaaaaaatcaatttaaaaaaatcaggtatcaagtatatgcagttttcaagagctatgctttaaatataaaggtacaaatgagttgaaagaggaaggataaagataaagaaggatagactacataaatatactggaaagctagagtggctgtattaactttagacaaagtaaagttcaggacacggagtattatcagaggtgtacagagacattttgtggtaataaaagacttaattgatcataaagacataaaggcaccacatactgaacctcacaatatatgaagcaaaaattgcagaactccaggaagaaatacacaaattcacaattctgtttggagattttaacatcaatcactctttcaataattgaaagaacaactaaacaaacaaaaaaaagaagacatagaagatcagaacggcactatcggccactttgacataattgatgaatccctttaccctgcagtacttccgggtgtttttcctaagaagagtgttcttttcattcctgcagggatcagctgcagtaggtttaacacggttgcggttctgagactgcgtctcccactcattttccagtttgtcatctgacctaaggataatccttatagcatttactttccagaatagggttcggcgttgggtttagttgtctggtctcttctgggacatccatcttttatgacactgatattttaaagttatgcattcctttaaataaatggtgttcctctttggggtttcccagctgtttcctgtggtcgtcgtcccaggcaggacgctgcctgcggggaggaccctcccacaccacctgccttgtcctccatgatatgctggtccccggtgggtgagcctgtgtttctaggtggtcaacagggaatggagatatgtccaaaccagttcccatggccctgtgagagatgcatggcggcattctgcagccatgaccgtgaccacgtggggaggcttcaaacaagaaacacttactcttccacagttcttgaggccagaagtccgaaatcagggtgtcggcagggccagttccacccaagtctctatgggaggagggaccttcccttccctccgagtctctgcgggaaggtccttcctcgtctcttccagcccctggaggctccgggcacccccggcttgtggacgtatcactcgggtccctgccgctttgcctcctcccctttggtctgtctcagggttcctggtacgtctctctgatgaggacgtctgtgatcacatagtccaggacgccctcacctcgagatccttaacttaattacctccacagagaccccttttccaaataagacagggtgcaggcattaagatgtggacaggtctttctgggggcctccttttagcccactgcccagggcttctctctaataaaggtgggctcagactgcgcaccctgttttattccctgtctggtcacttaattcttaaacaattttcattacctggtccttatgacaatattggaaataaccaaagtttttttacttcccgtcaaatcacaagtatcttcccatctcgccgacgttgtcttacagcagctttggtcagcatgtactgctcctgacagaggcagaggccgcgtggagagtgggccgggtcgccgcagacacagcagggtcgaggcctggcgccggcagtctcagcgacgcactggtcattgccccagatgccacgcgcccgtctggacctccgctgctcggcggcacgtgtggtggccacagggtggtctgttacgtgtgtttgctcattgcgccaagcccaccggccggcacgttggttgttcctggtttttattgctggaagtggcacctcggtggccagctttgtggcgcagggatattttgcagggctgtgacttactgtgtgaactagctcctgaggtgggctgctgggtcagggtgtgcgtggtggacgggtgccgccagcctgcacccagggttcgtgctcacggcggggacagcgtgctgttgtcctgttccctactcagaacatcccatttccgaaaaaccactgagagtttttaagtgaaaataatgttatttaaatacgcatttctctgccaagttatttttcttggttttgctcttgttgtttctctggggatttgtgttttgcctttgccgttcccctttggtgtgaatgttctttgtttatccatctgtaagaggccctgctgtccgggaaggtaaatgcacgtggaaggtgtaaccccttggccgcatcccattctgtatgcacggactttgctttctgcacaggtttcctcttgtgtccagtctgcccgtctttccccattttcattgctgccttaggtgctttgtcgaaacggcctccagcactttttccttacacttttaagggctatttacatatttacatcctgttttaaattgcttacctgtagtgaatggactatgtactctgaggtcggttttcacacagtaatgggagcactgtccatccatcccttcgtctgtccatccatccatctgtccgtgggagccacacatgcacttggtgctccctgcgctgcctggcttcaacagcccgggtcctcccaacagccctgggacctggacttcctcttggcagctccagtaagaggcaacaggcgacagatgtttgcaaagacacctcttgttattaccattttattttctctgttgtatgaacttaaacattagggtggcagcagtcatgtcttcagtgaaccagttgcctcactggcactgccgaactggtatgtgtggtccagccccacccctgccatccccacgagctgccatccagccccatccctgctgtccccgcgagccgccgtccagccccatccctgccttccctgtgagccgccgtccagccccgtccctgctgtccccgcgagccaccatccagccctgtccctgcaagccactgtccagccccatccctgccgtccccacaagccactgttcagtctagcgcttccctgtgccaggcaggccatggccctgcacagcgggacccagcgtcccggccttgccagtgctagctggcaccccgttccgtgattgagtgggaggcacagtggtctggtgggtgctccaccccctctcctgcgaggcgggtagacatggaagccccccagctgctctcacccaaaggcgcccctctttttttgtggtattttttttttggtaacttctgtaaataaatccacgtttggccttcaccacatgacaaagacttcagtcttgatggtgggatcagctgcagacacaagtcaggaacctgggcgtggttcaggatcagctgcagacacaagtcaggaacctgggcgtggttcaggaggacatggttcatgattaagtccctactacacactctagataggcctccagcaaagttctttgcactaggccagaaactggaagatttcttacaaatttacaactagcctgccccaaaatggggagcataaaatttaacaaatatttatacatgaagtctttttacagatgataagtagctggagccaaatgtgtttttaaatcaaaagcttcctatagaaatgggagcccccatccagtgcaaggggcagggcctgtgctggggccgtgtgcagcatctgcagggcatcgggggtcttgctgcctccctagcacagagaccccaacgacctgtcagtcaacagagaccccagcagcctgtcggtcaacagagaccccagcagcctgtcagtcaacagagaccccagcggcctgtcagtcaggtgtggaggctcacaggggagcaggttcctgacctcactaggcagtcagagggagcgtgttaaccccgaccatccaaaagcaaaatctacgtcccactgtccaggaaaggacttgagtttctttaaagaacaaaacagcagaacaaacccagaagaactccacggagtcggtatcttctaacgtgagttccaactgttgaaaatataataaaagctatgaaagtaataagacgttttagtttttcgtgtcattaccttagctaaaacctgctatttaaagattcttttatcaggcagccttgaaatgcaaaattcaaagcaggtgaagtgacagaagaatgcgttttcaaacaccctcagccgatgtgaaggcagctgcgtctggactcaccccttctctgcacaacgcttgtattttggtggccctgagtcactgaaactcttccaggccttggtcccttctgataaaagtgtgaggctgcgtctttttagctaggatctcccgccctgtcgcccaggctggagtgcaatagtagcgcgatcttggctcactgcagcctggaactcctgggcttaagccatcttccagcctcggccccaaggtcactgggactacaggtgtgcgccaccacacctggctaataaaagagcaaagcttttattctctatggatttgaaaaatcagctccttttcctttctccgttcaactaaggttatatattgggaacattttgggggtaaatttatttctagcattagccaatgtgtacagcggttgcttggaagattttggtcacggaaaggggggcagggagtgtatcctgcagcccacagagtgccctctctccctcccagcctccttcctcagcccacggggtgccctctctccctcccagccagcttcctcagcccacggggtaccccctctctcccagcctccttcctgagcccacagggtgcctcctctctctcccagccaccttcctcagcccacggggtgccctccctccctcccagcctccttcctcagcccacggggtgccctctctccctcccagcctgcttcctcagcccacggggtaccccctctctcctagcctccttcctcagcccacacggtgccccctctctctcccagccaccttcctcagcccacggggtgccctctctccctcccagcctccttcctcagcccacggggtgccctctctccctcccagcctccttcctcagcccacggggtaccccctctctcccagcctccttcctcagcccacacggtgccccctctgtctcccagccaccttcctcagcccacggggtgccctctctccctcccagcctccttcctcagccaacggggtgccctctctccctcccagccttcttcctctggagtgaaaagcaaatctagacttcgtactcttttacctataaatagtgtggacctctaccgggtaagggatgatttaaaaagatatcagagccactggggcagccacacacctgatgcggttgaagaatgagccctccagtactctgtccccgcccacctcccccacggctcagatgtcgtttgtcatggcctttgctgtgcttttatcgtaatgtcaaggtggaaaatcacagacatattcaaaggtcggacgatgtagggagccctgggatgggcagtgggccctgagggccgtcccacaccctgtagcttttcattcctgtggatttcattaggcaacgttgctccttaatgtctttagtgagatagaattcacataccataaaactgcatttaaagcaagcttgtccacacgcggctcaggatggctttgaatgagacccaacacaaattcataaactttcttaaaacattatgagttttttttttttttagctcatcagctgtcactagtgttagtatattttatgtgtggcccaagacaatttttcttcttccattgtggcccacggaagccacaagattggacaaccgacaaccctgacataaagtgtacaagtcagcgtacatattcatggactctgaagccatcagcaccacgttgaaaacattctggctggggcagttcacacctgtcatcccagcacttagggaggtggaggcaggaggatcgcctgagtctaggagtttgagaccagccagggcaacatggcaaaacctctatagaaaatacaaaaattagtggggcatcatggtgtacacctgtggtcccagcaactcaggaggctgaggcgggaggactgcttcagcccaggagcttgaggttgtagtgaggttatgcaccgctgcactccaacctgggtgatagaatgagaccgtgtctcaaaaaaaaaaaaaaattctgatcaaccccaggataaacctggcaatctacctcctgtgtctgtggaccggcctgttccgtacatttcgtgtccacaaaccacatgctgtgccttctacgtcaggtgtggcactgagcacctgaggcagggctcctcatgcgggcattggtgcatcctgcccgcctcttgcgggaccataggtggcagagggggtttcttctagagcccaagggtaggtcttgctgtgaggtggggtggggttagagaggtcagaggctgaggcaggtgtgggatgcattggtgttgctttcccgcggctctgcctcctctagacacccgtgctgcttgcccacgcctctgctgtctgagggtaagaagcgggtcacagcatcactgaaaccccttttggttgggattcaatagtaaagacacaggccttgcccagcctttcccaccaattcctttcatttaagatcccttttctaatgagctgcgctcgaggtcatgtgatgtccttaaattttcagattccagagtatgacatttgccgtggcatttaattgatgctgcaaaaaaataagtattaattcactcattcgcaaaatacatatttttttatttctatgggtacttagtaggtgtatcttggaatatgttttggttgcctgttctgggcctgcctgtgtgtgagccgtggggaggggctcctgttcccctaatgcccagcgggcaggtcctcctcgcagggcttccctgaccccacaccgtgctgggtgccagggtgggcttcactcagtggggaaacagtgggtttttggttgaaacaagccaaagtgttaatactcgtttcttcttttgtttttcaggtactctttcggtaagtgagatgcatttagagaaagctctgcgagagttgagcgttgtgtgtttggtatgtatcttcacgcacttttcctggcctctccccttccttagcctctgccatcagccttcccagtatgcacggagggcagtgatgggcgcttgtgatctgatccgtgcctcctccctggatgtgggagctcctgggcttccaggccccgggcacctagagacggatggtcgcacgcatgattgtcggcatctcacaggtgtgattaccaccgcttccctggggcagagggaaagcacccacaggcccatcccccgtggacgctcaaggctgtgtgcccctcggcatagagaaggttcacggtgctcacggcactcacgctggtgggcactttggcttgtgctttgtttggtggaggggaccggaggtcttccccatcccacacaacgcagtcaatactggagggtgggaagagggcagccacccagtggacaggacagggccgggaggacggtggatgtgacctccattgggcccggaggcctccagaatgtcatgggacacacggtggcttggtaagcagacctgactccaggaccttgggaaggatgaccatacccccacccctgcctttctccatgacctcagggcgcaggcagaggggccggtctttgctggtaaaggccctggcctgggcctcgcactcaggctctctctgccccgaactctctggctctcggcccctttcccaggagagcaggggtggcctgtctgggcgtggatctttgcctgcccccttcacagtctcagccttcagggcctgtgtccttgcggtagaggtcactttcttcattcttttattcctcacgtattttcattccttcaatattgagtaccagtgatgctggaaatctggatcgaatcaaagaaaggaagaacatcagaatctgttaaaacgtaaatacaaaggaaccttattcctgattttaatcaccttgaaaggcaggttcctgtaattgcagacgaccaggccaccttggccactgtcactcatgggtttcctggctgctgggtgccacctggctcggggtgcaccgtcagggcgtgcggctctgcgtgcttgcgtctgttcattgtttccatgtttttcttaaagcaagaagcaaggaattatttcaggaattccttttctgtttgcaaatctgacacaacctggttggaaccagctggttttttgcctgccagtcctgtggctgcatcaagggagcagagtgctcacgcgtgtgggagcgagtagacgtgaggaagcgtgtgcggcggcctgagtccccaggcctcccctagagtgctcacgcgtgtgggagcgagtagacgtgaggaagcgtgtgtggtgacctgagtccctgggcctcccccgcagtgcgccaggatacattcagtatcaaaatgcccacagagaaaactacattcttcaacatttagataaacaaatcttttcttagtaaattttatttatttaaaattacaacagggtgggtgcagtggcttatgcctataatcttagcagtttgggggctgaagcaggacctcttgagcccaggaattccagaccagcctgggcaacatagcaagaccctatcaccacaaaaaaaatttttttaattaaaattgtacaatcacaacagtattattttttcccagttcttatgaggagggaaagctttaggtcctgacacctgtgtctagcgggagaagtccctgctgtctgatgttgtggactctgagcagtgatcgcaaaatcgagtccgtgaggcaagagcccagtgcgcgggtcagagggtcagcaccgcgggggctgtgagcgggcaggccggggcaggctcggggggcagcggctgaggcttgtgtgttccctgtgagagatgggcctgcgaggccacggtgctgccgtgtctcagcaccagggccacaggacccatcgctgaggatgagagggcctggagcccaccctccccgtgcccccgcctgtgaggcctcctggggaacacaggctctactctaagtagggtgggggggaagtgcctggggcagtggactcccagaggcagtgctggagcggcagaggcagtcgaggagccgggtgactctggagccagcctcccgcgtccccaaccacttgctgaagcaaaagcaacggggtctgcatggggggtgggacgtgagcctgtgtggccgccgtcgggggctgcgcttgcgctcccagcccagggaagtcagtcttctgcgtttgtgtctccctgggtgttttcaggtgagcgtcatacattctaactgattcttcggtagcaggtggtaattgtagggactcagaagcgaattgttgactcattaatgttaatgttttccgcctgagagccctcgtgagcctgagtttcatgttgtgtctgaccctgcagcggctcagcacgtcactttggactgtcgcgcagaaattcagaagactcgtagtagcttcggcagtgctctccctgccttccgagcagccatgcgtctttgaactgtcttcccttccctgatcttggagaacatagagctgccagttactgaggtatgactccgggtgctgggcctcagaacacctagaccaaaggcactggaaggtcaggcttcctgatctgagacctctggggaggctcctttcctgtggcctcgttcgggacggcctgggagaatgcagtttgtgcgtgcgttcctcagctcatccgagccgcgtgtgcgtctgtgtccatctcagtgacattccttgtcttcattttgcacaatgggctttagtggagatcaggtggttcagggcggggcacggggtcggtcactgggaccctgcggcccgcaaagcagcatcctcaggcagtgcgtgccccgaggcagcagccagccggctctaggtgggccaggcttccagggcccccacccagcccggccactgggcacatgtgtttctaaaattaattaaaactaaatgaaataaaaagctccagtccttggttgcgttggctgcacctcatgtgctccgtggccgcatgtagctgtggcttccccactgggcggtcccagaccttttttttttttgagatggagtctcgctctgtcgcccaggctggagagcagtggtgcgatcttggctcactgcaagctccacctcctgggttcaagtgattctcctgcctcagcctcccgagtagctgggattacaggcgcccgccaccacgcccggctaatttttgtatttttagtagagatgggatttcacagtgttggccagcctggtctccaactcctgacctcaggtaacccgcccacctcagcctcccaaagtgctgggattacaggcatgagccattgcgcccggccccagaccattctcagcccagcagtctgcagaggctgccagtcaaagatcctaacatttcaccagcagcaaaccctgccttctgagggctcgtggctcggcgtgggctccccgggacatgctctcacaatgctgtgggtgtgagcgggacccgcctgaaaatacacacggctgctcttagtgaaacggccgctggccgggaagtccgcacagcccccgtcgctagtgtcttcctttttctcaggatgaccacaccatccacagaatgtttacgtttcttttcttttcaaggcagagtcttgctctgtcacccaggctggagtgcagtggtgcaatctcagctccttgacctcccgggctcaggcgatcctcccgcctcagcctcccgattagctgggactacaggcgcactgtcatggccagctaatttttaactttttgtggagatggggtcccactgtgctgcccaggctggtctttgggtctccgttcacatctctctactgttgtaagagcccctccagcgagctcgcctgctgctgtcctgggctctgtgtcccagggtcctgcgcccctgttcagacggacgcgactgctgctgtcctgggctctgtgtcccagggccctgcacccctgttcagacgaacacgaccgctgctgtcctgggctctgtgtcccagggtcctgcgcccccgttcagacggacgccaccactgctgtcctgggctctgtgtcccagggtcctgcgcccccgttcagacggacgtgaccactgctgtcctgggctctgtcccagggccctgtgcccccgttcacacggacgcgaccactgctgtcctgggctctgtgtcccagggtcctgcgcccccgttcagacagaggcgactgctgctgtcctgggctctgtgtcccagggccctgtgcccccgttcacacgtacacgaccactgctgtcctgggctctgtgtcccagggccgtgcgcccccgttcacagacggacgtgactgctgagcaggatgaagctgcgttcgtcagggccgcgctttccaggacgcaggaaaaccacaatatttgttaaaccccattctgccgtctgtgtttctgctggagtttagatagagctgagctttgagggctgctgagtttggtaacattcacttcaaagaaggagcctgacggtaatgaattccgcagccccgaatgtggccgcttcctgccgccctgcagcgagtgcaccttttgatattcagtgagcctggatctgggagtgtctcgagcttccagccgcccttgcgcattggaaaggatgcgggaacccgagaggacccgcagcagcgggtggcagggctccgtggggctgcctgctttccctccaggaccagaccgcctttgccggcaccctcccgacaatgcaccgtcccccaagtgtgggcctgacccccagtttggccccatcccctgagtgtggaccctgtcctccagcgtggtccccgtcccccatggggcgccatgcctagcacctggttctgtatggagagcgggctctgggaaggggctcccgtctgcagagtttggtgaggttgaaacagcaaaggccacagccgttgttctgggactgagaccagggccggtccccagtgcttctggagacgctttctggcccctcccaggcctggggcagctgggagggatggctgggcttttcaggcgcgggatgggacagcattgtgaccccactggccgctgagatgtgaccaggggaaggagacactcgtggtgaggggttctggaaccaggggcagccttgtgtgagtagggggcagagtgcacaggtgccagggcagggcttcctctggctcagctcctgggccactttgccaggtctttgtgcccagatagagtcccagaggaagaccaacaggttcccaaggcctttggagtgttttaggcccccaaaatcgttttgtaatttctttgtgattttagcctgatggacttgggtgtgtacgggtgtctacctccaggcgatcctacccccatcttgcaccactgggcccccatgggggtgtagggatgggcccgtgggggcgtggggatgggcccgtgggggtgtggggtgggcccgtggggatgtggggaggggctcgtgggggcgtggggatgggctcgtgcagggaaccgggctgttgatggtgactgcctgtggggaggggctggaggcctttgcccccctgctccctcagggcagtgaagtgagggtgtcagctgggggcatacagaggagtgagggtcccaggacccagggaagggttctggaagtctccaccttcccaggatattcctttgtaggaagtgggttctgtttcttactacagtcccatccaggggagagttggacaggccagggcctgagggaatttggggtccttggagtaagaaacttggttgatgaatggttggtttatccttatcttccactgatgaatgattggtttatcctcatcttctggaaggccaatgccagctggtctggggccttcctccatgctgggccaggtgtcagcgccaacacacaggtggcctgggtctcactgggattggactgtggttatgctgaaaacacgtggagactgtgggggcccatccacgtagcgggtgcgaggaatgaatctcagcagcaacgggcgctcctgtgtgagccacggaggcaggacggccaggctgtcccagcgttgggtgcctgtgtggggccgcggcccaggtttcgttgcaggttgtgctggaattcggttatttgtcgctacattcggaggctttccaagcgtaccaggcccctcctgggttttgctgctgtgctcttgccaagcgggaaacttccccacctctcaggtctgctttctaggctgtccccgcacaggccaagtgtcgccgtgcgtgtgcggggccccagacactgggctagggtgttttccattgcggcagcacctcccgccagccattgtgaattaaatgctccctgtgacccttcacccttgcggctcttaaattcgtgctttaaaaacagcttaatgaggggttcactggcccaactggaagtttttattaagccctattagtgctggagcagagcctgcctgcgggaagcgatcgccgggtgagctccgcctgggctgcaccaggctccaccaagcagccccagtccccgccctcctgtccctgctttagctgatggcccttccctccccttcccagctcccagggtcagggatgcagtttcttttaattaaattattccctaatcagaggcagcctccacggcctctgccgtgagctcgctcagctgccgggctgcaaccggtaggccgagccagctcctctctgggtcctttctcttgcattcctgtgttgatttaattgcacggcccctccctgggggagaagcatcctgtagagcgtggttccagagggttccctcaaaccgggaggcagagcccttccctgtcacctggggcgtgaatgactgtggtcctgcgtgtctctggtctcagtgtctggtcgtgttcttcataggaaggacagggaagcccacttgggtgacttttagagcccgccacgtgacatgggctagctgtgagccatctccacgggccatttccaaggtgagaaagggctcttgagcagcttctgccacttcctcaccatgagcggcccttggttggccatgagagaaggagaggctgccctcagactcggctccatctctggaggcctctgggcctgagtctccgcctgggtgcagtggcccttctggaccctccagtgctctccactggggtctcggggtgtttcttggctccaggagtggtgttctcgcctggtggcttctctgtcactacttgccaggctgtcttcttgggccacagggaccccagcataggcccggggtgccgtccagggaggactcctatggctagaaggggaggactcacagagaggagaggtggcaaatggggacccggggagcagctgacatcctggctgtgacctgcagggtcccttgggtcctgcatgcagccagcacagtgaaggaggagaggaagcctctgggtggatgccgggaccccttagggtgtgggccgtggtgccgggttccaccttcttcacacatgtgcgtgcgcagctttggtggcgcttgtttttagggtagtcttctttggtggcgcttgttttgagggtagtcttttttcatctaatttacatccaccccgtgttaacctcccggttctgtccattcttatcttcacgccaactcagatttgtacccaaacacagacgtgcaaacacacgtgcgcacatgcgcacacacagacacacgtatgcagatcctgtgcaaacacacgagcacacatggacatacacagatgcatatgcagatcatacgcaaactacacacatgacacaatgcagatcatatgcaagcacgtgcacacatgcgcacagacctgcagatcttatgcaaacacgcacatacatgcacacagacacgtatgcagatcatatgcaaacaggtgcatgcatgcacacacagacatacgtatgcagatcatatgcaaacgtgcacacgcgcacacagacccacgtatgcagatcatatgcaaatgtgtgcacacgcgtatgcacatatgcaaacacaggtgcacgcatgcacacacagacatattcagatcatatgcaaacgtgcacacatgggcatacagacccacctatgcagattatatgcaaacgtgtgcacacatgcgcacacaggtatgcagaccatatgcaagcacacatgcacgcatgcatacagacacgtatgcagatcatatgcaaacgtgcacacgtgcacacacagacacatatgcagatcatatgcaaacacgtgcacatgcacacagacacacatgcagatgcacatacaggatttaggggtaaatgtttgctttactcaaacagggccatattagatacatttctttcattccctttttttcacttactaatatctggtgaaaattactaagttgaacctagaagaaaagcatatatatatagtttttcttcagagacagggccttgctcatttgtccaagctggactgcactggcacaatcacggctcattgcagcctcgacctccgcagactcaagtgatcctcccacctcagcctcccaagtagctaggaccacaggcatgaaccaccacacccgattaatttttttattttcttttttatagtgacagggtcttgctatgttgtccaggctggtcttgaactcctaggctcaaactgtcctcctctcttgacctcccaaagtgctttaggggattacaggcatgagccaccacgccctcccagaaaatagattttaaaggccattttgtctcattcacacgatcattaacattttgttggttttgaatttctcccatcacgttgttagccatttctgttttaaaaaattctctttactatgcagaattctaaactactgaagaagtgttttgttgctgtgattcatacttccagtgctgaatccacttgagtggctttaatctagaatcttcaacgtggctttttaattgtttttaactgtatggatgcaggatgtttggtggcatctgctcttcattcctagtggattagtgacagtgacagtgagcaaggggcttcctgtgtggctgaagagggcggtttcgtcaccacccattccgcagggggcagctcagcccagcaggcatttggggactcgcacccagcactctgcggacgggggtctgactgcacccgctcctcccctccaccccccgctgccggctggagggcacagtctgtgcggtggccttgccaccccctagcaggtctgcatccgttctcccgcctgggcctcaatacttgtttcctccttttcctcactctcccttgcctaaaccgccatagatcatcccctttatgggtcttttcaaagagctggttttatctatcagaattttaaaatatactctagctcattcgtttttgcctcttgtagttgcttgctttttctgggagaaagtggtttatcatttccagtgcctggagttggttcagctattttctgtctcttcttctctgctaatgaaagccaactggagggcggctacccacttctgggtatgtccctgccctaccctgtcatctgagacccccggctgcccctgacagtggccgatggtgtggttttataaccttcagcgctaatgcctctagaccaaggacagcctggagaaatgcttcgaaaatgccacatgctcagggttttacaggtggccttttgtttctcaactttgattttattacactgtggccagtgtggcctgaagattgttcttttaattattaaaaaaaaatgggcatgtgcatgaatagtcaaattgtattacacgacttataataaaaacagaagcccttgccgtaccacttctcagccacatgctgttctccagacaacccttttatcacttcctgcacttaactctggtatttgtctgtctttctgactgataggtttatatgggttattcttcgcataccacggttagacactgtgtatacatgtcctcttatgaacgacagggattgccctcacacaccctaatgttcttctcatcatcatcagtatagctgtgtcacaagtataatttttattagtttgattgtctttacattattttgactctgtaaatattgtgactgctgagccaaatagtgaactatagtaactttttttctaataactcttcatttttcctggagttcatagttgccttttctattttgattggcttcgtttttcatctctgatcatatctcactcatttgttccaactttaccagcacaactggtcaaccctttccaatactgttgtttttacagaatcaaacacattggacaatccatcagttttttctctccactttgtgaagatttccgctcaggacctcattgttactgcttggagcagatgctttgtaggcctctggatttggagattgtggggcaggttaactctgccagattgggggccactgatgagtttgtccctctgcccattccagggatcctaagatggttcccaggagcaggtgacctcattgtattgagggtaaggctcagagtccacagcccctcctccacgtccttctaaagcagtgctcttagggaggatttctcttttttagagctgggatcttgctctgttgctcaggctagtctcaacctactgggctcaagctgtgctgccacctcagcctcctgagtagccgggactattggcttccctgagaagcctgatgctttagtggggaaggtgtttagagaccaagacgtgggtgctggggtgcccgttactactggggtgctgcagcttctcagcccctcagccggcagagttaggaaatacatggctgttcaggaagccacgcaatggggaggaatgaactgtggacagctggggaccctcgtaggccacagtgcaccgtgccagtgttagcagctgccacatccgccccacactccttgcccctgctgttttgccatgacgcagatcccaggcatcacattcctgcatttggaaatgcctcctcgtacacctgaagacaggcctttgcaacaacacgacgccaacaccacatcacacccgaaaacccaggcgactttcacacagggccttcgcaacaacacgacaccaacaccacatcacacccgaaaacccaggcgaccttcacacagggccttcgcaacaacacgacaccaacaccacatcacacccgaaaaccccggcgactttcacacagggccttcgcaacaacacgacaccaacaccacatcacacccgaaaaccgaggcgactttcacacagggccttcgcaacaacacgacgccaacaccacatcacacccgaaaacccaggcgactttcacacagggccttcgcaacaacacgacgccaacaccacatcacacccgaaaacccaggcgactttcacacagggccttcgcaacaacacgacaccaataccacatcacacccgaaaacccaggcgactttcacacagggccttcgcaacaacacgcaccaacaccacatcacaccagaaaaccgaggcgactttcagacagggccttcgcaacaacacgacaccaacaccacatcacacccaaaaaccgaggcgactttcttcacgtccatgttagtaatgccttttctcagctgtttgtccacacaagggctggccacgttaggtggacgcccgtgtgctgtctccctgcttcaggtcctgctggatcagttccccagtggccgctctgcctgccattctgcctacctggctaccagtcgctgtgggctgggggtgagagctcacagctggatcagaaccccctctgtggcccccctcgggaggtggctgccttctcccaccttgcatcggaggcgagattgtgcagggaccagaggctgccctggtctgcctgtgagaaagcccctgggtggttgctgccaaggagcatggctgggcctgcgagacagggtgccccgatctgcctggaagttttctgtccaggccgccctccctcatcgcctctgtcccgtgttggctgcttggaatgcgtctctctggacctcatctgggataaacagctgcttctctccccttactcctcagctgtgggggaacgctggtttccaggcccactcacaggatttttaatgttccgcccagaccttgctaacacctctcagcggctaagcctatttctgtagattctcttacttatgttttgtttttaaattttctatgtagtcaatcttttttacatttcaaaccttttaacctttgtttttctcctaagaattgtatagtaaaacccgcacggggaccgcctggatgccgtaggttctgttcacggggtttgctgcgttgttacgtagtgggtctcctcgcccgtgtcccccgtccctgcgtcggtgcttcagcgcacatcagggtggggctggtgtcaatgcttcccacatcattagctggaactcaccgcacactgcgtctttccctccataaagaacttgcacgagccccatcaaggtatagggagtggccgtcaccccagaaagtcccgtcatccccactcgtcaccgcccgcatttgtacagagatacagctgtcttgttctaagggcgagtccctgtgagaacgcgtggagcgttttgtccctgcccccacacactccgccggggggtttggctttgtgccggtgcctggctggcgggtgaactttccacagggcctgccttgtccacgtctctgcagggagcgcaggtccgtgtgcccacccaggaggtcttggacccagcagcccctcaagaagggctatggcgactgttcaccgcaggagggctctgcgctgtctgaaaaggggaacagaatgccccagtggaagcagatttgcaggtgatattagggaagcttcctcctgccttctacttacctggacttcttatcctccaaggcgcttgactcacagtcttacctccttgagttgcctccagaagaaaatggtctttgttttactgagttccttctaagcgcagtctgtgatggggcccgttctgtcctgtcctcgccctgctgagcactgagacagagacccaggcgacctgctgaccgaggccagctcacgagcctgctctgggccacgtggtgccgagttgcttcctccttcaggctctgatgacactgaagctccccggggagaacagcggtgtcctttgctgctggagatgcctgcagatgcttgctctgggcatgcaggggcccctggggaaggatccgcgcctggctccctctctccatctgtccctcgttttggacgggaagtcgactatcattcctgacgttccagtgtaacgtgttatgtttctctgatggctttggggattttatcttccgttgccagtttcttgactatgatatgcctactttttaccaaatttggataatttttgccaatatttgggggggttgccccatgttctttctcctctcctgtggctccacggacatggacatcaggcctctccctgccttccacgagctcctgggccctgtgcttctgtgtggtgttttctaaaagcctctcatctctagaatgagtcactgtggctgctatgtcttcgtgttcactgccttttctttcgttcttcactctgctgctgagctcagccaggggcatttgtgctctggagattttagttcttgctctggagtgggcctggccttcctccgaggctctgtgtctctgctcagctctccagcccgcctgcctggcaagcacgttttcctgtgctttccggtcctgatgctttcctgcgtccgtgtggagccagcgcttggggtgtggtgtgtagagaggggaatgtggacatgcagtgcgtgctgtgggggctgacgggctggggccggtgtggatgtcgtgtcgggggccgagccaacgggccagggccagtgtggatgtcatgttgggggacgacggactagggccagtgtgaatgtcttgttgggggcccagctgacgggccagggctggtgtggatgtcctgttgggagccgacaggctggggccattgtggatgtcgtgttgggggctaagccgacgggccagggccggtgcagatgttgtgctgggggccgacaggctggggccagtgtggatgtcctgtccagcaaggccctggaggtggtgtccgggcagtcttgaccgaggccggaaggatggtgccgggggcaggagcctgactgcctcggaggaagggggtcccggggcggagctgtggggtggggagcccattgtggatgctggctgcttcaccctcacccccacgttctgtctgtgggtctccgtgaggctcctcccagggcggccctgccacatgatgtagctgaaacccagtcctctctgcacaccagtgtttctaggaaaacacttcctgtctttctccccaagacctccaggacgtgggcctgaggtcatcactgcctccttcagttgctgctgcccgaggcccccgagagtgacccacatgagactgcggtccagacgccctccctgcctctgagggcgcacactgtccagagcgggtctgtgggtgggacgccctccctgcccccgaggacgcacactgtccagagcgggtctgtgggtggaatgcccccagcggcctccgggccccttgtctgtggggcctgtgccctggtgctgccggcactgctgtcctcacgcgagcgctggagatatgagctttcccaggggggctcagcagtgatgaaggtggggcaggagctgtgtgtgtccaccataggtcctgacagagatgaagcagaggccacagggctgccctgccccctgccgcgggcatgtggggtgattcccgcctacttctcaggtgtgccaacccccacgttccttccctgtgagtgtgtgagctcacatagcccctggacacaccaccctccacgtggggtggatcgtgcctgttggccacactgagcacacctggaaacgccgactgccgagtgtcaggggagggtctggaaaagccgcgagtgaaaacagactgtcccccgagactgtgtggtgaggggaacacctgattctgcagcctgggagtccacgccgacatgccgactgcccacacaggtgtcacagcagggatgtggatgctgctgtgctgtgcgggctccagcccaggaggccccgtgggaggagcaggtgccgagagctcgtcccaccgctactcgggagtgagacccacatcccacaggtgtctctgagcaggcgcccaccccaggactggctgagagtcagggtgcaccccagggcactggccccacgtgagagtcggggtgcgccccgggacgccggccccgcgtgagagtcgggttgcgccccgggacgccggccccgcgtgagagtcggggtgcgccccgggacgtcggccccgcgtggtcacttaaattcacatccaagtgaaccaaagttaaatgtgatttaaaatgtgcttctcagccacgcgggctgcctttgagtgcctcaaggcctgaagggccggggcccttgaggcacaccccgtgacccaggacagctccgtgggcacaacgtccccgcagcccacgatggccagcacttttctggggtctcatgagtcccttggaggctcggcacacttcagccatttttcatgcccgggacacaaaagacaaagaaatggtcaggtgtggtgcccaccagcctgacttaggtgaaatacttggaacacattaatcctaaacactctttgccgcgaagtctaatttccgtggacgggaagcattttcgtatttatccaaaaccaataaagatagctaaggtcattactgcggatttgtttcccaagagctggtgacacctgcacagagctgagccacagggacacctggggctaggaagtctggttgtcacggcaaccaagtacgaacaagccgcgcggccgggcgcaggggtcactgaggccacttcctgtttctcggcagcgcccacggacagccttaaaatatgtaacagtccacgaaattcctcataactgagagcgtgcagttaacgtaattttatctaaagcacgaaagcccttaaccagcactttcagagatgtctggttactagaaaatgccctcccatttgccatctgatctctggtttaacccagccagccgccccgcgccacgtcccgacgccatgtccccagctctgcacctgtatgtcttgcgggcagcagaagggcggccctcctgtgaaacgtcctcaggacgtgagacatggccagcgggcagacgcagctgtgaagctcaggccggttctggaggttcctgtgcagagcttggctctgggtgaccacaggccagggagctgcagtccactccagacacagcctggtcaatcccagaggagggaaggagcccacggtcaggaggaggccgggggtgccgggcgagcacagcagtactcctgtcccctgggacacctctggggtggggctgacatcaggacctcccagcacccctgcaaacagccccggtacgggggcaggcatgtctcttaggggagggcagccctgcctggtcatctccagtgagccggaggggtcagcgggcctggacaagcccctagaacggcacctgcccgcagcacacacgtgtggcatttcttcacgtgggcctgcgcccgcccacagcacacacgtgtggcatttcttcacggcctgcgcccgcccgcagcgcacacgtgtggcatttcttcacgtgggcctgcgcccgcccgcagcgcacacgtgtggcatttcttcacgtgggcctgcgcccgcccgcagtgcacacgtgtggcatttcttcacgtgggcctgcgcagcatgtgctctgcgcagccacaccatggctgtgtgttgcccatgtgcttgggggaggtgagatggtggtgacccgtcccccatggtaccggcatgagagtggctttgggcctggttccccacaggattgcttctgtgtgctgggctgcagatggccccatacacgtgactttagctctgccttcaagatgagtttgcagcatggcagcccctgggtggcgtctccatccccgacgctgagcagtactcatgctctcagagctcgctgcgcagagaaatagccgtaacagacccggagctcaatattcaggggatcccagagctggctgtgcagagcaatggccataacagacccggagctcaacactcagaggatctgcgaggggacacccgggaggtggctagttgccaggagaggggtgttcctgacataccttcatttgctgccagggagccaacgaggcatcccaaggccgcaggcctcagtggcagagcctgcacttgtccctctgaagctttttcaaacatggtcacaaaagatgttttccccgtggccagagacatggagaagtggggtctggggctctgcatgtgggcggatcacagacaaggccacctggtgtcccggggccatgtgggtgtggcctaccagtgcccagccccgccactggcgcgcagcgagagccgaactccccagcccccatcatccagccccaggggcgtctgtagcccacagcccctgttccgtgatagtgcaaagtaagatttgcagtgctatttcataacttttcagcttaaaatataacctgtaaaaatgaaggaaacttttaaaagctcccagctctctctggggccgccattagaagcccctggggtggcagagggcggcccggcgcagagctgagtgacaggcagtcaagatggaagcgctttgctccctcgtccccgattttaacagcgaacttaatggatttcctgtttctaacgtggatggtggctgtcatttttgaaggatccatctgtgctatatttaatgactctccctaagtaactaaaatagtttccacagagttaatgaggcctcagctggcgttctctcctacagtggccattgcaatgacttgcacctccaaagcgttgtgttaaatcacgtttcttccttggtcagaggcggctcagcccacaacccactggcccctcatccctccctttgccggaggctaccccgtgtccctccctgtgtcctgagggctgcccccaccctgcacaccttctgcaccctccgagcctctgcccctcactggtggccaggcagcgcctgggtgtcacctgccccagctgctgagtctcacctgccccaggcccccaagtctcacctgctccggcccccgcgtcccacgtgctccggcccctgcatctcacctgctccggcccccggtgatggtgctcatctcacccgcctgaggcaccgcagtcgccccaccctgcgtgtctctcgtcccacacggctgctggcctccaggacttccgtccggaaaaccccatctcaggctccaccccagcactctgcctggccagcactgcaccctgtccctaggctggcctgggaccctccatcctctgactggggtcgccaaggctggtggtgcatgagtgtgctgccggctgcccagcccagcccagagcagccgccaggtgcccctccacatgttcccacatgccccaggccgccaggcgcagatctcgcctcttggtggagaatcttctggttcttcagtggcagagggtccctcctcaacctctgattcccataaatagaaaagaaaggtgagcacgcacctctgcctgggttttatttggggagcaggtgcctaggagcttggctgcggagtgagggaccccggccgttgtgaggatgaagagggctctccgcaccaccctgtggtctctgcctgccctctgcccccatcctgtgcctggctcctctggtgtttcagacccatccatacccatgcctcacacctatgcacacagggcctgcccagcctgaatgtccccagagtcatcccttggtcgccccttggctctgcagaggcggatctagggtgagtttttctttagctgtttttaaatcagtggtattaaaacaagtagcccaggaccctgccatctaggaagcgagcacgagatggtgaaaaccctacaagccctcaggcctcgggggatgcccctcctgggccagccgagcaggcagcagcgaggccggagtccttagagacgccgatttagggctgagagctgtgtggccctctgcgtcagtcactacggaacattactgattagcactcggatatttagttcagagaaaccacgtttccatctgattccaaggcagtaaaattttgtcaccaatggtcatgggagagagggagatggtcatgggaagggagggagggagtgtgtcaccagtggtcatgggaagggagggagggagggaatgtgtcaccaatagtcatggggagggagggagagtgtcaccaatggtcgtgggagggagtgtgtcaccaatggtcatgggagggagggagtgtgtcaccaatggtcatgaggagggagggagtgtgtcaccaatggtcatggggagggagggagtgtgtcaccagtggtcatgggaagggagggaaagagggagtgtgtcaccagtggtcatgggaaggagggagggagtgtgtcaccaatggtcatggaagggagggagggagcgtgtctggttttgcacttggagagctggagcgatcacggggctcagggcccacagcggtgtgcgttctctcgtggaccctacgagtgagcatccggtctgtgtcctgcagagcaggaaggtcgggtgtggggagcctccccgggtcttggcctgcccagccttctccccatttgggtcagggctgtcttcacagggtgctggaagggtttgtactgaagcaacctgcagtcccccttcaacgtggagacgtttgctcccctcccaggaggggtcagggactgcccaggttgcagtggtggagatgttatctcccctcctaggaggggtcggggtggcccaggttgcagtggtggggatgtccctgtccccagggctcagcatctcgtagggcctcagaagaccgtgcgtgtagctgcagccgcccaggcctcgcggcccatcaacaatggtgagaactgattccaaagtctagagctctgggaagccactccaagaggcgccatgtggcattcgccattgtctgcagattttctcttccgagtatttcatcttaaatttccattataaaccgaggcgtcagaatccctgtcggggtgtcgggggcctgcaggtctggccctggcctcgccatgtgcctcgggctgccccatggcgaagcctctcttctgtgtgccccacgcctccggtggctgcagacctgacatccagagccttcaaaccctaaactgtctccagcaaggcagttatgaggctgcgtccttgtttctgccttttctgatgccccgagacgcctgtgaatggcacagtacagttacctgcagcgctggctgggcctgcaggccacaggctcctgccttgggcaccagcctggctgtggatctgcatgaatcctgagggggagggcagctgagaagcaccagtgcccagctgtgcctgggtgctggggcacctgcatttcctccgcaccagcatcggggcatccagccggcaatgagccattaacatgggtgcaccgggcgaggcgccagggcaggagttgggtgtcgcaccctgtccagcgggcagggctcaggagcatctccctggaccgtgcacatgcagcttctccgctgattgggccaacgctgtctgtgtcgcaggaaggagagcagcggccgtggaagtgaatgttccccacaagagctactgccccgttacccaggcagaacgcgtcaggctcctcacagggtgtgctcagtctcccggaaggcccagcacagcacgaggtggaaacgacgccggagccgtggagtggagcaggggccctcccggagccgtccccctggctaaagggaagggaggtccctggggaagagcagggcgtgcagatgctggcgcccagcaggcagcgcgtgcagctgcgcaacgggaaaggcactgaggcgggggcgaggacggctcctctccccggcagtggcagcgtgtgctgtggccctgcgtgttgccgcctcgttcgggtgcctggggctcgcttcaggcagcgctggtgtttgctgggtgagagctgtctggagagccctggccctgaccttggcgctgaggccgccctggcagcgtgctgcttattgactttcctggggacgcgttgtccgccacgctgaggcggagaacaatggcagcccttgtgcacgccgcgcagctgctggaattcctcaagacccaagcaaagaaaacagaagcaggtgggcccagggcaacccttttcttcccagggtgtccgcaaggcccagccagccaggcggctctggcttccgtggggaagatggggcccagcgagcctggggcgtgagcgaggtggagggggtcccgctgagagaccagcaggcgtcagcttggcagcctgtgccctccataagccggggcagcataaggactgaccgtctgtccattcagagaccagggtcgcgctgcctccactcacgccgatctgcttattcagtaattggcgcacatcagtgtggacttgcaggcgtttattttgtactttgggttacagtccagtgctgctgtagcagcctcttcacgggcttttgactttaccgtagtatctcaggtagagatgagttgcaccaatggttggaggaagctccccgcgagcctccgtctgcttcccctctgcactctcccgtcctctctgtggcaggtagacactgcccccacaagcctccgtccgcttcccctccgcactctcccatctgctctgtggtgtgtagatgctgcccctgcgagtctctgtctgcatcccctccgcactctcccatccgctctgtggcgcatagacactgtggtggtgtgagtcatgtgatcgttgtcatgctgggcagcgggtggcctctgtcccatccagcatcctcagagcccaggagggagcccggcctgtggggtctctggggccctgggatgtgaccttccattgacagacgcgagctgtgggcagtttccagcagccacattcacggtggcctcacctctgagaatagcactgggatggcgacccgcatccgcattcttatgctgggtttccagtgcgaagaatccgttgggcccccacgtgtcccccgcatccagtggcggagctgctgccttatcctgggactgcgaggggctgaccggtgttggttccgtgtggacccaccatgacctgcctctgcatccttgcctggcttccatgcccatctgggaaggacagggccagagggagacactgcctcacatggaggctgggctgcctccccagtgctgcctccccagtgctgctcccccagtgctgctcccccagtgctgcccccccagtgctgcccccccattgctgcctccccagtgctgcccccccaagtgctgcccccccagtgctgcccccccagtgctgcccccccagtgctgcctcccccaagtgctgcccccccagtgctgcccccccagtgctgcctccccagtgctgcctccccatgctgtttctgggctgggaagaaggtgaaagctgttttcatgcaaacctatgggaggggaaaagcttcccccaaagtctgccggcagcatgtgtgcagggcgcattctcagatgtcaggtccgtgcagcgtcctgcagggtggcaggtggcggacctcagagcggggcctttccctccagggcgaagggtgccgaggtcacaggaagtcccgacctaggccctgggtcccacgccagagctcccactcctgcagacctgaccttgcgtgtcgatgttgagactaatacgtgcgggctggtgtctctcagtagcaagatcagccctgtctcaaggaccgtttccattaaactgagtttctgaaatgatttctttgtgaaatgtgtggcttccattaactcacctttggtatgtctcgttgttttaggatgggagtcccagcttctggagacggggttcctggggatcttcctgtgccctctgtggacgctgtcaaggctgccccagcatacccccacatcccggattgtcctgtggggcttccggtggctgatcttcaggatcatgcttggagcagtaagtggagctcttctgcgtggtgtttggggaataacggtggctcttctaacctgtgaggcttctaggagaggtgaggctgtttccttcctcccccgccgccctctgtcctcctgtcggcctggcctggccagctgcgcactcttctgccccttcaggggcctgtgtttgaatgctggggaccggctggcttttcccgggcatgctcatgatccctgtttctgggacagaaccacacctctgagtctgtttcaggaggagactcagagaggagcactggacgccctgcttcccccaccagccctcctgagcttcccccaccagccctcctttgcttcccggagtgtccgaaatatttcagagctcgtttttaaatgacagagtctcaggccatggtgggcgcgttggcagacatattcaagggtgagggaggtatgagacccgccgtcctgacgctcagggaaagcgcggcctcctcatggtctcttggctgcgtccttcctcccgggtgctttgcctgcttggctttgacgtctctcaggacgaccagactgtccaggttccctgctgagccccggggtgggggtggcgggttccctcctgggccctggtgtgggggcggcgggctgtgcgtgcttcctgcccagccaggggctgctcatctgcgtctgccctgcaaacggtgaatcacatgccaaccccctgttcagcttcagtaatgtgacctctgagttcacaaaaacacgatgtgcactttaaaagcaggagcgacgtggtccttttgacgtctgccacactgaccagagctacgcagctctcacctgctcttccgcttcacgtggtttggtagtaagattttcattttgggctggaatgataaaatcttcatgtttttgtgttggaaaccatgtcgtacagatatgctctctgagcatctgtttgcttaagtgtttcgtggaggattcgctgaagacgtacgaagagttgggcactgccccaaggaacttgtgcctgccccacccgacagcgcgctcacgccagggccacggccagagtgtgccgccgtctcggccactccttcagtccggaacgttcctcttctctccctggcctcgaggcgtggctgccgtgcctgtgttcagcttcaggtcatgccgcaggcaggggcccgagtgctgggcggctcctcccaccctgtccccccggggcagctgcggacacttgggacacccagtcctaagacagcactggccacggactcaggaagcgatgactccacgtggtttggggtatcatgtagcatgaagtgtggctcggtgtagcgtgtagcatggttcagtgtagtgtgtagcgtggcttgctgtagcgtgtagcatggttctgcatagcgtggcttggtatagcgtgtagcgtggctctgtgtagcgtggctcagtatagcgcatagcgtggttctgtgtggcgtggctcgctgtagcgcatagcgtggttctgtgtggcgtggcttggtgtagtgtttagtgtgctttggtgcactgtgaggggctgtctgggcccattcctcaccgtgtgttccctgcatcgtaacgtccatgtctgggcatagctcttctttccatctcgttcagctcggggctctgtccccctgtggctcccatcttccccagcgccctccttttccctccccctcactcacatccctgcgtctcaccttgcgccagcccttagccagtgctgcagaaacgtcagccatgcatggagtgaactggccatttcttgaggtgctccctggtggtatgcgagcacctaattccctttattccttttctgggagggttacatggcctctcatgatgagcacttgccggggttgggaggggtcactgcaggctcagctgcactagcaggagacccacagagagggacctcaacaccagggcccctctcaccccccaggacaaggtgtccagagggttgtcccaggcagggagcctccagctttcctctctgccctctgtggcatgccagcttcaacccaggtgttcctgccccagccgcacgggggtggtgggcacccgtccgcaatgtcactgcatacctgtggatggcgggcaccggggcatccctgacaggttggttttctggggctgtggggagtcttgggtgcttactctaggtcctcactgtttttactgtgtgaaccctgcgggctggctccgcctcccaggagccgctcccgcatgctgcagcctggtgacctctgggctggtgagctcagcctctgtccacgaggccaggtgtctggggagggcactggaagcagctggaggcagcagggcctgacctgccccatcccctcgagggcacgagcaggcccccagggcttgtcaagggccagggccttcccatctctgcctccttgcctggtcgggtgtgctcggggccatggcacagcgggagggaaacatgggtgggtggggtctttggagagctttctggacgtggtgtcgggcagggtcctggctgaggggtgcgtgagtggctgcagacagttggccatggcttgttggaggagggcatagctgcaacccggcatccagatcgcgcaggaaagtgggatgctgtctccgggtttacttttccatttaattagaaatactagagatgtttccatggctccttttaatggaacattgaaattcttcattgtctccagccagaatacagatattctcacaggctgtgggtcctgatctttccagggcttagttttaggttccaccctctgctggcttgaatatgcacagatgtggatgcagcatttccaaggactctgtggacagcagccgggtgggggaagcgctgtcaggccgaagccctgggagagaagcagagctccagggagaggagccggccccgcagaggagccgccaggcggttgtatgcaaagctcctggtgccaagagttgaacagctcccacaatgcctagtggatgcagggactcatctgctcatgggaagcaccttttatggcattttgattgattgctagtgccagctggagaagaaattatcaggtgcactaaaaggtataattacttgatagactcctgtgttgggtgtgattaatgttcctttggtggaaagcagagggtgagttgataagaaagtgacagcagcagagtgtccacctgctgatgaaccaccctgtggacagagccggctaggaaggcacgcacaccccttcccccgctcgcgcacttgggtcacaaccagcgccgcaccgtcagcttggcggattcactcagaaaccagcacctgtggttctgtggcctggagggtttcagatgccctaaccactgggttcctcagagccatctcagggggagccccgtggccctcccgatgagggtgccaagcagaagggaaggagaagccacagcctctgtgcccgccggagctggacgtcagctgcaggcctcaaggccaccacacaaaatcagttgtatttcttttttttttttctttttgagatggagtctcgccttgtcacccaggctggagtgtagtggcacgatctcggctcactgcaagctctgcctcctgggttcacgccattctcctgcctcagcctcccgagtagctgggactacaggaacctgccatcacgcctggctgattttttgtatttttagtagagactaggtttcaccgtgttagccgggatggtctcgacctcctgaccttgtgatccacctgcctcagcctcccaaagtgctgggattacaggcgtgagccaccacacctggcaaatcagttatatttctatatgctgggagaaaatgtcaaaatgaaaatgttaagtatagcatttataataacattcagaaccataaaataggaaattttaacaaaagaaatgcagcctgtatgcctcgaaagatagcacacattgctgaaagtaaggaacacttcagtaaatggagaggtataccatgttcatgaatcagtcttcatattgttaaactgtccatcgtcaccaatttgagctatagattccatgacatcccaagcaatcccagaaggattgttttttccagaaacagataaactgactcttagatgtatatggaaatgccaaggacctacatagccaaaacaattttgaagaagaataaagatgcaggaggagtcacactacttgattccaggatttactgaaaaatgatcgtaatgaagacagtgtgacacaggtgtgtggagggttccctcgagggacagaactaacaggagaaatatatatataaaggggtttattgagtattaactccacgatcacaagtccccacgataggttgcccgcaagctgaggagcaaggagagccggtcccgagtctcagaacggaagaacctggagtcccatgtttgagggcaggaggcgtccagcacagaagaaagatgcgggctgggagggtaggcccgtctcccctcttctcctttttctgcctgctttatattctctggcggctgatgagatggtgcccaccagattaagcttgggtccgccttccccagccccctgacccaaacaggaatctcctctggcaacaccctcacagacacacccaggatcagtactttgcatccttcaacccaatcaagctgacactcagtattaaccatcacaaggcgtgaggacagatagctgcatccgcaaaatagagaaccaagaaatagtcccacaccaaagtcaggatcaaatgattcctggacaagccaccaagtcaattcaactgagagaaagaagcctttgcaccagttggtgctggaagttctggatatgcacctggataagtgaacccccctccgtcaccacacacaaacgttaatttgagatggattgcaaacataaaagctaaaaccattaacacttcttgaaggtaacatagaatattttgtaatgttatgataggcaaaagtctcttaggacacacaaaaaaattaaccataaaagaagaaaatggctgggtgcagtggctcacacctttaacaccagcatgttaggaggctgaggcaggagcgtcccttgagctcaggagttcaagcccagactgggcaacatagtgagaccctgaaagaaaaagaaacaaacacatacattggacttcctcaaaattaaagtcttctgttcttcaaaagacaccaccgagaaaatgacaaggcacagatcaggagaaaatattcacaatgccattatgcctgacaaggaacctgtatctggaatacataaagaattcataaagttcaataataaagataatttgattttttaaagagggaaaggattttagcaggcacttcacaaaaggaaacatgcaaatggctctcacggcacttgaaaaatccctcagatgcactggctattagggaaatgctgagcgtatctacattgagacaattcctccccccaagaacagctgaaattaaactgagatacttcctcctcacaagaacggcagtgcagaagtcaccaccacacagcagagacgggcgtcctgtgggcagtgcagagttcaccaccacgcagcagagacgggcgtcctgtgggcagtgcagaggtcaccaccacgcagcagagacaggcgtccccacgggcagtgcagaggtcaccaccatgcagcagagacaggcatcctgtgggcggtgcagaggtcaccaccacgcagcagagacaggtgtcctgtgggcggtgcagaggtcaccaccacgcagcagagacaggcgtcctgtgggcagtgcagaggtcaccaccacgcagcagagacaggcgtcctcacaggcagtgcagaggtcaccaccacgcagcagagacaggcgtccccacgggcagtgcagaggtcaccaccacacagcagagacaggcgtcctgtgggcggtgcagaggtcaccaccacgcagcagagacaggcgtcctgtgggcgatgcagaggtcaccccacgcagcagagacaggcgtcctgtgggcgatgcagaggtcaccaccacgcagcagagacggccgtccccacaggcagtgcagaggtcaccaccacgcagcagagacaggcgtccccacgggcagtgcagaggtcaccaccacacagcagagacaggcgtcctgtgggcggtgcagaggtcaccaccacgcagcagagacaggcgtcctgtgggcgatgcagaggtcaccccacgcagcagagacaggcgtcctgtgggcgatgcagaggtcaccaccacacagcagagacgggcgtccccacaggcagtgcagaggtcaccaccacgcagcagagacaggcgtccccacgggcagtgcaaaggtcaccaccacacagcagagataggcgtcctgtgggcgatgcagaggtcaccaccacgcagcagagacaggcgtcctgtgggcggtgcagaggtcaccaccacgcagcagagacgggcgtccccacaggcagtgcagaggtcaccaccacgcagcagagacaggcgtcctgtgggcgatgcagaggtcaccccacgcagcagagacaggcgtcctgtgggcgatgcagaggtcaccaccacgcagcagagacaggcgtccccacaggcagtgcagaggtcaccaccacacatcagagacaggcgtcctgtgggcgatgcagaggtcaccacgacgcagcagagacaggcgtcctgtgggcgatgcagaggtcaccaccacgcagcagagacaggcgtcctgtgggcgatgcagaggtcaccaccacgcagcagagacaggcgtccccacaggcagtgcagaggtcaccaccacacagcagagacaggcgtccccacaggcagtgcagaggtcaccaccacgcagcagagacaggcgtccccacgggcagtgcaaaggtcaccaccacacagcagagacaggcgtcctgtgggcagtgcagaggtcaccaccacacagcagagacaggcgtcctgtgggcagtgcagaggtcaccaccacgcagcagagacaggcgtcctgtgggcgatgcagaggtcaccccacgcagcagagacaggcgtcctgtgggcgatgcagaggtcaccaccacacagcagagacgggcgtccccacaggcagtgcagaggtcaccaccacgcagcagagacaggcgtccccacgggcagtgcaaaggtcaccaccacacagcagagataggcgtcctgtgggcgatgcagaggtcaccaccacgcagcagagacaggcgtcctgtgggcgatgcagaggtcaccccacgcagcagagacaggcgtcctgtgggcgatgcagaggtcaccaccacgcagcagagacgggcgtccccacaggcagtgcagaggtcaccaccacacagcagagacaggcgtccccacgggcagtgcagaggtcaccaccacgcagcagagacaggcgtccccacgggcagtgcagaggtcaccaccacacagcagagacaggcgtcctgtgggcagtgcagaggtcaccaccacgcagcagagacaggcgtcctgtgggcagtgcagaggtcaccaccacgcagcagagacgggcgtccccacaggcagtgcagaggtcaccaccacacagcagagacaggagtcctgtgggcagtgcagaggtcaccaccacgcagcagagacaggcgtcctgtgggcagtgcagaggtcaccaccacgcagcagagacaggcgtcctgtgggcagtgcagaggtcaccaccacgcagcagagacgggcgtccccacaggcagtgcagaggtcaccaccacacagcagagacaggagtcctgtgggcagtgcagaggtcaccaccacgcagcagagacgggcgtccccacaggcagtgcagaggtcaccaccacacagcagagacaggcgtccccacaggcagtgcagaggtcaccaccacgcagcagagacaggcgtccccacgggcagtgcagaggtcaccaccacacagcagagacaggcatcctgtgggcagtgcagaggtcaccaccacgcagcagagacaggcgtcctgtgggcagtgcagaggtcaccaccacgcagcagagacgggcgtccccacaggcagtgcagaggtcaccaccacacagcagagacaggagtcctgtgggcagtgcagaggtcaccaccacgcagcagagacaggcgtcctgtgggcagtgcagaggtcaccaccacgcagcagagacgggcgtccccacaggcagtgcagaggtcaccccacacagcagagacaggcgtcctgtgggcgatgcagaggtcaccaccacgcagcagagacgggcgtccccacaggcagtgcagaggtcaccacactgagccagactgtcctcggccttccctgggttgagcaccggatgaaaaccatgtgctttgagccctggaaagacaatcagcccagccagagccagagcctgaaacaggcagcccccagggcgcagctgcaggaagccgcatcctctcgtgggctccagcaaggcgggggacgctgtgttccctcagtggcttcttggtgccccttgatgtccaggagtgtgaggtgaggtgagggctctgagctgggaagctgacaagtcagggagaatgccaggccagacgcatcggcctgcgggggctggagcagagcctggcactcactgtacttgctccgtctcactccggctgctgcgctggcccagggctgtccaccccaggcgtgtggcagagcaagcctggctcccagagctcccctcaggccctggagcggcaggcagtgggcatcctcagcccaacccatgtccgtgccatgcacaggatagctgagcttgccgctgccacagggtgtcagcgggttggggcaacagacagggccccagtgctggtggccaggctggctgtatgtgtgggttggctgccacctgactgcactgaaacaagaaccacccccaccccaccccccactgctctccacccggttcggggccggccctggctgggcttcgtggatcctcaggttgtgcgggtcatggcttcctggggctgggccagagccatcatggagtcagcacggttccttgcagacacaggcggggcaggcggcgcctctccaccttccttgcctcaagctgcggggacagcaccaaaaagccacgtggacccagatggcctcgccggacttcctgactcagggctgtctccagcctacatcccaccggggctgcacgcacagacggcttctcctggagccctggagcatttcccccgtgtttcggccaggttttctgctttaaatgagtttatttcagtcgtgtcaaagtgaaggtctctttcactcaggacgtgatcaatggcgtggccatcaagtcacagcgttgaaggcaacagatggcctttaatgacgctattttaaaaaataatttcccctttctttccccatcctggttttgtgaggacagagcatcggcatctcagggcgggggtgggtctgcctactctgtggccagcacgcagcagatccctgtaggtggagccccacagctctgtgtcccggcacctctgtgccacctgcacaggggcagagggtgggttttccgtgacgccccctggagccaaaccaccgttgatcacttcctcctgatgaactgggctgtgttggggtgcagaggtctcggttgcgtatgttctgggaattgagccagggtccttgttgctgggaattctcagacctggacaatatcagtagaggagaccacttgatttttagtttgacccctggagaattgaaaagctggaaatctgttttctgtaccttccccctcccaaccctcccccgactccctacctggcttctgtctggagaggacgtctgcatggctgtcctggggtggctgcaggtgtgcagatgctcaccgccactgtctccccattcctgctggagcccactttggtgtgagtgtttgcctggcagaggcatcgcaggcccacgggaggataaagagaagccagagaactcataattccaaaagctggcaaagttaaaacgtgatgtctggccgggtgcagtggctcacacctgtaatcccagcactttgggaggctgagatgggcagatcacctgaggtcaggagttcgagaccagcctggccaacatggtgaaatcccgtctgtactaaaacacacacacacacacacacacacacacacacacacacacacacacataaaaattagcaggtatgctggcgggcgcctgtaattccagttattcaggaggctgaggcaggagaattgcttgaacctgggaggcggaggttgcagtgagccaagatcgtgccattgcactccagcctgggcaacagagtgagactccagctcaaaaaaataaaagaaaagaaaaaagaaaagaaaataataaaataaataaaataagatgtccaaactcacacctgtgcagcttacggctctgcgaggctcacacctgtgtggctcatggctctggagggctcacacctggctacagcacccagaggtagggccttctgatgctccttgtgtgcaaactgtcttggtcctcattaacacaagaagaaaaagcaacggctgaaatgtggaatacgtaagcccacagtgtgaaccattttggggtcagaatcgagcaaaggccaggaagccatagccaggctgtgtgattgcaggcaccgtggaaactccagtaactaagatggcaccatgaagagctgcctgggatgttacagaagccttaggccagtcagtgtgacaacttagatgagatggacaaaacccttgaagaagggtgcgggggagtgccgggtgcagtgacttctttactcaaggaaagccaggatttgggacgcgtgtcggagctgagccccacatctctctttacacccagacctgctcaccttttgtgggattcaggcccgagtgtgcggcatcgtgcagtggagcctccgaccctcacgggcacggcacatccggcgtccagggcgtgtgcctcccacgtgtgtgctgccaccccaagcctcgtggggtcggaaggaaggtgccaggggctcaacaggtttgcgccttcgtcatctgctcttttcccacaggcccaggactgtctgcaaagcgctttacgccgagcatgcttcacccccgagcctgccagagggtccgcagcccatgggaggtgtgggtcatgggcggcgctgaaaggcagacgtggagcggtgctgccgacatcaagacctgactttgaagtccacaggctgctgcttggcatcagagccactgatgaaatcacattaaacgtaatggaattggtatcggcatgcagccctgtgaggccaggatcaggcagatgtgctgccgtttccctgacaggcccgccctggtcctgggcagccacactccagaacgagagtaattatcctaattgctttattgcatcagtgtgggggcagctcgggtagctcagaggaaaaggggcttctttcagggcccatcggcttcagggcgacatgctccacccggaaggggcagacctctgactccggcacggaggcgtcgtgggaatttttagaaaatgatatctatggcatcctgatctctggcccccagctgcagccccctgtgaggccgaggcccagaccggagtccctgaaagcgctttgtgcctccgacctccggcgtttttggcagagctggggcaggagccggggtgctcctcgcggctgaagcgcatcagcctccagggcgagggtgtctcagatccccgcacagcccgtcacacagcccctgggacaatcacacaggacagtgctctcctgtgatcttcaaaggatctcctgggttgtgggggtgcaaaataaaactctgctacaaagagcattagtaattcctcttcccaaccgcacagttcagctcaagcgatctcccggtaacagaaccagcccctgtgcttaccgtgaacacgcctttctgggttcacgccgaaggtttctattgaagtgcacgtcgtttgccaaaaaataaaaataaaaatacagtaagtccaaaatctgctctgtctgatttctaagttaaaaccgtgatcacagcaagaggaatttacatggtatggtgactagggcagcaacttctggaaggcaaaccaatcccgtcagagagataggcggctgagagtctacagcagacctgtgcttcggagatgaactgccctcctcttaattcccctcgcccgactaagctgccaaggcctggtgattcttggggtcttcatggtgtctggtgacctgacagcatgtgccccaaatcctggcccctacacggcctggctgccaccccttggctctgcccccacctgggctgctccaggccccagcagccaaggcctcaaggacacccagagccgggggaaggagcagttcaggtgttttcagacagacaagcctctgagaacaggccttagatcccggaagcccaggctctcccggctggcattggtcagaaagtcagtgcccctgcccgcagcgtgggtcccctaggctctgcggcggcccgactgtcagcttgggacagccttttccaggtgcttggggaggaaacagctgccctcaaactcatgggaattcacttccaggcagcaagcgagcccagggcgtttgtccaggtccaggtcccttggtctgcaagttagagcccagccagtgtcgatgagccagtcagctgcgtgtctgagggaagagctttgtcctcaatgtgaagccacgggggacctgggtccccttcatcaggagccatggagaccctggcccacctcactttgatgctcagcccactgttctgaggcatgaagtggcccagaggcgaggcccctcctccagaggacgcccgccacgcagaaggcgcccaccacgcagaggatgcctgccatgtacacagctcctggtgcagctgtgccacaaggaagtctgcgtgagctgaagcactcgggggcggagcccacctcccatgccagttctctcttgcatgagggcaagaaagtgcggaaaccatcccaggaagacaggaaagccacggagccaggcgggaccccaggcaccacccctgctgcagctgggccaccctcagatatggagactagagggtcttgatagaccccatagtgcctctgcccacggagcccaccagcggtcccttcaccctgagacacggtttccacccacccccagctctcagagcactcggggagaagcagtggctgttgcaacaagtctgagacccctgcagctgctcacaggggcactgggctgtgacctgactccaggacaaagctctcccctttgagtctctcctgcggaggcaggacctgtcgcgagtaattccctgtgtttacaggtggggaggaagggccactgatacaggcgaggggaccctaacgccagaaggatggaggaggttgtggctcggagggaggcctggcggcgccccctcctcaaacaccacgttagccggtgctttcggggactgtaggggctgggggtctgtcctgagccactgtgcaagggtacacagggggctgtcgctgcagggtggatggcggcctctgggggccaagtgagagaagcggggtctccacagagtgtctccttctccgcatacgaccgtcaagacacttcgagtttccagatggcagatttggggaagtgtgtcccaggacacacaggcatcaggagaagagctgctgcagccacacgttgcaaggcgggaacatcgtcgatgggcctggaaagttctggcattccgagcagagcgggagggtggcacgggcagtgtgggtccccggctccctttgggtctggtgcgtttattggcctgtctgtgccatttttttttttagaattaattttgggctgaaaagcctcaaagaaggctttgttcctttgacacttgctctgggagaaaaaaaaatccgtggaaaatctgacatgtgcaatgtagagagaaatcaatagatgggaggaatataattatcctccactcctgaaagaatttttcagatttttaagtgtctcatatcagcttagaatttgaatgacattttaattattttgtttttttcttcttttcctggtttgaatctccatagagttccactctcggattctgcagggagcagagctggtgctcatgcggggggagcagtggcggtggttgtgcccctgcccggtggagccgtgcatttcatcagaagcagcagctcccctgggtgtgggcagcgccttgaggagtggggccttctccgcccggtcagctggacaccctcggctgttttcatgcctgtttgcagaacaggagcccaagcgggaaacagtctccggtgcttttgtgatctgagcaaacccagcctccagaagacctgactctcagtttttaaaacagttcacccttcaggtctttaaacagtaacactcccgggtgttcggcgccctccctgtcgttgggggcacagggcatgtgagggcagggacgtacagcaagaccctagagacggcgatgccggacccagacatggccccgccagaggcagccttcacagtgcgcggggtggctgagcctcacaacccctccgaggcgtgtgtgtggaccgtgcagcctgcgtgtgggtggctgagcctcacaacccctccaaggcgtgtctgtggaccgtgcagcctgcgtgtgggtggctgagcctcacaacccctccgaggcgtgtgtgtggaccgtgcagcctgcgtgtgggtggctgagcctcacaacccctccgaggcgtgtctgtggaccgtgcagcctgcgtgtgggtggctgagcctcacaacccctccgaggcgtgtctgtggaccgtgcagcctgcgtgtgggtggctgagcctcacaacccctccgaggcgtgtctgtggaccgtgcagcctgcgtgtgggtggctgagcctcacaacccctccgaggcgtgtctgtggaccgtgcagcctgcgtgtgggtggctgagcctcacaacccctccgaggcgtgtgtgtggaccgtgcagcctgcatgtgggtggtgtcccgtctggctcacgtgacgtgaggaacagggtgcctgttgcttggtgttcctgtagggccgggctgggctcttggtcccactcccctgccgtttctcattcgtgtccctctcggcatcggtcacttgagccacgtgccgtccttcagggcgcggtgcagcctctcctggctctcccactcccccgccagtctcgcgagccccatgttccaaacacgttggaattggacacgcccctcccctgcccaggtcgtcctgcacagacagcagcagagcctgctgccttctcggtcacatgtagccagagaacccggcggctcccgtcctgcctggccccggctaggggcccacggccgccccgaaggccctcccgtgtgtggttggttttctgttggcctggctggcctggggtccctggtccatcaccaaacactggcctccgtgctactgggaggtattaatgtttcgcagacgtggctacagcccgtgatgggctgacctggggaggaggattctactgggagcccgaggctgacccgaccaggcaggagaccgaggctggagctggggctccctggagaggaggaaattccatcccaacagcagctccggcccctgctctggaggtcctgatggccccggcaggcctcaggccgcaccccccgccgtctggaggccagtctcccgcagtgggaccgcgactggcgccgtggcagatgggaccctgcgttccaggggctcctgggcctccccccgcggcctcctcagccctgctgtaccccacgcttctgcctgaggggggcgccctcaccctgtcttcctccctcgtggccatccccaccccgccccggggctccctgcccaggacagccctgtcagctctgtccgggccgaggctggcctccgctgtgaacagatcgtgttccccgaattccatttcgtgtggaaaccctgagcccagtgtcatggtaccaggagccaggcccgacaccccagcacgcccacggaggggagcactcgctgatgggaggcggccattacgaaagtgtccccagagagaccctcaccctcttcccaccgtgtgggcaacagtgagacagcgctacctgcagcccagtgcggctgccccagagcccaccatgctacacccaccacagccatcgcctccgaacctgcagcatggattcctgtcctttatgtgccactgcgtctgccacgactggtggccgtccttcctctctgcgccttgtcgcacctgcgcctgcagcatgcggcctctatggggtggagcagggcccggcacctcaagggcactcagtacttatgtgccaggtagaagtcgggtggacagggggatgggtgggcggacggccaggtggacaggggatgagtcgacggacggtccagtggacaggggacaggtgggcggatggccaggtggacggggggacaggtgggcggacggtccggtggacagggggacgggtgggtggacgatccggtggacaggggatgggtgggcgcactgccaggtggacagggggacaggtgggcggacggtccagtggacagggggacgggtgggtggacggtccggtggacaggggatgggtgggcgcactgccaggtggacagggggacaggtgggcggacggtccagtggacagggggacgggtgggtggacggtccgctggacagggggacgggtgggtggacggtccgctggacagggggacgggtgggtggacggtccagtggacaggggatgggtgggcggatggccaggtggacagggggacgggtgggcagacggtccggtggacaggggacagggggacaggtgggcggacagtccagtggacagggggacgggtgggtggacgttctgctggacagggggacgggtgggtggacggtccggtggacaggggatgggtgggcggatggccaggtggacagggggacgggtgggcagacagtccggtggacaggggacagggggacaggtgggcggacagtccagtggacagggggacgggtgggtggacggtccggtggacaggagacaggtgggcggatggccaggtggacagggggatgggtgggcgaatggtccggtggacaggggacagggggacaggtggacggacggtctgatggacatggggacgggtgggcggacggtccggtggacagggggacgggtgggcggatagtccagtggacagggggacgggtgggcggacagtccagtggacagggggacgggtgggcggacagtccagtggacagggggacgggtgggcggacggtccggtggacaggggacgggtgggcagacggtccggtggacaggggcatgggtgggcggacggcccggtggacagggggacgggtgggcggatggtctggtggacaggggacgagtgggcagacggcccggtggacagggggacgggtgggtggacagtggggtggacaggtggatggagcccaggggatttggccgggagtggttgtgcagcagaaacccctgtcatggaggaggcgggactcacttccacatctgtgcagtttcacctcccatgcaccagtgtgtgagagacgctggatgtgaatctgtgtctcagcggtgattttagggttagcgggaagaggggacagtttgtttctgacttgtgaaggaatcatctgaagccgggagtgacccagggaaagcagacgggtgtgggagccgacccttccccagatgcttcactgtggccctggcactgcagaaccaacccccagccccgcagcctctctgcccaagtcccaccttccccagtgctggcggctccctctgcaggcccctggaagcctgtcccgtgccccaggagtcctcacagcaggcgagctgcagtgtgtgggagacacacggggcctgcgcctcggctccctttgtgccgcagggggcggggctgagacgcgtgtgcactgggtgctccctccgactttgggctcatcctggaggcactgagaagcttccctctgacactgtccgtggggtctgtgcagggcgtggtgcatttgtcctctttaaagacacgcaacttctgtagcgtgatgatgcgtggagctctgagaatgagtgttggggaaggcgcaaaggaagccactgttgctcacgcccgcggtgtgcactaaactcctgtcctcaaagcagccctgaatctgcccttctcaaattctgccttcctgagtgtttcatacgtaaggtcccctccctcacagcgcctgcagcccagatccacggccttcgtggatggttcgtcttcctgggaagctgtttctgtcggggccgccgcatccccagcccctgtgactgactctccctctgctctcttccttgcagggcctgatcaagatccggggggaccggtgctggcgagacctcacctgcatggacttccactatgaggtgagcgtgccgtgcagcgtgagggcagggcacccggtctcacgccgccccgttcccactcttggcggggctcagtcctgcacaccctggtgagctgtcgcatcacagggtcacccccattgattcaggacgtcctctccctcccttcacggggtgggtggtcacacgggggcttgctggggctgcggggacggggtctgtggccctccatggtctcgagtgcagctggtttgctctggttcctgcacgggcaccctccgctgctgtccttggtcctgcccaggcctccgggccggcccctccttcctggagtccacagctccccaccgtcccctgacaggtgcctgttgggggcttcctggctgcgtgcccagcccctgccacacggaactgtggctccatcgttacctggacacgggcaggtgtgtcccacagggcaggtgtgaaccacagcacagttccactgtgcttggcccccagaccaaggctgagtcccttcagacgccccagttcctgccaactgctcacgtgttcacatgggggctgggagtggtctggggcctggagctcacgtgttcacgtgggggctgggggtggtctggggcctggagcttggatagtcatttgttctcagtccatgtgggagcctcctggtagcaccatccccaccctgggcccgtgtggtcatggccacggtgcacctagagcatctcaggcctggacaccccttcctgcatttggcccgtcactcgcacctgcacgcggaagccatcatcgtctgcctgctgccgacagccagtgatggctgtctcactgcctttgcgttttctgccagggttgctctggcactcaccgcctccaagcgtggagctggcaccgtcctcacgcggtgcctctgctgcgattccgggtcttggtccacgtgccggcctggcacaggcgtttgtgcctgcatttagtggctgtgtcctgactttattcttcaggctcttgagatgtctccatagcccatcaagtgccccgccttgctgaggacccgtgagctcctctctttgtccgagagcaggttcagctgacggtctgtgaaataccagaaagtaaacactctcagctctttggctggatggtcccaacacagccgtgacggggagcagccgcagggcacacgtgtgtgagaggctttcgccaacaaagctgtgcacaccgcagcccacgccagccaccctgccctcaataaggtccagcgccctcagcccaggtcaggaaagctgaggggaccagtgtctccagatgccctcaggacaggtcagaaaagtgggcaggggggcctgtgtctcccccatcaccctcaggacgggtcaggaaagtggtgggggggtcccgtgtctccagatgctctcaggacaggtcaggaaagctgggtggaccccttgtctccaggccagaagctccatagcgcatctcactgagccccctggcccagcaccggtggcgacagcagtggtgcagtgggctcaggtccacgaaggctgcgtgctggtgaggaccgtcccgcacagctttccattggcaagagatgctgaggcgcccaccatgtccccacaaacaaacactctgatgccttctctatggagtggctgcatttcaaagccggcatcaggcgtcctgggctgcatcccttcagtgaatgtggctgctctgggcccaggagtgtctcaggatccccaggactcacctggccaggaccaccagggtgtggtgtttctgggggacgggtcatgccacagctgcactccggcgaggacgcaggttgcaactcttggggaggcgggccgggggggcccacagctgcctgtcagcactgccttcccctgtgtccacgtggccagctgggatgcagtgggtccctcccgcccccatgagcacccagttcttcctgtgccttaaaggcccaggactgcccctcaccagagctctctgctgtgctgtttgtgaggagtgctctgtgtcagccgtcaacaccagttcagacatggcccgagacggtggacagggtgggcccggcctggagcacacaggcaggggcagcccgggccagagggatggccctggatgtctcgaggcaccctcggtgtcactgccaccggagggttggccgcagcagtgtcagggcctgcaggcagggcccaaacccactctccctggagcttggagcgtggctttatctgggacctccttgtgattagttaagatgaagtcagagtggactgctgagccccaaatccaacgactgtgtccttaaaagaggcccagacacatgggggggtcctgtgcccacatggctgagcttctggaaggtggagcctcctgggaggttggattgtggctgaggccactcccatctccagacactgaggctggagtgcagggtgtgtgaggtcagggcccttatcatccacatcccaggacaggctgagccttggctcacagagagccatgagcctgatgtcctgatggtcacacggggtccagggccaagccaggcagcgtgaggctctggcagcagctgctgtctcggggggccgggccggctccttccagctgtggaggctgtccttggggaatcgcatttcaaaacccactgtgacttgaaaaggcatgagggagccccgctgagttgggacggggcccaggagccccttttcttgcttcccgggggccccttggggctccaggagcgagtacctggagtagcgagcgttcagagcagtgcggcgccgtgcctgcagcaggtggaccgccgtgacacggctctttgcggttcactgtgtctcctggggcaggaatggcccatataccggcctcaggggcctggactccactcgacagacggagcagtggccatgcccagtccaaggccagaagcactggggggtcctaggtacagggggcagtgtgtggggagagcgaggacaccacatctggggtggggttttagggacagctacatggggaccccgggagagggatgcacaggtgggcagcagggccagccagtgtcaggcagcagccatgaggcagaggggtcctcagctgggacaggagctgcatcccccctctcacctcagacttgtgtctcggacgaggatgctccctcccgtgtgtcttgatgacgaggcactggtgaaggtttcaggaagtcagggtgtcaactgcgagcccagggccctgcgtgaatcctctctccaaggaggacctgattccggaaggtggcaggcccctgcctgcaacccccgagccgtgccctctgccccacagcattgtgggcggggatctcaggcccttttgctgtctttccgattcttgctggtcagataaggagtcagaggggggtgcccctttcttggaaagttgcccctatgctgtaggggacgctgagcctcttcaggagcctgaaaacctccggaagtttcagcagcacagagcaagaggcagccatgcaccccggggatgcctccctcgggactcctccctccgggcttgggagctctgagtgtgcagacttctctccccagaaggaactgctccaccatggccatccacagcctcacacccacggccatccgcagcctcacacccatggccatccgcagcctcacaccccacactcaccgcttttttcatctgctggtaacgaaaggcagttgccggcaaattcagtcggttaagccagaagcagcagggaaggcatccccaagttccaagagaaggggccagccccctggagggtgaaaggcgaccgggtggctctgcctgaaactcctgacaacaagcctgtggctttcctcacgtcgtgttcccagatctctgtggactccaccagggtgccctgcagctaactcagttctgacgacctctacccagggtgagtgcagaccccgcaggccaagggcccgctcccatgagacaccggggatgcatggacggccgcttgctctcagccggcagagggaccagagccatgtcctcagcaccgttgcgaggacccccaggatcccagggccagcgcagcacaggagaggggggatgcagctcctgtcccagctgaggacgcctctgcctcatggctgctgcctgacactggctggccctgctgcccacctgtgcatccctctcccggggtccccatgtagctgtccctaaaaccccaccccagatgtggtgtcctcgctctccccacacactgccccctgtacctaggacccccccagtgcttctggccttggaccgggcatggccactgctccgtctgtcgaccagggacgggcgccgtccagaatgcagcaggctgtggggagggttgctgcggtccccacatcggagcggttgcctgacgacgcggatgcaacagcaggttgtgaatgtgggggtcacgcagctgcttttagcagcagggatggcactagctgctgaaatggaaaatccgggcctgtcctctctctccacttgggttttaggaagtcagctgtcatcaagaaggatggagtgaggactcccacagatggttttgatgcagagaaaactcactggatctggagtacagggaccctgaacgttgcaaacaattctccattgctttttaggggagttgaacataactctgttgctagaaagctgcgggaaatccaacactctgattcagtcccacggcgctccttccacacccctttcggagccacttcccagacgcggcacagggcagcccctgccagggcctgggcgggcagggacccacggccacttcccttgctgcctgcaggagtaccccactgagctccaccccctgcaccccaaggcttgggccgaggccgggcctgtctgtgagcttgggccgacgtcgtggagaactacaattccgtccgccgaaggatgctgtcagggctacagacaggccccgtgacgggcacggagccccccagagtcgactcaccgctggggcccaggccacgcaccacagaccctcagggagctgcctgaccagggcgggggtcccctggatctgcctggggccacctacgctcctggagcaagggtgtcccagcctgtggccggcagcctgcaacttgggggtgcgtctctgggctcccacacctgcagggggagttttaggccactgcttaagtagagtgatccggaagcactgcccctgcctgaggtcactgtctgcaccctgactccgggcccaggccacggccatgccttccagggtacctgcgaccaccctgctcaccctgaggtgctctcggaggctagaggccattcatgctaggagcgcgcactctgcgtggggcggaccacacagagcagccctctctgggctgggctcccagagttctgcggggcctccaggcgtgggtgggagtggctgagggggtgcagagctgctgtggacgccccccagggacatggccctgctgcctagagcagccttgctgacagaagcctcggctcacgcccccgtgcccgccgagctcccccacgggtaccgagaccgcgtgtgccccaacactcccagcaggagctgcaggaatccgtgttgaagtgctcagcctggcccggccagcttccacgcagtgtatcttgtggctggtgcatccccgtgtcaggcaggcgcccctttccagcctgcccccgcaaggctcacacagagcacagcggctggggctgctcctggctgactcccaacagggaagctcaacacaaccttctatcctcctggtgtcccaggacccacccagcaaggatttgggccaggagatcctgtaatgcctttaactgcgaccaggagccgtgggctgccagcccgctcagactgtgggtcaccaagcgccctcagatatgggggcccgctaatgtggaaataatatatatccaggttggcgtcgcccgtgaagactgtaaatgtcaccattaggggaaccacgcctgaatcccatccggcggctgggagccgaggcttctcgccttgtctcctggctgttttattggtttttgtaagaagagaatgttttctctgtgtgctgggggctgggaaggaagggcagtgccgggcctggggaatgccgggggcctagggtgggaggggcctggggaacgccgggggcctagggtgggaggggcctggggaacgccgggggcctagggtgggaggggcctggggaacgccgggggcctagggtgggaggggcctggggaacgccgggggcctagggtgggaggggcctggggaacgccgggggcctagggtgggaggggcctggggaacgccgggggcctagggtgggaggggcctggggaacgccgggggcctagggtgggaggggcctggggaacgccgggggcctagggtgggaggggcctggggaacgccgggggcctagggtgggaggggcctggggaacgccgggggcctagggtgggaggggcctggggaatgtcgggggtctcgggtgggaggggcttggcctggcaggtggcccgctgcagggtggttttggccgggcgcggttcaaagccccaggcccgtgccctggcatcactcagcagagcagcccactgggcgagtgcaggcctgaggagacaccgaccttccgtgggcctggatttcccgcttgtcctggggtcctcttgccagggacaagccgtggctgggggagacaggggtggcgcctcaaggtcagcagtgctcacggctgttctacccacgcagccaaggacagcagcgcctgcatctgagccctgttgttatgcagccctgtgctgcccatcctccatgcgccccttactggcttgtgtgatcctgagcaagttctgtctttccagctttaaactgatcacccactaccctacggcggttgtgagaatcaaatgtcgtaacatgcactggaatgaaagttccttaaaggctccaaagagacggggattttccagatatctttctgttactggtttctaatttaattcctttattgtcagaatatacttgatatgccttgagtcttttaaaatttagtcagatttgttctgtagcccagaatatggtttgtcttagtgaaagttccgtttgagccaaaaatgaacagacagtgttctgtcaggattcattagatcaaattggccaatagtgtttttcaactcttctgtacgtcctcattttctgcctgttttatcaattattgagataagggagattgagatctccaactataattatggatttctctatgtctgcttacatttctatccgtttttgcttcatgtcttttgaagctctattatcaggcacatacgtgtttgagagtcttctgacctcctgatgaacattgtgaaatggcctcctgactgctgatcatattctctgctctgaattgtgctttgtctggtgtgacggtggccagtccagccttctcgtcgctcgtgtttgtatggtatgtttttccgtcctttacctttccgcctgtgtgtgtctttgtgtttgaagcggatctcttagagctggcgtatgcttgggtcttatgtttaaatccagtctgacaagtcctgccctttatctgggtgtctgggccgtttgcatccaatgcagtctttcctggggaaggtttcagcctgttgtcttgcgatttgttttctgatcctcccatgtgttctctgttcctttttgttgctgttattttacaccttcctctggattaattgaatatttttgtgactcctttttattttctttcttggctgtaacttttttgtcttatttgtgtggtggttttagggtttatagtatatgcctttaatccatcacagctcaccttcaaggtatactatgcctatctcataaatgctgaaagaattttacaacaatattctcccaacagtattttcctctcctggccttttgctattattgccaaacagtttgattaaacagtccagttatctttcagagacatttcattcaattggaagaacagcctcattgtgtatccatatacttaccatttccggagctcttttttccatctgtgatcattctccctccacctaacatcaccatttccagagctcttcactcctgcgtggagatccaggcttccatccgtgatcattctccctctacctaatatcaccatttccagagctcttcactcctacgtggagatccaggcttccatccgtgatcattctccctccacctaacatcaccatttccagagctcttcactcctgcgtggagaccgaggtttccatccgtgatcattctccctccacctaacatcaccatttccagagctcttcactcctgcgtggagatctaggcttccatccgtgatcattctccctccacctaacatcaccacttccagagctcttcactcctgcgtggagatccaggtttccatctgtgatcattctccctccacctaacagacttgacatttcttctagcataggtttgctggtgacaagttctttcagcttgtcaatgtctgacaaagtctttatttcaccttcatttttgaaagagattgttgttgggtatagaattctaggttgacaggtttagtactttaaagattgtactctactctcgtctcatttgcattatttcctgtgacaactccttatgtacatactctgtaacatctttatttgcatgtaagatttttatcacgagttttaagcaatattcgattatgatgtgtagtttgtagtactattctaagagatccgcttcaaatacaaagacacacaggctgaaaggtaaaggatggaaaaacataccaaaaacgtgaatgagtgacaagaaggctggactggccaccttcacaccagacaaagcagaattcagagcaaagaatatgatcaggagtaaagaggccatttcacagtgtttatcaggaggtcagaagactctcaaacacgtatgcgcctgataatagagcttcaaaagacatgaagcaaaaatggatagaactgtaagcagacatagacaaatccataaagttggagatttcaataatagataaagcaggtagatagaaaataaggaaggatgtaaaagagctgaaaaacactactaaccaacatgatctaattaacatttataggcagtttgtgacaatttgattatttgtcaatcaaactacaatcaaagtgatcaatagtgtcatattgtcatgcagtaaaatgtgaccatttggttatctggtgttgttttcctcatattttttgtgcttggagttcgctgagttgcttgaatctataggtttatcattgtcattacattcggaaaatatttggccaatatttcttcaaatattgtttctgtacctctccaggatgtgaggaggcttacacgggtacgagtgctgagccctgtctggggtggagggtgtgtgagtcagtactaagtatctgttacccaaagactcagaaagacttttactttggtttctctaaaatggggttttcccagtaacatcagagttcaacactgtttggcttctggattcaggctgtttcagagatctgctattgcccaacacaccccaagcctcagtggcttagagcagcagcatctttctcctggtcctgtgacaggttctgctgggcagctcctctttctcctggtcctgtgatgggcttcgctgggcggcttctctttctcctggtcctgtgataggctctgccgggcagctcttctgctgagcagctcctatttctcctggtcctgtgataggctctgctgagcagctcctctttctcctggtcctgtgatgggctctgctgagcagctcctctttctcctggtcctgtgatgggctctgctgagcagctcctctttctcctggtcctgcaatgggctccgctgggtggctcctctttctcctggtcctgcaatgggctccgctgggtggctcctctttctcctggtcctgcgatgggctccgctgggtggcttctctttctcctggtcctgtgataggctctgccgggcagctcttctgctgagcagctcctctttctcctggtcctgtgatgggctctgctgagcagctcctctttctcctggtcctgcgatgggctccgctgggtggctcctctttctcctggtcctgcgatgggctccgctgggcggcttctctttctcctggtcctgtgataggctctgccgccggctcctccttctcctggtcctgcgatgggccccgctgggcagctcctctttctcctggtcctgcgatgggctctgctgccggctcctctttctcctggtcctgcgatgggccctgcttgctggcttctctttctcctggtcctgtgatggcctctgctgggcagctcttctcctgagcagtagcaactttctcctggtcctgttatgggctcccctgggtggctcttctgctgcacgtggtgtcaggtggggtcattcacgagctgatagctaggccgggaggtccaggaaggcttcacttgtactggaacctagtgcatctcccggtggccttgccacatggccaccattggcttcctcacagcttggtggcctcagagtagagggacctttaatggggttggagctgcctcttcaaggactgagcttgaaagttcagaacatcactcacgctgcattctcttggccaaagctgagtcccaaggtcggctgggattccaggggaggcgagccatgctcaggaggggcagtggccactacagctgagcctgatgctcttctctttttaacacagcattgggtcatgtcagccccatgtctgttacatttgtcaccgtctttatcactcagtgtcatttttctccatctgcagttgccttggtgggaagtgggggttccacgtccacaaaggcatcgcactgtgtccctgctgtggccctttcccaggtgaggttctgagagcccgtggcaattaccacttcgggacacaaacatccaagggccgcttcccacggggacgcttgtgattggcttgttcctggaacacatgggacctccttcttcatcccaagaccctcacctgataagcataagcagcccccgctcccctccccgtcagagctcagccgacacacgtcagcagccccagcatgcaagagggaaggagaggttaaagtcccccaccccaaaagccagaccaagagctgggacttcgggtgtgggcctagccctggagatgcttgttcccaacacctggccaagcctgctgcctcctgcatgggtctcgccgcaaccccaaacacacaacaagcagcctaaaagggaagtggcagaccaggcattccggttcttctctggcttttccctgtgggcactagggggtgggtcccacatggggcactcaagccctaacagacgacactcattctcccccaagatctgctgccttctaagtccctaaacaggtgtcatccccttcactctttcctcatgtttttcttatttaaaattgtctttttaggagaagtttgcaggctgtttcctgaggtctgggccagcagcaccgccatgccctgacccaccattcccctggccgcgggctgagtgtcccagctgcacgggaactcctggccttgcctgcagcatgcgacactgccacacccacctcacggctcacagccaagtttcaggtcatgatgttttctcctagcctcagtgtaaacaaaaataactctttgccctctaagcaaatgagcagaggcctcaggaccctccccagcccacggctcttggggtgcactggggccctgtgcccggtcaccccctcgggtgtgcacatggccgcctctcctgcgcttcccacacccccaccccggagcaagcgctgcccagcacagcccctatgtgcgctttctgccacctgggggccccgacttccacgtagcctctctggaccctgggagtcccaggacctgggtgcggattctgaagcgtctgggggccgcctccctccctgcagggcgtgttcattgttgtccctagtggggtttctgcggctgtgccaggcccaatggctcccgcgggctgtgctagcaaggccttcagccctgagcagcatgcgggcaggcccctccacaaaggcaagcagagcgtgcagcatcgtccatctagggcactcttcccaccaccaccctgggctcaccgactcacacagccctggcagtgccactctggatcccgttgttgggggcttccagaaaacagcgtgtgggggcctgggccccatttgccagtggggtgttctcactccagacaagtctgcacaaccactctgacttgattgatggatcgactgtctgatacaaggtcttgttctgttgcctaggctgagtgccgtggcacagtcgtggctcactgcagcctctacctcctgggttcaggcgatcctcctgactcagcctcctgggtagctggggctacaggcacgcaccaccatgcccagctaattttttatttttatagaaatggggtcttgataagttgtccaggctggcttcaaactcctgggctcaagtgatctgcctgccttggcctcccaaagtgctgggatcacaggcatgagccaccgtgcctggccttgatagttttgaattatggtgcagggcaagttcccacccttcctcctggctgggctgctgagtgggaccctaggtgtggggacttctctgtgccttggcctgggaggcttccaggtccccacagccaggtcttgcgcttagagccttgagctgggctcgggacccgggccccattcctgctggtccccaaccggcacgtccccacccacgtgtccatccccagggaaagggcatcctgagcctgaggggccgcctgtggaccccggctcttgggggttgcagcttggccgcctgtgggcagcaggcggcgcgttctccgactgcctgttctccgactgcctgtgttctcaagttgggcacggggtttacaggtgtcgtctctccttcagctggggtgtgtattctttgcttttagatggtaaagattttaagacaaaaatgaacactttgcttttgcttcaaaagctccctgaatgtctcttggcccctcttagcgtggcaggtgggctccacgtgtgcagggccaggcgggccggggggatcctgtgtgcagtaggagccggggtcagggggccagggacccacaagcctctccctagccccgccccccgagatcggccaggcacctcacggcccctcctgtccctgcagacccagccgatgcccaatcctgtggcgtactacctgcaccactcaccctggtggttccatcgcttcgagacgctcagcaaccacttcatcgagctcctggtgcccttcttcctcttcctcggccggcgggcgtgcatcatccacggggtgctgcagatcctgttccaggtgagcccgcgccgcccgccctgccccgtgtccacagagacgctggcccgtcgccctatttctggctgccccgctctctgggaggaccctggggcattacaggccccctttcttggggacagcctgtcctccccagccttcgtttgtgtcacgggccccactgcagccctgtcccgggctgcaggctgagggtctccttcccaggcttcctccaaggactggctcctcccaagagcgtttcctgcagctgcgagaggcccggccatgtcctgggctcggcagtgggacggggtcagcacgccaaggccctgtgtggacacccccacattcctgggatccactcctaagattcttccattctagaggtttcctttcaagtgttcatgtcagtccacggggaaccagggtctgagagaggccagggtcatttgcctccatgtgggtgaggggctgcctcccccagcccccggaaccccgggtaccccctaacgccccgtcctgcccacagtcaccgccatccctgccccacaagccccctgcattgagggcgcctcgaaggacagagcacccccacgctgcctccaggggggctgggccagtcccgagcctttgcttttccctgtaaacgctacattccgactgtcaattcccaaggaaaatgtggtggggattttaaaggtggttctctctctcgattgtttcaatggaggtgtaacatacagccaggaaaatgcacaggtccaggtggcgttccacgtgctctggaaaacagatgtacctgggtgtcccacgccccttcccctgccctgcccgcccctgcccccgcccttcccctgccctgcccacccctgccagagcaccgccgcctagaggggcaaagctccgtcagcaggcacgggtgccacgccacgttggtgcacgtgggggcgcccatggttgttggccgggtcctgtttcacggtgcgtgcctgcggtcggttcacccgtcccgtctgtgcacgtgtggtagtttctggttttcaccacagcctgccgtgcagaggtgcaatctcgtcatcctgtggatgtattttcaagggcgctactgtatcgtgagcaggcctgtgattcaccttactggaagctgcacgtgtccagggtggctgtgctgttcttgacccctccccccagcaaggaccctcactctggccgccggggccctgagcagctcctgactccctcgggcttttccgcgttagctgcttggaggctggcaccggtgcccatcaggtgatttccctgtgggcatcgatgtcgccgtgaatctaagtgggaagaacggacttgctcacagatcgtcccccagccaggaccgcacgtttctctctgcagctgctcagggctcctggaatagcttcagtcggttccatgtagccggaccccacgcgtgtttgggggctcctggaatagcttcagtggattccatgtggctggaccccacgcgcgtctgggggctcctggaatagcttcagtcggttccgtgtagccagaccccatgtgtgtttgggggctcctggaatagcttcagtggattctgtgtagccagaccccacgcgcgtttgtaggctgcagctctgaggtgacttctttttgttgatgttgtaaatggtgcccttttaagtcacacttcctcctcttggtggctaagtgtgggactctggtgaccttgacctttctcagacaacctctgcactggtacttccccgtctgtctgcgggtccctcagagacgcgtcctgtgggtgatctagggattctgccggttctacgtccatccctttctcccctgctgggcgggctcgagtgctgtcctgggtctggggtcccacagcagggagggcccgccaccccgcgcactgcctctcacgatgccggctgtgggttgttttcgtggctgcttttattcacttctcctttgtgggtttttagccatgaatggatgttgagttgtggcgtttctccatcagtcacgagatgacttgttgtttcgtctgtaacgtggcgagttacattaatgctgtggatgctgaagcaagttcacattcccagaacatctgagcctcttcctctgcgggagtctggaaagcagaggtgaccgtccctcacacctggcagtgctcctgcatgaggccacctgcgccgccagggtctctgtgactgatcacccttgcgggccgtaggacacgcagagtttccattccttcttgacttgaggcagtttttgtggtgaacatttccctgggaatttgttcatctgttttcaaatcttttggcaaaaaaagtcatagtattatcttagttttatagcctctcaagtagccgggactacaggtgccaccacgccgagctatttttcattttttgtagagctgggggtctcgctatgttgcccagtctggttttgaactccagggctcgagcactcctcctgcctgacctcctaaagtgccgtgactgcaggtgtgcgcccggcctcaaggcctgtgtcctcaccgacacgcatctcctgagacagcggggagcaaggtcatgcttagggtcagcgtggccgtctttctcttttaagtaacaggcccgtatatctcaactgacatatttggacgtatttccacatctttgtgtttttctctttgttctttgtatctttctctctcgtttttttctgttattttccctcctctaatggataaggaagatcctccgtttcctcagtggttatcaatcaatcagccatgttaacttactgaaggtctcagtttgggcagcatctttgccaccatgaccccccgaggtcctcagcccgcccagcccgcctctgtccaaggtcctcagcccacccagcctgcctctgtccgccccaagccacttgcgtcctttgctccagtgtttcagctctgtttcgttttattaattgacttattttagaacacttttagattttcggaaaaactgtgcagagactacaaaggttcccttatccccccctcccagtttccctgcgctcagcgtcttgcatcggccaggaccttgtatagttgataggcaggactgataaactgttgccaactaaagtcccggctgacaggagagccattcgcagtgttgctcattctgtgagctccgacaaacggacgacgacacgtgtccccatcacagcttcatgcagagtcgcttgtggccctggaagttctctgtgccccgccgaccctccgtctccacggtactgcctcttccggacatcctagagtgggaagcattgtgcagcctttgcggactggcttcctgccctccgcggccgcgcgtgggctcccgcacctcctgcaggctccactgcttgtttctcttcggttccgagacgcccgtggtccgcacgtgccccggtttgtttctccactcagcctctgaagggcaacagacggagccccgggcacatgtgcttcccacagggcgcacaaggagggttgtgctgagcacaggcgtggggccagggccggctgtgccagccccgggtcccactgccacccagggaggggtgtccagcctgaatggaggggtgtgttccaggattcctgacctgggtggggccacacacacgggtgactcctgagccgtcttcagccatgcggtcctggggtcccagctgctggaggagggccgggctggagactcccgggagtcaccccgaccccacacacctcctgcgtgggctgtgctgccccagggtcccgcctgcccctgccggtggagaacacagagatgcccacgccaggctcgggtctggttccgaggccggtccaagggcacccctggacacacagcccaggcaggggtgttggtctgcttggctccgtggctgcctggcagtggggagtgctcaggatcccacctcccgcttccatggcccgtgtaccctgtagcgtccctccctcaggctgtgctggccagttccaccactgcccctctcccgataagctgatgctgcctgggagaagctctcatgaaaagcaaggtgctgagttacttaagtaaatggagaaagtgggagtcacttgagggctgagctaccgtgacatggaatggggaggtgacccttgaaccagaggcctcaaaaacgtccttgtttattcagaacgcaggaacctggccagggggttagatgagaattggaccaacgggccctggtgcaggcagacagggaccctcccaagcatgacggccaggctgcgggttcccttagtgccggtgctggccccgttttggagtccgctgcctggtggggtgagtggcggtggacagtggggatgctgaaaggggaggggacagagctgggcctcactgcacctgggactgtgagcaccaccctcaaagacccggcacaggcagcgcctcccttccaggcctcggaggtcaggctgcgtcatcctctccagccccacactgtgtccaggacgaggtggaagcaccagggtcgtggctgtgctctgcggcgtggcctggcgtccccccttggaagacaagatggtcggccggcagtcccggctgcgatgtatcctgccccctcacaggcagtgtggggtcttgaactagggcttttgcccccacaggcgtacagggcagagggtgtctgggggatgatatggtgtggggctgagagtgacccgcgccctctaacattgtagtgtcctggctggggctgcgtactcccctgtgccgcgctgtgacagccgagtgccctgagacttctgagcgccgcctgcctggagcctgtcctggttccgtgtgttcccatctgagcgccgcctccccggatcccgtcctggttccgtgtgttcccatctgagcaccgtcccccggagcctgtcctggttcccgtgatccttccgttggggagttgcggcatgagcagcctccctcctcccacgcagtttacacagctgttctggagggttccgcggggccctggggccgctgcctgcctggagaggtgcacaagagcagtgaccgcagagcccggccacccagccagcaccccacgggagccatcagcctccactagggcactggtgacagggagacgcagccccggactgccagggcgggaggggcagggggtgagctcaggtctggaacctctgaggcgcctgcccacagcgggctgtccggccccaccccaccccaccctgcccaaagggctccttgccctgtggtggctgcaccccacgcccgctcaagacagaggcccggaggccctgccagccccgcacacacaggccggctgtcctgaggctctgtcccagagctgggctcaccggcccttagctgtgtttcggttgtgatgaaacaacacagataacgcaaagtaagttcatgcttttgaagtgaactcgggggcctccagcacgttcacagcgtgatgcaaccgccgcctccgcctggttccagaacttcccataccccccccacacccggcaaaggagaccctcacacccgccgccgggcctccaccagccactgggagcttcatctctggattcccgactcggacgttccatgcaactggcatcctacaatgtgcggcctccgtccagcctccctccctgagcaccatgaccctgggtctgtccctttcggggcacgtgctgaactccgattcatttgcaaggctgcatgcgtttccgtgggtcaggcacagggctctgggtcactgctgtcgtggatgctgatggactggtgttagacctcagcagattctctacctcccaccatgttcttctgccctcatctcctctctgtgacactgaagagagacctgggttcacgcccaccagagtgcccacctggaacacaatgcatttcctcagcagagggtccccgcgagcgcaggggtgtcctcggcggagggtccctgtgagcgcgggcgtgtcctcggcagagggtccccacaagccacctgttctccgtggcagctgacaggcaggaggctgcatccaaagacgccactcttccttcttggggccatgcgccgttggcctcggaacacctgctgctccgtctcttgggcccaggattccatcacctcaagctcctcttcctgtgccggccttggggaccccctcgggcctcgcctccgctcccagccaccggccgggtcatctgtgggccgcacagccttgtgaggactccgccggcgggggcgagcacagatgggcagtgagaagactgatttccctctgaggagatggctcagtgatgctagaagaaaaacaaggaaggcgaggtcccccaggagcgctcaggccgtgcactctacgcggaactgcgttttcataacaaaacagccgaccagatggagggcgagagatgcaccagagcagctgaacggggcgcagctggggatgcctctgcatggagcagggccccgagccccgaagctttcttagaaacaggatctgatgcccagatctgtgctctctggagccctagttccctgaggctagagttccccactgagcccacagcaggatgacccaagggggctttggaaatacactcaggcagggcccaccctgacccaggcaggcaggtgctcagggctgggtgttcctcaaagctcctgatggttctggcatggccgagcatccgaacgggcactggctcaggctgtgccccaggtcgctttggtcccatctgccagtcaggctgaccacagcgaagggccagaaagacccgagcttttcccaccaggacattccagtgtcacctgtggcatctcctccagagcatccccaagagtgggcccaaaggtcagacctcagtgcctagccctgcaccctccctgtcacgggagctcaggggctcccagccaccccaccccagaccagccctggtcacactcaggacggagggcatgggggtctggaccagcggaggggagctggtggcagaggtggctaaccccagccagggcgaggcggggctgtttttggcacaggggtttagtaaccttgtagacagtggagaataagaaataactgttttggggctcagaaccagaaaagctatttttcccaattcacccagggagagccatgagtgcacagttcataaaacaccatcatcgcccataacactgatgtggctgccctcacgagtcccttcattagacgtcgatgtccctgccctcaaccttcctcctgagttacggggataaaggctgggctttgatgcatcaaatctggctgacggagctgtctgaggaagccacacccaggtcctgccggcccagggtccaccggctcagctgcagaccatcacccatgcagggcgaccggccacgcaagctgcccctgtctccctgatgcctccacggcaacggcaggggtgaggtctggcagcacacctgtgatatcacccgacggagctgcagggacagcggctccatctccagtttcgtcacctaacgatcgctggcctgcggggatgtccagaagcgggtccctctgagtccctcctgccgcaggtttactcactgctgctgctgagtctttccttggagctctcccagccgtgctgctcagccagccctgcatgcagcccctcccctctcctgctgttcatctctgtggcacagggtcctgtgcctgtgtctcacttccttgcatttcgtattttggagtgggggcgttactggtggcccccccacggcccctgttgtctgtgtcacccatcggctgaggggcgtccccagtacccactctccaagcacagcctcctctgtttggactcaccagccttccccgggcatgaccccggcaggtgccctctgaaagtgaggagttccaggagggcacagggtctggtggtctggtccagcccccgccttgcggatcactaaagcaagggacagaacctgcacagaaatgtgcagtcatgggaggaatgttctggaagcacctgccggaaggcacctctgaggcatctgctgtcccctccatgaaggcacagctgggtttcagttgtgatgctgggcccgagggacagcaagggcagagctgggtgcaggttccctcccccctccctgctccaggaagagaggcgccagctgcccaggggccccacacgagcccctgcacgagactcagctgcggcgtctccacaggccgtcctcatcgtcagcgggaacctcagcttcctgaactggctgactatggtgcccagcctggcctgctttgatgacgccaccctgggattcttgttcccctctgggccaggcagcctgaaggaccgagttctgcagatgcagagggacatccgaggggcccggcccgagcccagattcggtaggtggctcagctgggggcccctgcccaagggcaggagaaagtcgggtggtgccagccccacagcctgcccgtgtgggttggggacgccagggtaggaggagagtcagcgccgtccgcagtgtagcgtgccaggaacaaggtgtgtgagttcgggtgctgctccgtccccgggacccaggacagctgacccttagggagcagcagctggggtctccccagggacaggccacggggcagctgggagccccacctggaagatgtcactcccctgccaggctccgtggtgcggcgtgcagccaacgtctcgctgggcgtcctgctggcctggctcagcgtgcccgtggtcctcaacttgctgagctccaggcaggtcatgaacacccacttcaactctcttcacatcgtcaacacttacggggccttcggaaggtatgagcctggggtccccgtcccccggagctgggtatatggggagactcagccctgaccagccacattcaggtggggttacagtgcaggcccccatgaccccaagtgtcccctgccccaccccagcctgacccaggcacaggccgtgctgtccccactaccgggcctggacacgcaggcctcctcgtcctggtcccatgaggcaaaggggcagggcccgaggtcaccaggcaggtgggctgcggccctggaatgcctactgggggcgtaagggagaggccaccaggccccaaccccctgcgtgggaatgccaggtagtgccacctgaacacaggcaccctccctgtcctggggccagccccttggcctctgtccccctcatgtccaccctgagctgccgaggggcatggggcacatggcggctgcagctgggtcttcacgggcagagaaggtgttctcgaatgagaccctggggccacagttcccaaaagttctcctcagccccacccagcctctcagtagcccctgaccaggaggcaggtggaggctgtagccctccccctgggccaggatggacagtcggggaaccccccccacccatgcaccccactcggcccagccggtgtgtgacgtgggcctggcctgcctcggtctcccggcagcatcaccaaggagcgggcggaggtgatcctgcagggcacagccagctccaacgccagcgcccccgatgccatgtgggaggactacgagttcaagtgcaagccaggtgaccccagcagacggccctgcctcatctccccgtaccactaccgcctggactggctgatgtggttcgcggccttccaggtgggggacggtccctggcgggcgcatggacctgcctgtaccccaccctcttctgcccatagatggcaggtttctagaacgcccactgaaggggctggtggggagggaggctgggagagatgggatcctgcctgagctgagaactgagcccacacgacatccaggcccagccttaggaggggcctcatgtgggagcccagccccaccgtccccccgggtctgccaggtagtgtctcatgccaggaatcccagcccgggtgccatagcgagaccctgtatctacgaacaatacaaaagttagccagcagctgagggtggcgcctgtggtttcagctacgcaggaggaggaaggatcgattgagcccaaccgctgcagcctcaaatgatggcagcgttgccttccagtctgggggacggagccagaccctgtctcagcgaacaggaaagaaggaatccccagggctgggggtagcagaggcacccatggacagagctgctgtttctgtcctcccggtcccgtctcagccaccagaaaactgagcctcagggaggcaaggcccagacagagggtgctggggtggacaggctccaaggcacccagccaggggagcgaagccagcggccgacatgggaatgagtggtcagggctacacgaagcaggcagccccttaaggggaccccagccaaagagctggagtgcggctgcccagggaacccacctccaggaaagcctcaggagggagtggagggcacagccgagcgtccggaggggctgtgcctggacagcgagtggcacagccgtctccagcccgacctctcctcccagacctacgagcacaacgactggatcatccacctggctggcaagctcctggccagcgacgccgaggccttgtccctgctggcacacaaccccttcgcgggcaggcccccgcccaggtaggatgccctccctgccgctgctcaggggtctcccccaaatccaggtgtctgctgggatcccaccacctgtacctgcacccccacctgctcacgggaagcgccccttccctcccgcagaggcaggaggtggggcctgctgggagcaaaaagggccccccccccccgccccacatcagccttggcatcaaggctggtcccacccctgcctcatagcccacctcaaaccaaaccagccgtggtgagaggagcccaggacagctgctctgggcagggtgaccccggctcacagctttgttgaggtgtcctctaggtgccacctctgctcctggcctggagaggcaagaaggacaggcagggccctcactccaggagccccaggggtccatggtgaactgggcaggggactgcagtgagagccctgtgggccctgcagcctcgcccactccggccagtgacgtggtgacattccaaggagggagccccgcagggtcagattctcaggagccagaggtggtagccatgggggaagtcaccctcctctccataccagggatgactttccagactccacgcaggggagctggggtgcacagggagacactaaggaccctgagcattgtgaccagaggacaaggttttggggagagctggggccttcagaagaggagcaggaggcagggatggggccccgctggggtacgggaggggatctgaggacagtgtggggtggggcccagggtggggcagagcatggaggattggagacgtccacgtgaccagacctggggcggccactctgacaagcgtttgtatcccctgccccacatggttgggattgagcagccccctggaggtagcaggaacagagcagagtctggactgcccacccctcccctgcgccatcagccgccgattctgacggaaaacacagctctggattttccctccaagaacactcgggagctgggacagctgcaccctctggagttgctcacagctgcctggagaccccagccaaggagccggagggcggggatgggaggggcgccgaggtccacagaggcagtggagcagctgggcccgagtctggcagcccaggcaggtgctcccggccaagcgatgcttccagggctgcttccccagcacgggtatcacagggagctggggcagaggagctatggggtccctcctcatgggcccggcctcaggcagtccaggggaggctccatcccagagcccccggtggggtggccgccctcctagctggcgccctcagggccaccttcctgtgaattggcatcaagctccaggtgacttgcctgccacgtggccaccagcagccctgggagcctgagaccttggagcccggacaggcggccgttcccctggctcactggggaccaggccccagagctcgtccttcgaggctcaatacgggtcttctctgttactgccccgtctcagcagccttcagagccccccagcccccaccccagatcgcagcctcctcggtgcctggggaccctggagctggcccagaggaaggtttgccatcgtcaggtcgtgacggaagcctcttctggccaagcacacagtcggatcatctgtttctcagccaggaggtgctggaaaaagtaatcatgtcagagcagcttcaggtccatccatgagtcccaaagtctacctgaaaggatggatactgtgaaaaccaagtgtgaaaagcagtaactattttatgtgaaccagtaatgagttaacatttagggaaaacattattgaacactgccacacggcacatctctcccgtctccatgatacacatgtttggcagctggagcaggtggtaccatgacaggctgtggctaaccgtgggcctgcattgagttcatcatcgactttaaaactggaagatggaacagacacttacccctgttcctcccactaagtgcaaccaagatccctggacgttatacataaaacaggaagaccgaaggtgagagaagagagccaccagcagggccctcgggacggagccacagccccaaaatggtggtgatcgcctaggcttgctttcggcctcattttctagacttgggggtgaggaaactggaaacccagtaatgccagcagatgcagacaagaaacacctcaacaaaaatctgctctctctgactaaagggccagaaaagagcagcctagcaagacaggaaatttacataaaataatcaccactccaggcaacaccacagaaaaaaccatggccccacccacaccagcaaggtatggagtagggagcctggactctcctccaaacggctcactgggatgctaccagaggaggccaaataggaagctgagattttcatccaagtgggcaggaaggatcccccgcttctgtggtatcagtggagaccacacgaggagcctggactcccccaacccctggcagtactgaagggctcctcccctccagagtggtattacgtaatagctaccagaaagtcaggaccttcaccaccacccagccagcaatgactaggccacccccgccatagtgtcatggaggcctagtgcagagccacgactcccaccctacccagaaacaacaaggaatactcccaatgcgtccactggagttctaccccaacctggcaggagcaaggtaatacccctgtctctaccagcatgaggtcagaagaagtcatctaaagcagaaggtttaaataagatccaaaatctcctaatacacaaaatgttcagttttcagtggaaaaattacttgtcacagcaggaaacaggaagacattggtgaaaaaggacagtcgacagatgatagcaccaagatgagggaggtattagagtgacttcacagagatgtgaatgcagccgtcgaaaacgcatgcagtaattatgaacacaactgataaaaaatacagcctcagcaaagaaatcggttttttaaagaaccaaatgaaaagtttagaagtgaaaaatataactgacacaaaacactcgacatctgaatggtgaggacagaggaaagaatcaataaacttaaacatagaaagtacccagtgggaacaagtgagaggacatagacggggaaaaacagcaagagccccagggatctgtgggactgagactgtaacagaagatccagaattcatgtcatcagagtcctaggaggaagacagagtgagctttagggctgaaaatgtacttggagaaataagaactgaaaacttcccaaatttggcaaaacggacaaacctaccgagtcaataaactgagcaaaccctaaataggaaaaacccaaagaaattcaaacctaaacacatcaaagtcaaatttctaaaaaccagagataataaaacattgccagcctggccaacatggtgaagtctcgtctctacaaaaataaaaaatgagcgagtatggtgccacacgcctgtaatcccagctactcaggaagctgagcaggagaattgcttgaacctgggaggcagaggttgcagtgagccgagatcacaccgttgccctccagcctgggcaacagagcgagactcaatctcaaaagaaaaaagaaaagacatgggtaaatacaatagacgttccttctcttgagttccaatcatgttggatggttaagcaaaggctataaaactgtctgaagtagttcaaagtttatgtagaggaagtagttaagataactataaatggatgagggcaaatggacatagaggtgaggtttctatgcttaacttgaagtggtaaaatgacatcagtagactgtaagttacgtgccaagaacagccagtaaaaaacaacctatactaagagatacattggaacacactattgacaaatcaaaatggaattctaaaacacttacataacccataggaaagcaggttgggaaaaacaaagaaatcagaaacagaacagatgggaagaagtaaaatgaccgactgtatattcaatgtaaatggtctaaataagccaattaagagataaagattggccaggtgcagtggctcactcctgtaatgtcagcactttgggagctgaggcaggtgtatcacttgaagtcaggagttcaaaatcagcctggccatcatggcaaaaccctctttactaaaaatacaacaattagccaggcatggtggtgcatgcctgtaatcccagctactcgggaagctgaggctacagtgacccaagacatgccactgcactccagcctgtgcgacacaagaccctatctcaaaaaaaaaaaaaaaagatagtaacttaaatatatgcataatgagcttatgccctgataaatgcagcataagttgaaaatgtaagtcaaaaatgagtttaatacacctaccaaacatccgtcgtagctcagcctagcctactaccttaaacgtgctcagaacacttacattagactacactgggcaaaatcacctagcacaggcctgttttgtaatacagtgttgaatatgtcatttactgaatactgtatggaagtgaaaacaggatagttgtctgggcactcacagtgcggttcctaccgagtgcgtatccctcgcaccattgtaaagctgaaaaactgtcagtggaactctcataagttagggaccctctgtataggcaggttgaaagtaaaaggatagaaaaaaatatgtgactattaatgaaaataaaggattcattgtattaacctcaaagtagacctcagtgcaaaaattattggagacaaagacggacaatgagaaaagaatcaacctgccaaacagatgtagcaatcctaagtgtgtgcactaagcacagatctgcaaaacatgtgaagaaaaagaactgaaaggagagctcgacaaatcaacaattacggctggatgtttcaacacccttctttcaacaataggtagaataactagatggaaattcagcaagaacataaaggagcaccatcatcgacaggcagggcctaatgatgtttatagaatatgccacccattgcactgaatgacatgtcacattttctgggatgtagttaaactagtgatgagagagaaagcaccaaatgcatacattagaaaagagacctgagattttagaaagaggaaggatctcaaatcaataatctgacatcagctggatgccgtggaagcacctgtagtcccagctactcaggaggctgaggtgggaggactgtgtgaacccaggacgttaacgccagcctcttggcatcaggcagcacaggaagaccccatcgcttaaaaaataataataatctagctcaagatcacatgaataactaggaaaaaatttaaagcaaggagcagtaagaaaatagtaaaaagcagaaaatgaaactgaaaacaaacaatagagaaacttattgaaacaaagagatggttcttttaaaagaccaataaaatcagcaaccctctagtaagaataacaaaaggagaagatacgattgccaatatcaaagatgaaaaaagaggttgggtgtggtggctcatgcctgaaatcaccgcactttgggaggccaaggcgggtggatcacctgaactcaggaattcaagaccagcatggccaacatggtgaaacccggtctctactaaaaatacaaaaacttggctgggcgtggtggcaggtgcctgtagtcccagctacttgggaggctgaaacacgagaattgctcgagccgagactgcagcactgcactccagcctgggcgacaccacaagattctgtctcgaaacgaaaaagagatatcactacagaccctgcaatctgaaaaggataataagcgactacgacaaacatctacatacataaattttataacttggatgaaatagaccaattcctcaaaaaacacaaactaccacaactcacctggtatgaaataataatttaaatagccctataactagaaattgaatttgtcattttaaactccaaaaagaaatatccaggctcagatggtttcactggagaattctaagattaatttcccagaaaatagaagagaaggaaaagcatcaatttacgttttatttatttatttatttattttttgagacaggttctcactctctgtcacccaggctggagtgcaatggcacaaacatggctcactgtagcctcgacctcctcagctcaaattatcctcccgcctcagcctcccaggtagctgggaccacaggcccacaccaccacgcctcactaatttttttagtttttgtagagacaggatcttgccatggtgccctggctggtcccaaactcctgggctcaggcagtcctcccacctcagcctcccaaagtgctgggattacaagcatgagccactgtacccagcctcaatttattttatgaagctagtggttctctgataccaaaaccacacaaagataatacaagaaaataatattacaagccaatatccctcagtgatatagacacaaaattttttaacaaaatattactaaatagactgggcacaatggctcacacttgtaatcccaacactttgggaggccgaggcgagcagatcacctgaggtcaggagttcaagaccagcctggccaacatggtgaaaccccatctttgctaaaaatacaaaaattagctgggcatggtggtggctgcctataatcccaactactcggcaggtggaggttgcagtaagcagagatggtgccactgcactccagcctcggcaacagagtgagactctgcctcaaaaaaaaaaaaaaaattactaaatagaatttgccaatatataacaaagaattctatgccatgaccaagtagggattattccagggatgaaggttggttccgtatttgagaatcagtcgatgagatccacacgttaccagctaccgaagataactcacacgatcacatctgtcagtgttgggaaggcccgtgacaagtttaacatctattcatgatttaaacttggaaaaacagagaaggagaggaacttcctccgctggataaagagcatctgtacaagccctgcagccagcattctcctcgagggcaaggaatcacccttcaccattcagatccggaacaagaaaggacgtctgctctaaccatcggatccggcatggtgctggaagcgctgggcactgcagtacgcaggacaaggaaagaaaaggcgtgtcgatcacaaaggaagaaacgaaactgcctgtttacagatgacgccgttgtctttgtaggaaatcccaaggtatccaccaaaaacactcctagaattatgaagcgaggccgggcgcagcggctcacacctgcaatcccagcactgtgggaggccaaggcaggccagtcacctgaggtcgggagttcaagaccagcctaacatagagaaaccctgtctctactaaaaaaaaattcaaattagccaggtgtggtgacgcatgcctgtaatcccagctactcaggaggctgaggtaggagaattgcttgtaccggggaggcagaggttacagtgagctgagattgcgtcactgcactccagcctgggcgacagagtgaaactccatctcaaaaaaaaaaaaaaaaaaaagaaagaaaattaataagtgagttcagcaaagtcagaagacacaagatcaacctaaatgattcaatagtattcctgtacgctagcaatgaacacacagacacctaaattaaatacgcagaaccacttaaaaccactccaaaaagcgaaatacttaggtataaacctgacaaaacatgcacagaacttacatgctgaaaactcagcaatgctgctgaaagacgtcagcacacacctagagacacggccgcgttcgtgggttggaagatacaacaacgtggagatgacaggtccttccagattgatggacaggtttaatgcaattcctattaaaaaaaaaacccagcaagatgtgttaataggtaaggacaagtcatcccaagttttctatggaaatgtaaaggagcaaaaatagctaaaaccattttgaaagagaacaaggtggaacgaatcaatctacccagtttcaagacacagaactacagtagtcaacacagtgtagtattgacagagggacagacatgcaattccatggaacacaacagagaacccacaaagagacccaaacaaacatgcccggatgagttttttttacaaaagcgcaaaagcaattccatggacaaaaacaaaatcttcgacccacgtctcaccccacacaaaaataactcaaaacggatcctggacttcaacgtaaagcataagacaatcaactttcagggccaggcatggtggctcacatctgtaatcccagcactttgggaggccaaggtgggcagattgcttgacctcaggagtttgagaccagcctgagcaacgtggcaaaaccccgtctctactaaaaacacaaaaaattagcagggcctggtggcacatgcctgtagtcccagctactcgggaggctgaggtgggaggatcacttgagcctgggaggcagaggttgcagtgagccgagatcacaccaccacactccagcctgggcaacagagcgagagcccatctcaaaaaaaaaaaaactttcaggaaaaaatagaagaaaatctttgggatctagggccaggcagagtcattatacttaaagatgatctgtgaaaggaaaaattaattgaaattcattaaaattaaaagcatttgctccataaaaagaccctgttaagagaacaaagataatttttaagctacagacagaaaatatttgcaagtcacgtatctgacaatagtctaaaatctggaatatgtaaagaagtttcataacttaatactaaaataatcttattagaaaatgagcacagagacgtttcaccaaagaaggtgcacagatgacagataagctcaggagaaatgcctgtcattagagaagcaaaaaccaccataacaccactgcacacccatccggtaccatcactgcacacccatcccgtgacaccactcacaccgatcccgtgacaccactgcacacccatcccgagacaccactcacacccatcccgagacaccactgcacacccatcccgtgacaccactcacacccatcccgnnnnnnnnnnnnnnnnnnnnnnnnnnnnnnnnnnnnnnnnnnnnnnnnnnnnnnnnnnnnnnnnnnnnnnnnnnnnnnnnnnnnnnnnnnnnnnnnnnnnnnnnnnnnnnnnnnnnnnnnnnnnnnnnnnnnnnnnnnnnnnnnnnnnnnnnnnnnnnnnnnnnnnnnnnnnnnnnnnnnnnnnnnnnnnnnnnnnnnnnnnnnnnnnnnnnnnnnnnnnnnnnnnnnnnnnnnnnnnnnnnnnnnnnnnnnnnnnnnnnnnnnnnnnnnnnnnnnnnnnnnnnnnnnnnnnnnnnnnnnnnnnnnnnnnnnnnnnnnnnnnnnnnnnnnnnnnnnnnnnnnnnnnnnnnnnnnnnnnnnnnnnnnnnnnnnnnnnnnnnnnnnnnnnnnnnnnnnnnnnnnnnnnnnnnnnnnnnnnnnnnnnnnnnnnnnnnnnnnnnnnnnnnnnnnnnnnnnnnnnnnnnnnnnnnnnnnnnnnnnnnnnnnnnnnnnnnnnnnnnnnnnnnnnnnnnnnnnnnnnnnnnnnnnnnnnnnnnnnnnnnnnnnnnnnnnnnnnnnnnnnnnnnnnnnnnnnnnnnnnnnnnnnnnnnnnnnnnnnnnnnnnnnnnnnnnnnnnnnnnnnnnnnnnnnnnnnnnnnnnnnnnnnnnnnnnnnnnnnnnnnnnnnnnnnnnnnnnnnnnnnnnnnnnnnnnnnnnnnnnnnnnnnnnnnnnnnnnnnnnnnnnnnnnnnnnnnnnnnnnnnnnnnnnnnnnnnnnnnnnnnnnnnnnnnnnnnnnnnnnnnnnnnnnnnnnnnnnnnnnnnnnnnnnnnnnnnnnnnnnnnnnnnnnnnnnnnnnnnnnnnnnnnnnnnnnnnnnnnnnnnnnnnnnnnnnnnnnnnnnnnnnnnnnnnnnnnnnnnnnnnnnnnnnnnnnnnnnnnnnnnnnnnnnnnnnnnnnnnnnnnnnnnnnnnnnnnnnnnnnnnnnnnnnnnnnnnnnnnnnnnnnnnnnnnnnnnnnnnnnnnnnnnnnnnnnnnnnnnnnnnnnnnnnnnnnnnnnnnnnnnnnnnnnnnnnnnnnnnnnnnnnnnnnnnnnnnnnnnnnnnnnnnnnnnnnnnnnnnnnnnnnnnnnnnnnnnnnnnnnnnnnnnnnnnnnnnnnnnnnnnnnnnnnnnnnnnnnnnnnnnnnnnnnnnnnnnnnnnnnnnnnnnnnnnnnnnnnnnnnnnnnnnnnnnnnnnnnnnnnnnnnnnnnnnnnnnnnnnnnnnnnnnnnnnnnnnnnnnnnnnnnnnnnnnnnnnnnnnnnnnnnnnnnnnnnnnnnnnnnnnnnnnnnnnnnnnnnnnnnnnnnnnnnnnnnnnnnnnnnnnnnnnnnnnnnnnnnnnnnnnnnnnnnnnnnnnnnnnnnnnnnnnnnnnnnnnnnnnnnnnnnnnnnnnnnnnnnnnnnnnnnnnnnnnnnnnnnnnnnnnnnnnnnnnnnnnnnnnnnnnnnnnnnnnnnnnnnnnnnnnnnnnnnnnnnnnnnnnnnnnnnnnnnnnnnnnnnnnnnnnnnnnnnnnnnnnnnnnnnnnnnnnnnnnnnnnnnnnnnnnnnnnnnnnnnnnnnnnnnnnnnnnnnnnnnnnnnnnnnnnnnnnnnnnnnnnnnnnnnnnnnnnnnnnnnnnnnnnnnnnnnnnnnnnnnnnnnnnnnnnnnnnnnnnnnnnnnnnnnnnnnnnnnnnnnnnnnnnnnnnnnnnnnnnnnnnnnnnnnnnnnnnnnnnnnnnnnnnnnnnnnnnnnnnnnnnnnnnnnnnnnnnnnnnnnnnnnnnnnnnnnnnnnnnnnnnnnnnnnnnnnnnnnnnnnnnnnnnnnnnnnnnnnnnnnnnnnnnnnnnnnnnnnnnnnnnnnnnnnnnnnnnnnnnnnnnnnnnnnnnnnnnnnnnnnnnnnnnnnnnnnnnnnnnnnnnnnnnnnnnnnnnnnnnnnnnnnnnnnnnnnnnnnnnnnnnnnnnnnnnnnnnnnnnnnnnnnnnnnnnnnnnnnnnnnnnnnnnnnnnnnnnnnnnnnnnnnnnnnnnnnnnnnnnnnnnnnnnnnnnnnnnnnnnnnnnnnnnnnnnnnnnnnnnnnnnnnnnnnnnnnnnnnnnnnnnnnnnnnnnnnnnnnnnnnnnnnnnnnnnnnnnnnnnnnnnnnnnnnnnnnnnnnnnnnnnnnnnnnnnnnnnnnnnnnnnnnnnnnnnnnnnnnnnnnnnnnnnnnnnnnnnnnnnnnnnnnnnnnnnnnnnnnnnnnnnnnnnnnnnnnnnnnnnnnnnnnnnnnnnnnnnnnnnnnnnnnnnnnnnnnnnnnnnnnnnnnnnnnnnnnnnnnnnnnnnnnnnnnnnnnnnnnnnnnnnnnnnnnnnnnnnnnnnnnnnnnnnnnnnnnnnnnnnnnnnnnnnnnnnnnnnnnnnnnnnnnnnnnnnnnnnnnnnnnnnnnnnnnnnnnnnnnnnnnnnnnnnnnnnnnnnnnnnnnnnnnnnnnnnnnnnnnnnnnnnnnnnnnnnnnnnnnnnnnnnnnnnnnnnnnnnnnnnnnnnnnnnnnnnnnnnnnnnnnnnnnnnnnnnnnnnnnnnnnnnnnnnnnnnnnnnnnnnnnnnnnnnnnnnnnnnnnnnnnnnnnnnnnnnnnnnnnnnnnnnnnnnnnnnnnnnnnnnnnnnnnnnnnnnnnnnnnnnnnnnnnnnnnnnnnnnnnnnnnnnnnnnnnnnnnnnnnnnnnnnnnnnnnnnnnnnnnnnnnnnnnnnnnnnnnnnnnnnnnnnnnnnnnnnnnnnnnnnnnnnnnnnnnnnnnnnnnnnnnnnnnnnnnnnnnnnnnnnnnnnnnnnnnnnnnnnnnnnnnnnnnnnnnnnnnnnnnnnnnnnnnnnnnnnnnnnnnnnnnnnnnnnnnnnnnnnnnnnnnnnnnnnnnnnnnnnnnnnnnnnnnnnnnnnnnnnnnnnnnnnnnnnnnnnnnnnnnnnnnnnnnnnnnnnnnnnnnnnnnnnnnnnnnnnnnnnnnnnnnnnnnnnnnnnnnnnnnnnnnnnnnnnnnnnnnnnnnnnnnnnnnnnnnnnnnnnnnnnnnnnnnnnnnnnnnnnnnnnnnnnnnnnnnnnnnnnnnnnnnnnnnnnnnnnnnnnnnnnnnnnnnnnnnnnnnnnnnnnnnnnnnnnnnnnnnnnnnnnnnnnnnnnnnnnnnnnnnnnnnnnnnnnnnnnnnnnnnnnnnnnnnnnnnnnnnnnnnnnnnnnnnnnnnnnnnnnnnnnnnnnnnnnnnnnnnnnnnnnnnnnnnnnnnnnnnnnnnnnnnnnnnnnnnnnnnnnnnnnnnnnnnnnnnnnnnnnnnnnnnnnnnnnnnnnnnnnnnnnnnnnnnnnnnnnnnnnnnnnnnnnnnnnnnnnnnnnnnnnnnnnnnnnnnnnnnnnnnnnnnnnnnnnnnnnnnnnnnnnnnnnnnnnnnnnnnnnnnnnnnnnnnnnnnnnnnnnnnnnnnnnnnnnnnnnnnnnnnnnnnnnnnnnnnnnnnnnnnnnnnnnnnnnnnnnnnnnnnnnnnnnnnnnnnnnnnnnnnnnnnnnnnnnnnnnnnnnnnnnnnnnnnnnnnnnnnnnnnnnnnnnnnnnnnnnnnnnnnnnnnnnnnnnnnnnnnnnnnnnnnnnnnnnnnnnnnnnnnnnnnnnnnnnnnnnnnnnnnnnnnnnnnnnnnnnnnnnnnnnnnnnnnnnnnnnnnnnnnnnnnnnnnnnnnnnnnnnnnnnnnnnnnnnnnnnnnnnnnnnnnnnnnnnnnnnnnnnnnnnnnnnnnnnnnnnnnnnnnnnnnnnnnnnnnnnnnnnnnnnnnnnnnnnnnnnnnnnnnnnnnnnnnnnnnnnnnnnnnnnnnnnnnnnnnnnnnnnnnnnnnnnnnnnnnnnnnnnnnnnnnnnnnnnnnnnnnnnnnnnnnnnnnnnnnnnnnnnnnnnnnnnnnnnnnnnnnnnnnnnnnnnnnnnnnnnnnnnnnnnnnnnnnnnnnnnnnnnnnnnnnnnnnnnnnnnnnnnnnnnnnnnnnnnnnnnnnnnnnnnnnnnnnnnnnnnnnnnnnnnnnnnnnnnnnnnnnnnnnnnnnnnnnnnnnnnnnnnnnnnnnnnnnnnnnnnnnnnnnnnnnnnnnnnnnnnnnnnnnnnnnnnnnnnnnnnnnnnnnnnnnnnnnnnnnnnnnnnnnnnnnnnnnnnnnnnnnnnnnnnnnnnnnnnnnnnnnnnnnnnnnnnnnnnnnnnnnnnnnnnnnnnnnnnnnnnnnnnnnnnnnnnnnnnnnnnnnnnnnnnnnnnnnnnnnnnnnnnnnnnnnnnnnnnnnnnnnnnnnnnnnnnnnnnnnnnnnnnnnnnnnnnnnnnnnnnnnnnnnnnnnnnnnnnnnnnnnnnnnnnnnnnnnnnnnnnnnnnnnnnnnnnnnnnnnnnnnnnnnnnnnnnnnnnnnnnnnnnnnnnnnnnnnnnnnnnnnnnnnnnnnnnnnnnnnnnnnnnnnnnnnnnnnnnnnnnnnnnnnnnnnnnnnnnnnnnnnnnnnnnnnnnnnnnnnnnnnnnnnnnnnnnnnnnnnnnnnnnnnnnnnnnnnnnnnnnnnnnnnnnnnnnnnnnnnnnnnnnnnnnnnnnnnnnnnnnnnnnnnnnnnnnnnnnnnnnnnnnnnnnnnnnnnnnnnnnnnnnnnnnnnnnnnnnnnnnnnnnnnnnnnnnnnnnnnnnnnnnnnnnnnnnnnnnnnnnnnnnnnnnnnnnnnnnnnnnnnnnnnnnnnnnnnnnnnnnnnnnnnnnnnnnnnnnnnnnnnnnnnnnnnnnnnnnnnnnnnnnnnnnnnnnnnnnnnnnnnnnnnnnnnnnnnnnnnnnnnnnnnnnnnnnnnnnnnnnnnnnnnnnnnnnnnnnnnnnnnnnnnnnnnnnnnnnnnnnnnnnnnnnnnnnnnnnnnnnnnnnnnnnnnnnnnnnnnnnnnnnnnnnnnnnnnnnnnnnnnnnnnnnnnnnnnnnnnnnnnnnnnnnnnnnnnnnnnnnnnnnnnnnnnnnnnnnnnnnnnnnnnnnnnnnnnnnnnnnnnnnnnnnnnnnnnnnnnnnnnnnnnnnnnnnnnnnnnnnnnnnnnnnnnnnnnnnnnnnnnnnnnnnnnnnnnnnnnnnnnnnnnnnnnnnnnnnnnnnnnnnnnnnnnnnnnnnnnnnnnnnnnnnnnnnnnnnnnnnnnnnnnnnnnnnnnnnnnnnnnnnnnnnnnnnnnnnnnnnnnnnnnnnnnnnnnnnnnnnnnnnnnnnnnnnnnnnnnnnnnnnnnnnnnnnnnnnnnnnnnnnnnnnnnnnnnnnnnnnnnnnnnnnnnnnnnnnnnnnnnnnnnnnnnnnnnnnnnnnnnnnnnnnnnnnnnnnnnnnnnnnnnnnnnnnnnnnnnnnnnnnnnnnnnnnnnnnnnnnnnnnnnnnnnnnnnnnnnnnnnnnnnnnnnnnnnnnnnnnnnnnnnnnnnnnnnnnnnnnnnnnnnnnnnnnnnnnnnnnnnnnnnnnnnnnnnnnnnnnnnnnnnnnnnnnnnnnnnnnnnnnnnnnnnnnnnnnnnnnnnnnnnnnnnnnnnnnnnnnnnnnnnnnnnnnnnnnnnnnnnnnnnnnnnnnnnnnnnnnnnnnnnnnnnnnnnnnnnnnnnnnnnnnnnnnnnnnnnnnnnnnnnnnnnnnnnnnnnnnnnnnnnnnnnnnnnnnnnnnnnnnnnnnnnnnnnnnnnnnnnnnnnnnnnnnnnnnnnnnnnnnnnnnnnnnnnnnnnnnnnnnnnnnnnnnnnnnnnntgcacacccgtcccgtgacaccactcacacccgtcccgagacaccactcacacccgtcccgtgacaccactcacacccgtcccgagacaccactcacacccgtcccgtgacaccactgcacacccatcaaaacggctggaataaaagtagcaacaaccccacatgctggcaaagataccaagaaatcgagtcactcggctgttgctgggagggtaaaatggctcctcaaaaaggacacccgaagttgcagtggactcagcagctgcttccatggacgtttaagccagagagttgaaacccaggttcacgcagaaacccgtgcagaggtttacggcagccgtcacagacaaaaactgcaaagagctcagctgtccttccacaagagagcgaccgcacaaactagggtgcactcacgccgcagacgccggtcagcgacgaggaggaaggaagcctccatcacacgacctggcggaacctgagaattggcgtgagaatcgcctgccccgcgggtacgtgccgcagggttccactcattcttgaaatcatacgttcttgaaatcacacaaggaggccgaaggtcggggagggtgtggaaggacacgggggtccgggcgtggatgggacccgtgtctgtggcctcagtgtcaggccctggctgcaatccctactatagctgtgcaagatgcccagctgttgccagtagggtctatttcaaaagggctgggagatcccctattttcaacactctcaagccctccggggcggtgccatggccttctcgggtactttgtctgcaggaatgaaatgcaacccttcaggccgctggggcctggggccccttcccaccaacctgccagttggcacagagggttctgaccctttccaaaaccctttccaaactgcagttccagctcttgatgtcagagaccaggccctgggccccctaggccttgaccctgtcctgggaaggagcagaaagcaagagcaggaatttgggaaagatgggcaatcccactgcaggaggccttcccaggatccccaccctcccggcctcactaaatgcagggtttgggagagggtgggcctgcctggggactgcattgccctagcaaggcccaggagagtgtgcagggaccatgctgcccgcacagcccagcgccctcacggccgcattccagcccgtcccttcagtctgctgctgagctgctcagaggtcgacctcggggtccagtgtgacttctctgcctggcaccacctggcctcagtccccatgctggccgctgccgtccttatagccaaggaaaaccatggcagcctcaggcccaaggggtccaggaaagacccctggggcccagggcagtgggcagtgccctcctggagtggacgggagccaccaactgccagcatcaccctcagtcttggctgcccgggaggttttccaaaggcccgaccccactcctcttggagctgctgatccctctctcccatcaggcgcctcagggaccctcctccacccagagggtctctgtcttcccggttttcctggcgtaattcagacttggggagagaagaatcatcatccatcacacacccagacccaaagagactcaaagccaggaggagccgggtggacccagaggccctcaccctgccagcctaaggggcatggcccaaggtctccacccccagcccccagagcacagctgtgtgcaggtcaccagaagccccaaataatgacagcagcccagacagtcgctaccgggccctggtgcagtgtgaagcctctggcacctgcctgggctcattccaggggccatgagagggtcctgttatggctgcaccatcacacccaccgggcagctggggcccagctctgccatggatcccagccaggcagcagccgccctgtgggctgagaagcttccgctcctgctgcacaactgcgaaggggcctggagggccgggagcttgtgacggtgacaattcctcctggcgcctcctcctccggggcagccgagcaaccctggacatgagggggcttcgtcccacccccaggagaaaatgcccagtcctccgagagtccagtgagggcttgccagccagggaccaagacccagtatggcctaaaccaggcctggtcaccaggggtcaggcgggaccttatacagggctcagcagagagacctgcccgctaccctgctccaggggagatgggggtgggggccttcatcccactcgggcatgacagaggagagcagccagccagcatctgcacgtctcaggcagggaagggcctgaagccctgggaagcagaggctccgccctcaggaaacaggtcccggcctggctccctcacagcctcggactgccccgtggaccgaaacccccaggcaccttgcgccaggactggcctgatggtggagacgccacaccatgagcagtaggttcctctccccaccttcccaggcgggggacacttggggctcaaactggggccttgtgaacggtctcaggcttgctcagtgccacccgtgaagctcctggccttccccgggccggtccctctgccaagtgggccctgctgggtctcccctcccggagctgccccccgtccgcccttcccccttgctgcgctgttcactgctgagggtgccgactggaacagttgccctgcccggggtctgctgggggtctacctgtgctcagggtgggggctcctcatgcagcccctctgtccgtgggggaccctgtgagcagctgcagctcagcagcaggctgaggagccgggtcgggggccgggagtcccagcaggccctgggctgacatgtgcccccttgcaggtgggtccgaggagagcactacaggtacaagttcagccgtcctgggggcaggcacgccgccgagggcaagtggtgggtgcggaagaggatcggagcctacttccctccgctcagcctggaggagctgaggccctacttcagggaccgtgggtggcctctgcccgggcccctctagacgtgcaccagaaataaaggcgaagacccagcccctcggcggctcagcaacgtttgcccttccctgcgcccagcccaagctgggcatcgccaagagagacgtggagaggagagcggtgggacccagcccccagcacgggggtccagggtggggtctgttgtcacatactgtggcggctcccaggccctgcccacctggggccccacatccaggccaacccttgtcccaggcgccaggggctctgatctcccatccatcccaccctcctcccagaggcccagcctggggctgtgccgcccacaggagttgagacaatggccatcctgacaccttcctccactacagccctgaccatagacccagccaggtagctcttggggtctctagcgtcccagggcctggtttctgttccctcttcaatggtgtgttcccagccaggtcctgaccctcagagccaagtccctgtcacgtctggggcagccaaaccctcgccccacagggacctggacacgcccggccaggatgtggggttggatgggccattttctgtcctatccctcatctccacccccgccacagcctacacgcatcccacacatgcaggcacacacagcctgtgcacacatgtgttcttggcccggtttcatccccccatgactggtgtctgtgaggtgcagatggacacagcgcacacccagaccctccaccaggctgtgacctcgctgcctctgaggccttgacaaggcccctcaatcggaggacagccggccgtgcacactttcatcatcgtcggacaaacagcgtctactgcacatttttcttattcctattcttgagccatagctatggcatattcttctactattcctattataccacttaccagcttactcgaaaacacactgtttaaatgaagaagttcttgtacctccctccccttggcggtggccgtgcccccagcccacactctgatgctggggcagcgggtgaccgagcgggagcttgatggagaggtgaatgggtggtgctttgcctggcgacccttccagtgtctgctgcggcaatacttggag

SEQ ID NO: 218 - DNA, 969 bp, Homo sapiens
atggtgcagggcaagttcccacccttcctcctggctgggctgctgagtgggaccctaggtgtggggacttctctgtgccttggcctgggaggcttccagacccagccgatgcccaatcctgtggcgtactacctgcaccactcaccctggtggttccatcgcttcgagacgctcagcaaccacttcatcgagctcctggtgcccttcttcctcttcctcggccggcgggcgtgcatcatccacggggtgctgcagatcctgttccagcctaaggggcatggcccaaggtctccacccccagcccccagagcacagctgtgtgcaggagaaaatgcccagtcctccgagagtccagtgagggcttgccagccagggaccaagacccagtatggcctaaaccaggcctggtcaccaggggtcaggcgggaccttatacagggctcagcagagagacctgcccgctaccctgctccaggggagatgggggtgggggccttcatcccactcgggcatgacagaggagagcagccagccagcatctgcacgtctcaggcagggaagggcctgaagccctgggaagcagaggctccgccctcaggaaacaggtcccggcctggctccctcacagcctcggactgccccgtggaccgaaacccccaggcaccttgcgccaggactggcctgatggtggagacgccacaccatgagcagtgggtccgaggagagcactacaggtacaagttcagccgtcctgggggcaggcacgccgccgagggcaagtggtgggtgcggaagaggatcggagcctacttccctccgctcagcctggaggagctgaggccctacttcagggacccccacactctgatgctggggcagcgggtgaccgagcgggagcttgatggagaggtgaatgggtggtgctttgcctggcgacccttccagtgtctgctgcggcaatacttggag

SEQ ID NO: 219 - protein, 321 aa, Homo sapiens
MVQGKFPPFLLAGLLSGTLGVGTSLCLGLGGFQTQPMPNPVAYYLHHSPWWFHRFETLSNHFIELLVPFFLFLGRRACIIHGVLQILFQPKGHGPRSPPPAPRAQLCAGENAQSSESPVRACQPGTKTQYQQAWSPGVRRDLIQGSAERPARYPAPGEMGVGAFIPLGHDRGEQPASICTSQAGKGLKPWEAEAPPSGNRSRPGSLTASDCPVDRNPQAPCARTGLMVETPHHEQWVRGEHYRYKFSRPGGRHAAEGKWWVRKRIGAYFPPLSLEELRPYFRDPHTLMLGQRVTERELDGEVNGWCFAWRPFQCLLRQYLE

SEQ ID NO: 220 - DNA, 2620 bp, Homo sapiens
cgggagtgcgccctccccgcacatgcgccctgacagcccaacaatggcggcgcccgcggagtcgctgaggaggcggaagactgggtactcggatccggagcctgagtcgccgcccgcgccggggcgtggccccgcaggctctccggcccatctccacacgggcaccttctggctgacccggatcgtgctcctgaaggccctagccttcgtgtacttcgtggcattcctggtggctttccatcagaacaagcagctcatcggtgacagggggctgcttccctgcagagtgttcctgaagaacttccagcagtacttccaggacaggacgagctgggaagtcttcagctacatgcccaccatcctctggctgatggactggtcagacatgaactccaacctggacttgctggctcttctcggactgggcatctcgtctttcgtactgatcacgggctgcgccaacatgcttctcatggctgccctgtggggcctctacatgtccctggttaatgtgggccatgtctggtactctttcggatgggagtcccagcttctggagacggggttcctggggatcttcctgtgccctctgtggacgctgtcaaggctgccccagcatacccccacatcccggattgtcctgtggggcttccggtggctgatcttcaggatcatgcttggagcaggcctgatcaagatccggggggaccggtgctggcgagacctcacctgcatggacttccactatgagacccagccgatgcccaatcctgtggcgtactacctgcaccactcaccctggtggttccatcgcttcgagacgctcagcaaccacttcatcgagctcctggtgcccttcttcctcttcctcggccggcgggcgtgcatcatccacggggtgctgcagatcctgttccaggccgtcctcatcgtcagcgggaacctcagcttcctgaactggctgactatggtgcccagcctggcctgctttgatgacgccaccctgggattcttgttcccctctgggccaggcagcctgaaggaccgagttctgcagatgcagagggacatccgaggggcccggcccgagcccagattcggctccgtggtgcggcgtgcagccaacgtctcgctgggcgtcctgctggcctggctcagcgtgcccgtggtcctcaacttgctgagctccaggcaggtcatgaacacccacttcaactctcttcacatcgtcaacacttacggggccttcggaagcatcaccaaggagcgggcggaggtgatcctgcagggcacagccagctccaacgccagcgcccccgatgccatgtgggaggactacgagttcaagtgcaagccaggtgaccccagcagacggccctgcctcatctccccgtaccactaccgcctggactggctgatgtggttcgcggccttccagacctacgagcacaacgactggatcatccacctggctggcaagctcctggccagcgacgccgaggccttgtccctgctggcacacaaccccttcgcgggcaggcccccgcccaggtgggtccgaggagagcactacaggtacaagttcagccgtcctgggggcaggcacgccgccgagggcaagtggtgggtgcggaagaggatcggagcctacttccctccgctcagcctggaggagctgaggccctacttcagggaccgtgggtggcctctgcccgggcccctctagacgtgcaccagaaataaaggcgaagacccagcccctcggcggctcagcaacgtttgcccttccctgcgcccagcccaagctgggcatcgccaagagagacgtggagaggagagcggtgggacccagcccccagcacgggggtccagggtggggtctgttgtcacatactgtggcggctcccaggccctgcccacctggggccccacatccaggccaacccttgtcccaggcgccaggggctctgatctcccatccatcccaccctcctcccagaggcccagcctggggctgtgccgcccacaggagttgagacaatggccatcctgacaccttcctccactacagccctgaccatagacccagccaggtagctcttggggtctctagcgtcccagggcctggtttctgttccctcttcaatggtgtgttcccagccaggtcctgaccctcagagccaagtccctgtcacgtctggggcagccaaaccctcgccccacagggacctggacacgcccggccaggatgtggggttggatgggccattttctgtcctatccctcatctccacccccgccacagcctacacgcatcccacacatgcaggcacacacagcctgtgcacacatgtgttcttggcccggtttcatccccccatgactggtgtctgtgaggtgcagatggacacagcgcacacccagaccctccaccaggctgtgacctcgctgcctctgaggccttgacaaggcccctcaatcggaggacagccggccgtgcacactttcatcatcgtcggacaaacagcgtctactgcacatttttcttattcctattcttgagccatagctatggcatattcttctactattcctattataccacttaccagcttactcg

SEQ ID NO: 221 - protein, 563 aa, Homo sapiens
MRPDSPTMAAPAESLRRRKTGYSDPEPESPPAPGRGPAGSPAHLHTGTFWLTRIVLLKAFVYFVAFLVAFHQNKQLIGDRGLLPCRVFLKNFQQYFQDRTSWEVFSYMPTILWLMDWSDMNSNLDLLALLGLGISSFVLITGCANMLLMAALWGMSLVNVGHVWYSFGWESQLLETGFLGIFLCPLWTLSRLPQHTPTSRIVLWGFRWLIFRIMLGAGLIKIRGDRCWRDLTCMDFHYETQPMPNPVAYYLHHSPWWFHRFETLSNHFIELLVPFFLFLGRRACIIHGVLQILFQAVLIVSGNLSFLNWLTMVPSLACFDDATLGFLFPSGPGSLKDRVLQMQRDIRGARPEPRFGSVVRRAANVSLGVLLAWLSVPVVLNLLSSRQVMNTHFNSLHIVNTYGAFGSITKERAEVILQGTASSNASAPDAMWEDYEFKCKPGDPSRRPCLISPYHYRLDWLMWFAAFQTYEHNDWIIHLAGKLLASDAEALSLLAHNPFAGRPPPRWVRGEHYRYKFSRPGGRHAAEGKWWVRKRIGAYFPPLSLEELRPYFRDRGWPLPGPL

SEQ ID NO: 222 - DNA, 1194 bp, Homo sapiens
atgaactcggagacctgtggatgtgagagagccgtcgtggggtgggcgccgtgggacgtgaactcggagacctgtggattcgtggcattcctggtggctttccatcagaacaagcagctcatcggtgacagggggctgcttccctgcagagtgttcctgaagaacttccagcagtacttccaggacaggacgagctgggaagtcttcagctacatgcccaccatcctctggctgatggactggtcagacatgaactccaacctggacttgctggctcttctcggactgggcatctcgtctttcgtactgatcacgggctgcgccaacatgcttctcatggctgccctgtggggcctctacatgtccctggttaatgtgggccatgtctggacggatggtggctccacttcaaagagtactgagagcagcgccagggctggaggggacgctgggaggccgccagcacccagggacaccgccctcggtgcttcatttctcactgacgatgaacagcatgtttgggctccaggacttcaatccccacccctgccatccccacgagctgccatccagccccatccctgctgtccccgcgagccgccgtccagccccatccctgccttccctcacagagaccccaacgacctgtcagtcaacagagaccccagcagcctgtcggtcaacagagaccccagcagcctgtcagtcaacagagaccccagcggcctgtcagtcagcctctgccatcagccttcccagtatgcacggagggcagtgatgggcgcttgtgatctgatccgtgcctcctccctggatgtgggagctcctgggcttccaggccccgggcacctagagacggatggtcgcacgcatgattgtcggcatctcacagcggctcagcacgtcactttggactgtcgcgcagaaattcagaagactcgtagtagcttcggcagtgctctccctgccttccgagcagccatgcgtctttgaactgtcttcccttccctgatcttggagaacatagagctgccagttactgaggatgggagtcccagcttctggagacggggttcctggggatcttcctgtgccctctgtggacgctgtcaaggctgccccagcatacccccacatcccggattgtcctgtggggcttccggtggctgatcttcaggatcatgcttggagcag

SEQ ID NO: 223 - protein, 328 aa, Homo sapiens
MNSETCGCERAVVGWAPWDVNSETCGFVAFLVAFHQNKQLIGDRGLLPCRVFLKNFQQYFQDRTSWEVFSYMPTILWLMDWSDMNSNLDLLALLGLGISSFVLITGCANMLLMAALWGMSLVNVGHVWTDGGSTSKSTESSARAGGDAGRPPAPRDTALGASFLTDDEQHVWAPGLQSPPLPSPRAAIQPHPCCPREPPSSPIPAFPHRDPNDLSVNRDPSSLSVNRDPSSLSVNRDPSGLSVSLCHQPSQYARRAVMGACDLIRASSLDVGAPGLPGPGHLETDGRTHDCRHLTAAQHVTLDCRAEIQKTRSSFGSALPAFRAAMRL

SEQ ID NO: 224 - DNA, 2613 bp, Homo sapiens
cgggagtgcgccctccccgcacatgcgccctgacagcccaacaatggcggcgcccgcggagtcgctgaggaggcggaagactgggtactcggatccggagcctgagtcgccgcccgcgccggggcgtggccccgcaggctctccggcccatctccacacgggcaccttctggctgacccggatcgtgctcctgaaggccctagccttcgtgtacttcgtggcattcctggtggctttccatcagaacaagcagctcatcggtgacagggggctgcttccctgcagagtgttcctgaagaacttccagcagtacttccaggacaggacgagctgggaagtcttcagctacatgcccaccatcctctggctgatggactggtcagacatgaactccaacctggacttgctggctcttctcggactgggcatctcgtctttcgtactgatcacgggctgcgccaacatgcttctcatggctgccctgtggggcctctacatgtccctggttaatgtgggccatgtctggtgagatgggagtcccagcttctggagacggggttcctggggatcttcctgtgccctctgtggacgctgtcaaggctgccccagcatacccccacatcccggattgtcctgtggggcttccggtggctgatcttcaggatcatgcttggagcaggcctgatcaagatccggggggaccggtgctggcgagacctcacctgcatggacttccactatgagacccagccgatgcccaatcctgtggcgtactacctgcaccactcaccctggtggttccatcgcttcgagacgctcagcaaccacttcatcgagctcctggtgcccttcttcctcttcctcggccggcgggcgtgcatcatccacggggtgctgcagatcctgttccaggccgtcctcatcgtcagcgggaacctcagcttcctgaactggctgactatggtgcccagcctggcctgctttgatgacgccaccctgggattcttgttcccctctgggccaggcagcctgaaggaccgagttctgcagatgcagagggacatccgaggggcccggcccgagcccagattcggctccgtggtgcggcgtgcagccaacgtctcgctgggcgtcctgctggcctggctcagcgtgcccgtggtcctcaacttgctgagctccaggcaggtcatgaacacccacttcaactctcttcacatcgtcaacacttacggggccttcggaagcatcaccaaggagcgggcggaggtgatcctgcagggcacagccagctccaacgccagcgcccccgatgccatgtgggaggactacgagttcaagtgcaagccaggtgaccccagcagacggccctgcctcatctccccgtaccactaccgcctggactggctgatgtggttcgcggccttccagacctacgagcacaacgactggatcatccacctggctggcaagctcctggccagcgacgccgaggccttgtccctgctggcacacaaccccttcgcgggcaggcccccgcccaggtgggtccgaggagagcactacaggtacaagttcagccgtcctgggggcaggcacgccgccgagggcaagtggtgggtgcggaagaggatcggagcctacttccctccgctcagcctggaggagctgaggccctacttcagggaccgtgggtggcctctgcccgggcccctctagacgtgcaccagaaataaaggcgaagacccagcccctcggcggctcagcaacgtttgcccttccctgcgcccagcccaagctgggcatcgccaagagagacgtggagaggagagcggtgggacccagcccccagcacgggggtccagggtggggtctgttgtcacatactgtggcggctcccaggccctgcccacctggggccccacatccaggccaacccttgtcccaggcgccaggggctctgatctcccatccatcccaccctcctcccagaggcccagcctggggctgtgccgcccacaggagttgagacaatggccatcctgacaccttcctccactacagccctgaccatagacccagccaggtagctcttggggtctctagcgtcccagggcctggtttctgttccctcttcaatggtgtgttcccagccaggtcctgaccctcagagccaagtccctgtcacgtctggggcagccaaaccctcgccccacagggacctggacacgcccggccaggatgtggggttggatgggccattttctgtcctatccctcatctccacccccgccacagcctacacgcatcccacacatgcaggcacacacagcctgtgcacacatgtgttcttggcccggtttcatccccccatgactggtgtctgtgaggtgcagatggacacagcgcacacccagaccctccaccaggctgtgacctcgctgcctctgaggccttgacaaggcccctcaatcggaggacagccggccgtgcacactttcatcatcgtcggacaaacagcgtctactgcacatttttcttattcctattcttgagccatagctatggcatattcttctactattcctattataccacttaccagcttactcg

SEQ ID NO: 225 - protein, 350 aa, Homo sapiens
MLGAGLIKIRGDRCWRDLTCMDFHYETQPMPNPVAYYLHHSPWWFHRFETLSNHFIELLVPFFLFLGRRACIIHGVLQILFQAVLIVSGNLSFLNWLTMVPSLACFDDATLGFLFPSGPGSLKDRVLQMQRDIRGARPEPRFGSVVRRAANVSLGVLLAWLSVPVVLNLLSSRQVMNTHFNSLHIVNTYGAFGSITKERAEVILQGTASSNASAPDAMWEDYEFKCKPGDPSRRPCLISPYHYRLDWLMWFAAFQTYEHNDWIIHLAGKLLASDAEALSLLAHNPFAGRPPPRWVRGEHYRYKFSRPGGRHAAEGKWWVRKRIGAYFPPLSLEELRPYFRDRGWPLPGPL

SEQ ID NO: 226 - DNA, 8552 bp, Mus musculus
cctcaagctgaccctgactacctctaccatgtcgtcttcttgggggactccaatgtgggcaagacatcattcctacacctgctacatcatgacgcttttgctactgggctgacggccactgtaggtaaggccccatggggaggtagcaatggagagaagaggctgagctggggccagcaagccatcccaggagaagtggcaggctctgccttggccacaggccttcatgaggcattattttatatgggcataatcttagcatttcgctaatcgcctctaattacaggcaatttgctttccctgcattgatctggttagcttataatgcaccacaggtgcaaagcaccgtgcaatttaggtcctgatgttagtagagtgtgaacaggccagtctccgcccacacagtaggccgttccctacagagcctagctggacgtgctcacgacatgccccaggtctgcctgcatgccctggcaggagatcacaagtagggtatcttacatagaatatattccgagtatggcaagttaggaccctaggggcgtgggttcaaatcctagcactaccacttactggggctatgaactctgtctgctttgtatcacaactcccggaggcaattggcttataaagacggaaggtttaactctggctggctcaagagttgggaggtcttggttcatagtcgatcctgttgcctttgggctgtggcaaagcagtgtattatagtgggaaacacatactggagccaaactgtgctacagggaagcaagagagaaaggagcctcagaggcaagacactggctttcccagcataaagtcctgggcacggcattatattgctgccttagcacataggaggcagagacggagggtcacaagttcaaagtcatctttggttacttaccaaacttgaggtcagcctgggctacatgagaccttatcaagatggggtggagttgggtgcggggatagagaaggaagaagctgaagccaggatcccacagtgcactttgaaggcatgtacctaatgaccaaagactttaatgccagccaagcctcatgggtttggtttgttgttgttgttttgacacagggtctctctctatagtcctagacctatatatgtagaccagcttggccttgaactcaaagatctgcttgcctttaccttctgaatgccctaacctctttattattatcattatcattaatttttgatgtgtgggggtgtttctgatgccctgagaggccacaggagggtgttaacaacagttgtgggtgttgggagctgagcctgcatcttctggaggagcagcaacgctcttagctgctgaaccatctctctagccacaggccttatccctttagctctgctacttcctgatggcaccgagccataagtccatgggcctttgcaggtggacagttcaggtccagctctctctagttctcacatcttctgacagcagagaggggagtagcccctgcttcctgcaggggttgcaggttcatgcatgtcacctggcatgtgtcgtacactcaatccatattagccatcatttttgtatgataagtcaatatttgaccatgatagtttagtggttcccagaagggggtcaaaggtggtgtggtgtgtgtctctatgtcagttccaggttccaggttaattaagagtcagtgccaagcagatggcttaatactcccctgttattagaggggactgggtcatgctctagggtttctctgcccttgtgatatggtttgaatatgcttggcttagggagtggcactattaggagttgtggccctgttgtagtgggtgtggccttgttggagtaggcgtgttactgtgggtatggactataagaccctcatcctagctgcctggaagccagtcttccactagcagccttcagatgaagtaaaactcttagcttcttctgcaccatgcctgcctggatgctgccacgctactgccctgatgataatggactgaccctctgaacctgtaagccagccccaatgaaatgtccttagaagagttgccttggtcatggtgtctcacgcaacatgtccacaggccaacctattctagacaattcctcaaggagactccattgccgtatgattctaaatgttatcaagtttataatcaaaactacccacacaccttcttcttatcatgtggcaaaaagatctgtcagcctctgtgggaacagagtctggggctcgttctgagacttccactcaggtgcaggtatgatgattgactttgccaaggggatggctttcaggaggaggcatattattgagagtttaacatagatttagctccggtgctcacagggacggggtaagaaagacgcatacccaaagacgcatgcacagaaactcatgcacagagattggcctgtctttgtacctaccaccctgaggctgggttctagcatgtttgcgtgagtgcactcaggtgtgtgtggaggcacatggctttgggaaaggtcctccaggcctcttctgcctcatttacaaagacagaatctctcagcaaatccagggcttaccaatgtctcttcctttggaggctgccacgcccacccagcaattatgctggcttctggttatctgaacccctgtcttcaggcttgcatggcaagtgctgaagccctgagctatctctccagccctctgatgctctctgtgtgtgtcagttccacacaattccatagcatagactcagacagagcaagcctgcacctgtggccagccaggtgtcccgccccccccatcccatcccctctcagaaagtcagaattcttgccgagttcattcgaggccattggttggggacacagataccaggtgttctgacttcttcatgtgtgattctcaatgcggtcccccctggtggcacagaactgaatcctagtgaggtttctggcccttgctcaccactcgccccacctcaaaggttagaccccacgggggaaagcctgacctctctgtgccctgttctgcccttgactattgcggatgtgtgtgggccacccccttgagccagtagaccaaatgttgcatatctgacagtttctgtggctttgctgaacagttttggggcacactggagtctcttgagggtagatgagggggcggaaattaagtggggaggggaatagcagttgcaggaatggccgagagccgttagtgggtggctcagccggtgtgcagctgaaagtgacagtctcaagatcctgtcgtcctgggctcctgagaacctcagaaaggggctgtaaagaaaaccactttctactcaggaggctccttgttgctgggcaggccagtctccttggagactaggggcctggatgaaccaccagggatagcagcctgtacttacaggggtcatcattgaaatctgtcccccacattgtggatgtcaggagctgctagactgccatgggccctgcagggaagggggtacagacaaggacagagcacccctcccattcattactttctctctcttttaaagatttcttatttgctgagtgtctctgtgtttgtacctgggtatgcacatctgagtgtaggtgcccgtggaggctagagaaggtgttcatagcccagaactggagctgcaggtcctggtgagctatgcaatatgtgtgctcgggcctgaactcagctcctctgtagcagctataaataggatgataaatgtagccaccttggttgtgcccagcagaagctgcagagcatttaggcacagtttcactgtgggtcttttaactatcaccttgctgatgagaaagaaagctcaaggcggggaagttgattggtcccagaaccctagaggcccagggcacatagcatgaccccatggtcctttctgcaccttgggaaggctgcttggtgtaaggcttgattgtggggttctttggagagcagagaggagcccagcaccgtggctcccatccttccatggttgggggtgggagtgggcacacacctggggcaactggagttagttgtcctgggttgtctcttctgtgtgtcctaggggtggattttcgtgtcaaaaacctgctggtagacaacaaaaccttcgccctgcaactgtgggacacagctggacaagagaggtattcagaccgtcccccaccaatggtcagggacctgggctgagctcagagtgcggaagaaaagagtggcccacaaactgggtgagagacgggggacaaggtctgtccccactgaagcaataacactgaaggaatcaggaaggaggggctgtgagctcaggtgccccctactctgcacagccctgggggtgggggtggggcactgggtgattttcccctgaccgacctcctagactgtgggtcttttgtttgtttgtttttttgaggcagggtttctctgtatagccttggctgtcctggaactcactttgtagaccaggctggcctcgaactcagaaatccgcctgcctctgcctcccgagtgctgggattaaaggtgtgcaccaccacgcccggctgactgtgggtcttttatgtaacacacggaccacagtaatagaaacttaagaggcacagagatttgaccctgaaattccatttctgagaacttgttctagggataatctcatccatgaagctcacggtttcattacagacatcacaaaacatgggagatgccctaagtgacccctaaatacatcaaagaccagccctaggatacgacagtatgtgtgtgtgggagggtgcgagtccttgggctctggatgccgtggcctcatgcagacccttcgggcaggtaccacagcctcacacgacagctgcttcgcaaggcagagggggtggtgctcatgtatgacgtcacctcccaagagagcttcacccacgtgcgttactggctcgactgtctgcaggtgggtctgttcgggactgcaggctggcctcaggttttggaacccagaggaagcttggaatccacccatgcacattcctccttccaccagggttacaaatgccacagtagtcataggaatgacaccaccggtgagctgaggcatgagtgggcggatggactgcgagccctgtagcatagagaaaccacaaacacaccgtacagctcccactagcagcttgggttgactcctcggtgggattcccgttatcgaccgatagctccatcccccacgtacctaatctttttgtgcctggattctgtagggggttgtgctgaattgtggattcagcaattatggggctagagagacagctcagccaccgagagcccttgctgctcttccagagggtgggcagaacaatccagaaaggcttccggggggaggtgcccgcaaggttagccatgaaagtagaagtattttgtaagcagaaaggaaaaaaagagagagtccaggtgagaggatggagtctagaaacttctagaagcttctaccttggggctggctggcatccagctgacagcacatattcctgtgtgcaggatgcaggtgtagagggggtggccatggtcctgctgggaaacaagatggactgtgaggaggagaggcaggtacccactgaagctggcagaaggctcgcccaggtgagtacgggggacatcgcagaaaccaggttcccctcacatcccgtgcctgcctgtggcagaggcctggctgtcacagatatggttgtgcttgatcggccactgcagaccagctctgtctcaaaccccggctgtgcgctcaaacccaggctgtgcgctcaaacccaggctgtgcgctcaaaccccggctgtgcgctcaaacccatcttgagtgctgtgtggaattagcagattcccatgcacccccagcccacgtgaaaaacctctccgagtgaaaacaattttaaaagcgtcactgtaatccccaatcaagtcttatttttatctctggtctctaattaacatactcccttcttgtttattctattttaagactcaaatgtttttccttgagaaggcaacatcaaaagctttgctgccagacaggggtactattatttataagtgagatttaaccacattctagaaaagccagggagatatattttttccaggccccgcccctgacacagtccttagccccgcccctgacacagtccttaggattcttgctaagcttcgttgttgattcatttctcacgattgtgactcgccattgtggccccaggatggcagattatcccctctggaacagtagtctgtccctttgagagttccttctctgagaattaatcttgctactaggactgaggattaagggttcctagaaaatgcacagttcacttcccctcggacatccactcaggcacgggcagcagactattcattccttacagtattatttataagggacatcagccgagctccacagttacacctcggaggtttgtgtgagaggcatgcgattaccacgaaggagccctgtgctggggggacaggtgtcttgtggggtcaggaagagaactctgagtgtctctatgtggctcccactggagcagacgagtgaggggtttttactggaaatgctcatggtgagatgctggttagaaccaggaacctagatgcttccttaaccggctccctagcttcaagtcagcaaaatcgcgtgactgtaggaagggaggtgaggcccagaagtattttagaaaaacatacaaacaaaccctgcgcgttaaggagaggtcttgtatgtttctccaaactgagcagtctgtctgtcttctattccaactctgggggacatctccagctgtgtcctgcgcatgtggggtgggtggtgggccaagccccagccagggaatgagggtggcagacgagggctggcagggctgcacctggcctctcaggcactctgtgtgtctgcaggagctgggggtgtccttcggtgagtgcagcgcggccctgggtcacaatatcctggagccgatgatgaacctggctcggtgagtgcttccctatacccagagtcctcagcggcggccctgccgctctccaggaagtggtgaaggaagaccctggttacagaccccatattctgaccctgtgctccgtgctcacagctgtctcacaccctctctttgcctataagcttcctgccccagccttctagggactttcatgactgcgtgaatagtgggcgctatctgcaaggccgtcctgccccttggagcctttccttctgactctctgcgtctctgtctcctatctcactgtgtgtttctgtctctcaactccttacactcggttggttccctacccccctccccaccccctgtctcaggcctgtgtctttctagaccactgtttttacgcctcacactcactgggtgctcagtggctggctgagacgggcgatgggaagggtatcagagtctgccagcattgctggcatgtggttagatgtgcggcccctacaagagatcatctgttgtacttttcccagcttccggtttgctcttgaccttgagtttggactttcaagggaacagaatgtccatccacttgcacacacatgttgcttggcacccagggggccagaaagagtgacacagtgacagaaggacacagtatcccagttctgtttttccactgccttgagcatagaggttgggggtagggggagccttcacacccctccacccccatcccccacccccatccctccatgctgcagaacaggaataactcagggacactgtcacacaggtcacttaagatgcaagaagaccgcctgaaagcctcattggcagaagtgacacacccacaatcaaccaagagagctggctgctgccactgatcaccagcatggtccgatcccagactgactcttccggtggctcccattctgcttcttagacacagctgggacatagaaaccctgcaggggccaatgtcacctctgctccactgagcaaacataccaggggtaaacggcaggacaaatctagattaaactccacacaagcaaagtgtccccaagtctttcattcaccccaggtgaagagatggtagggtattctagtttcatttctgcgatggtaaagactgatcaagagcagctcagaggcagggaagggctcttccagcttatgccaggccgctgccatcattgtcaagacaggaactgaagcgggaaccatggaggacggctgcttactggctcacacactgcctaatgcttagcttttatagattgtccaggtctacctgcctaggattggtactgcccacagtggattgaatcaatcatcaagcaaagcagtgcccagcagacaggcccagcccaggcgggctggcgaggacaattctctatttaagaatttcctggttgattctagatggagttaggttgataataaaaaactatccaggatgcaggacacacgtgggggagggtgctattctcctttttgaatatttttggggttttgtcggtgtctggggacgtcttgtacaaccagggcatggggttgtggagaaggaaataaagcttg

SEQ ID NO: 227 - DNA, 1285 bp, Mus musculus
cctcaagctgaccctgactacctctaccatgtcgtcttcttgggggactccaatgtgggcaagacatcattcctacacctgctacatcatgacgcttttgctactgggctgacggccactgtaggggtggattttcgtgtcaaaaacctgctggtagacaacaaaaccttcgccctgcaactgtgggacacagctggacaagagaggtaccacagcctcacacgacagctgcttcgcaaggcagagggggtggtgctcatgtatgacgtcacctcccaagagagcttcacccacgtgcgttactggctcgactgtctgcaggtgggtgtagagggggtggccatggtcctgctgggaaacaagatggactgtgaggaggagaggcaggtacccactgaagctggcagaaggctcgcccaggagctgggggtgtccttcggtgagtgcagcgcggccctgggtcacaatatcctggagccgatgatgaacctggctcggtcacttaagatgcaagaagaccgcctgaaagcctcattggcagaagtgacacacccacaatcaaccaagagagctggctgctgccactgatcaccagcatggtccgatcccagactgactcttccggtggctcccattctgcttcttagacacagctgggacatagaaaccctgcaggggccaatgtcacctctgctccactgagcaaacataccaggggtaaacggcaggacaaatctagattaaactccacacaagcaaagtgtccccaagtctttcattcaccccaggtgaagagatggtagggtattctagtttcatttctgcgatggtaaagactgatcaagagcagctcagaggcagggaagggctcttccagcttatgccaggccgctgccatcattgtcaagacaggaactgaagcgggaaccatggaggacggctgcttactggctcacacactgcctaatgcttagcttttatagattgtccaggtctacctgcctaggattggtactgcccacagtggattgaatcaatcatcaagcaaagcagtgcccagcagacaggcccagcccaggcgggctggcgaggacaattctctatttaagaatttcctggttgattctagatggagttaggttgataataaaaaactatccaggatgcaggacacacgtgggggagggtgctattctcctttttgaatatttttggggttttgtcggtgtctggggacgtcttgtacaaccagggcatggggttgtggagaaggaaataaagcttg

SEQ ID NO: 228 - protein, 193 aa, Mus musculus
PQADPDYLYHVVFLGDSNVGKTSFLHLLHHDAFATGLTATVGVDFRVKNLLVDNKTFALQLWDTAGQERYHSLTRQLLRKAEGVVLMYDVTSQESFTHVRYWLDCLQVGVEGVAMVLLGNKMDCEEERQVPTEAGRRLAQELGVSFGECSAALGHNIPMMNLARSLKMQEDRLKASLAEVTHPQSTKRAGCCH

SEQ ID NO: 229 - DNA, 33480 bp, Homo sapiens
atggagactggacagagaacatctcgaaaagtccggaagctgggctccaaccggcggcggcagacaagagagccagctgatggtgaaggcgctgcagtggccccagagccagagtcttggtcctctcaggcagcggcagaactgcaggccttcttccaggactgtggtgccaaggagaggggctttgtcacccgcgaggacctggcggtgagcccaagacccccatttgaatgctgaatcccttttccgcagctcctgacaccccctctcccccatcacaggaaggcagggcttgctacccctgcccctttctctcatttagagctctcagaaaacgctagggatgtgtttatactaatgtgaaaatgacaggtaaggctttatgtgttgcccttttccagaaacatttgtcatttaaccagcgaaagtactttaagccaaagaagtaatttgcaaatggtataattttagactcattaagcaaggacatttatcttgggaagcagtcagagccctggaagtcaaaccatgtcaatgactgtaaacttcaatgaaatataagatcagccatggttgtgtgtccccataaagagtcttagggtggccaggtgttgtggttcatgcctgtaatcccagcactttgggaggccgaggcgggcggatcacttgaggtcaggagttcgagaccagcctggccaacatggtgaaaccccgtctctactaaaaatacaaaaattagccaggcatggtggtaggtgcctgtaatcccagctacttgggaggctgaagcatgagaattgcttgagcctgaggaagtggaggttgcagtgagccaagatcacaccactacactccagcctgggtgactccatctcaaaaaaaaaaaaaaaaagaagaatgagggaaccagtaagatgttatgactggttcaaagagcgtttgagaagccagcaatttgacagaaaactattaggataaaattacggagttcaattcttaaaatggctaatatctaacaggccatcaatctttcaggctatctgttctactagtaacttcagtaattttggggattttcatgaaaggtaaacaatgtgttgtgctagcattctttttgcctcatatccaagttccaagtttcagatttcctccctccctccctccctccctcccttccttccttccttctcagctcgatctcagaggcacgatctcagctcactgcaaacctctgcctcccaggttcaagcgattctcctgcttcagcctcccaagtagctgggattacctgcacccactaccacgcctggctagtttttgtatgtttagtagagacggggtttcaccatgttggtcaggctggtctcgagctcctgacttcaggtgatccacctgcctcagcctcccaaagtgctgggattacaggcatgagccaccgcgcccggccagataatttttctgtgatcatagataatctccaaaattttcttgatgtataaaaggctgctgtcattacattggcttatttccataggagcaacaaggatgtaattaaatgtgagtctctgaatttgccctacaaacagagacagtattgagacattttagcttctgtctggacgctttcatacagaatcttatgtatgaaatttggatttatgttggattttttttttttttaagagataggatctcactctgttacccaggatggagtgcagtggtgcaatcatagctcactgcaacctcaagctcctgggctgaagcgattctctcacctcaggctcccaagtagctaggactaaaggcacaggccactacgcctggctgattcttaaattttttataaagatgaggtcttgctatgttgcccaagctgttgtctaacttctggcctcaagcaatccccccacctcaggtttcacacctgctgagattacaggtgtgagctgccatgcccaggctggttggacttttaaaaatctgtagtttgttctattgagtgaccaactgctccagttttccaaggactaatggggtacctgggatgtgggacttcgagtgctaaaattggaaagtcctgggcaaactaggatgagttggttacccaacttctgtcctaaggctagaaaaggaatcccaagatattctcttcaccagatgtcacctgcatcacctgtaaatttaaatggcttcctgtcttcttgaggtccctgatttttctaaggtccctcttctgccaggaagcaatccctgtcgttccaggccagcttcctggtagggttttgtaggaagtagctccatgagcattccttatagtaggcttgtcacacctgattaaatgaggacatcccataaaaagacactccaggtaaggccttgattgcacaattgatttatccaattatatcttgataaaaaaggaggacagattctgttgaacctgtgcaaataattatattgccatagaaagtaaggagagtctgtaaaagtaattttttttttttttgagacagggtcttgctctttcacctaggctggagtgcagtggtgcgatcttggctcattgcaacctccgcctcctgggttcaagtgatcctctcgcctcagcctcttgagtagctgggactacaggcctgcgccaccatgcccagctgatgttttgtattttttatagaggcagggttgtgggtttctccatgttgcccgggcttaaaattattggtttctgaattgtgagggggtcagtgagattcagataccacttgaaatgttgaatatcagtttacaaaagtataatctggcagggcatggtggctcacgcctgtaatctcagcattttgggaggctgaggtgggcagatcacctgagattaggagttcctgactagcctgaccaacatggtgaaaccccgtctctactaaaaatacaaaaattagccaggcgtggtggctattttctgtattcctagctacttgggaggctgtaatgtgtgtctgtaatcctagctacttgggaggctgaggcaggaaaatcacttcaacgtgggaggcggaggctgcagtaagccgagatcaagccactgcactccagcctgggtgacagcagagtgaggctctgtctcaaaaaaaaaaaaaagtataatctactaaactgagggttagagacagctcaagaagaccaggaaagagcttccttacagatctattaaagtagaacaataaaaaataatatcaactatattgcccacaaagagccataactagatttcctttggctgttcaatcaacaccatgtaatcaattattgttctgccggatcttgggtaagctgtctgcttttggactcaaaagagttgtaggaatcctcagtctactagctcagtcaaaaggacatccagtgtcagcttggaagcctacacccaagtgaagcataaatagttcatcgaacctggtacagtcctttttctctagactttgagtgtgtttttctttgttgaagatgcagtctgtggcctgcagcttatagcagaggcttcaggcaggcattggaaaggagaaacatgtccagtaatgacactgaaaggctgtggttatgtattacactacctaataatatcagaacggaggacagtggaattctctcctggggtacaatgcacaactatttcataatggtttgatcagtttttcccctgaagataaaaacatactgcctgtaataccaggactttgggaggctgaggcaggaggatcacttgagcccagaaattcaagaccagtctggacaatatggagagattccatcctataaaaaggtttaaaaaattagccaggtgtggtggtgtgcacctgcagtcccagctacttgggaggctaaggtgggaagattgcttgagcctgggaggtcaaggctgcagtgagccatgatcacgccactgcacaccagcctgggaggcagagtgagaacctgtctcaagaaagaaaaaaaaaaaagaacatattataaatagcaaaatcattgaaaaatctccagggccttcacataaagcatgcaatttctgaaatattgatattaatagcattttacctatgaaaatttagcctaggaaagcctgaacatctcttctgatttgattgctcttcccatgatgatcttgtaatagtgttgaagtatttaaaacatatagagaaagatatcttaaaatttttattgtatttttttctaaatttaggatctgatcttgggaaggcaaaatcaaaagaacggttagagaagatttaggcactagattaagacgtcatgggagaccaagaaatattactttgttatctatttaatcgaagtaataataaaataaaatattttgaaataaacatagaagaaggtaatatgattacaagagtagatagcttttttataagggagatacctttgctttttgttttttaaaataagatataataagttcaaaacaaagcagaggaaatgattctggggagatagatagggaatctctgttatctgggaggcttacacagaagctaaacagtagcctctttttaacccttgctaagagctctaagaccaatttattattttagtagagataaagataaattctagttttgctttaatagaatatgtggccataaaattttcatgagtttttattatttctttttacttatttttatttatttatttttatttttattattatcatttgagacagtttcactcttgttgcccaggctggagtgcaatggcgtgatcttggctcactgcaacctctgcctcctgggttcaagcgattcccctgcctcagcctcctgagtagctgggattacaggcgcctgccaccacctctggctatttttttttatttttatttttagtagagacgggtttcactatgttgaccaggctggtcttgaactcctaacctcaggtgatccacccgcctcggcctcccaaagtgctgggattacaggcatgagccactgtgccaagcctatttatcatcaatttttaagcccattaaaactgggccaaatttggcaaaatgttaatacatttcatagcttattttcagactcaggcattataaatcaaggcaaataaaattctctttcagtaaactttctacgacattctatatccattcaagttttgcctttttatcctttttcatgttgtagaataaccagacaatttcacacaacagtgcatcccattttccttgcagacaaagttttgtttgtctgtcgctatagctcctagtaaagcctcaagcatctgtagttaattgaactgttgttgttgttgccgttgttttgagacagggtcttgctctgttgtccgggctgtagtgcagtggcgcaatctcagctcactgcaacctccgccttctgggttcaagctattctcatgcctcagccacccaattagctggaattacagacgcccgccaccatgccaggaggattttttctgtttttagtagagacagggtttcaccatgttggccaagctggtctcgaactcctgacctcaagtgatccacctgcctaggcctcccaaagtgctgggattacaggtgtgagccaccatgcccagcctgtattaattgcacttttaaccagtgtaattaacctctttcacagaaagaactaagggtaaataattgagaactgtcttatacaagcattttagcagacaagcaaagctcacaaatacacataagccaactttctacagccttgcatatccctaacacaacttttaaaaaaagtggtcaaatatgcaatgcataacagaaaatttatcattttaactatttttaaatgtaccattcagtggcattaagtacattcacgatgttgtaccaccatttccccagccatctccaaagcttctttcatcttgccaaactgaaattctgcacccatcgaacagtaactcccatacttccctctccccaacccctggctatccctagtctactttctgtctctataactttgattactctagatacctcatagaaatggaatcatacagtatttgtcttttagttactggtgtatttcacatagcagaatgtcctcaaggtttatctgtatcgtagcatgtgtccaaatgttctttttaaagaccaaatgatattccgttgtacatatacgtcacattttgtctaccctcttatctgtcagtgaacacttgggttgattcttttggtgattgtaaataatgctgctatgaatatgggcatacaaatatctgggtctttgccgctttcttttgtacaacttttttttttttttaattgagatggagtctcactctgtcgtccaggctggagtgcagtggcatgatcttggctcactgcaacctccgcctcctgggagtctcactctgtcatccaggctggagtgcagtggcatgatcttggctcaccgcaacctccgcctcctgggatcaagtgattctcctgcctcagcctcctgagtagagtagctgggattacaggcatgcaccatcacgtgtggctaagttttgtgtttttagtagagacagggtttcaccatgttggctaggctggtcttgaactcctgacctcaggtgatccacttgccttggtctcccaaagtgctaggattacaggcgtgagtcacctcgcccagactgcacaactttttaaagcagaaaaaaatgaattcatttaacattacctaaagatatagctactttccagcatgtgaaaataagaagtaaaaaatatatcaacttaaaaatatgcctagcaatcaatgtttcagtattaaatttgttttagaaattatccagatagccaaaaattatttattaattgatgtacttcaatattaattcaaaattttaaagttacctaagaatcttggaaactgtgtttaaggtgacacactggaagttataattactgttgatacaaaatttatttgttagagtaattaatcaatttagtggggcacaaatttacatgtttataatctcaaacatatgtaaagataaagttgacttatttgatccgaaagtcgaaatgagaagtataggaaatctagattaactcgtttcttcacagaaaacaaatatagatcttatgaaaaacagaatgtatacttgaattatacttaacataaagcacagaaaagacagatagctattatatgtgttttatcaaaacaattattaaaccagtctaatttgttcaaagaatcatgttaattatatggacctggctcctgaaaaattttctgagctagcgatttctaagaagaattgttttaagtctaagtcatttaaagcattcaaatttcagttattttctgttatttttaggagaattagagttatataatcacttatttgtctctataaaccaatcaacacagaactcctttaagagacatagtacgctaagttattaataccttccagatgtacaaaagtatttcacactgacataagagttaaagacctttcgggcgtggtggtacattcctgtaatcccagctactcgggaggctgaggcaggagaatcacttgaacccaggaagtggaggttgcagtgagccaagattgcgccactgcattccagcttgagtgacagagtaagactccatctcaaaaaaaaaaaaaagagttaaaggcctgtctattacagacatatagatacacagacacacagagaatgtcttgcttcatttctacagttccagccacagatcaaaagtaaacacagcaggctgggcgtggtggctcatgcctgtaatcccagtactttgggaggctgaggcaggtggatcacctgaggtcaggggttcgagaccagcttggccaacatggtgaaaccccatctctactaaaaatacaaaaactagccaggtgtggtggcaggcacaggtaatcccagctactcaagaggctgaggcaggagaattagttgaactcgggaggtggaggttgcagtgagccaagattgtgccactgcattccagcctgaatgacagtaaacacaacaacatgaaacatgaaaactcaccaatccagatctcaaagagctgttctccttcccagtcccagtggatatgaaattatttttctttgagatacagtctcattctgttgcccaggctagagtgcagtggtgcgatctcggctcactgcaacctccttctcccggtttcaagtgattcccctgcttcagcctcctgagtagctgggattacaggcgcccaccacaatgcccggctagtttttgtatttttagtagagacggagtttcaccatgttggccaggctggtctcgaactcctgacctcaagtgatctgcccgcctcggcctctcaaagtgctgggattacaggtgtgagccactgcacccggcctggaattcttaactaatttgagatcacaaatagaaaaacaaacaacaacagcaacaacaaaacgattagcaaaccagtttttctgttatttttcaaccaataggcattaagtctccatgatgcatcccccagagatcaccaaatagaacataaagaccatcactggtttagaccagaccatcactgctgccaccaatggggaataacttatcagtcatgtgcggcctcagataaaaacacgaaattcacagaaaggaaaaaaagtaactagagaaacagagaatcagcaaactcaaagttctattatgcttggggattccctctctgagagccaaagtgtgtgggcttaaagagcccatgacgtgcacttgtgcagccacgcaggctgcttgattctgccagaggagcccactgggccatctcctagaccttagtccaaaacttgttataattttcaaaaaggtaaaatcatgacctgtaggccatgatatataaaatgaactcttataggagatttaactcattgacttttttatttttatttttttgaaacggagtttcactcttgtcacccaggctggagtgcaatggcaccatcttggctcactgcaacttctgcctcctgggttcaagtgattctcctgcctcagtctcccaagtagctgggactacagtcgcttgccaccatgcctggctaatttttgtatttttagtagagacggggtttcactatgttgtccaggctggtcttgaactcctggcctcaggtgatccacccacctcgacctcccaaactattgggattacaggcttgagccaccgcgcctggcctcaggtaatttttggacactgatcaccacattctggggaggattggctgctgtcctttatcaagttcctaaagacatgggacttaggacacgtacgttttgattttggatggagagagtgaaaagagctggagccagttcagggccctgctgggagggctgccttgggtggggttgggaatgtcaagcttaggccctgggtcaggttactggagggactctgacattggggtgaggtgaggtaggggtggctgaagacaaacatctctccgttttggagggtgagagccttccccggtgggaacacctgcccaacttgcccattccttccaggtggccaagttcagcttcctgggcagcaaggaagagtcagagatgatcttcgactgggtggatgtggagcggaagggacacctgtcccttgaagaattcagctctggactcagtatgtctgtctttggagggcctctgggcacccaggtgttccgtgcagtgtgccctgcatggggctaggctgggtcgttagaaaggcaacccttttcccagggactttcaccccccatccccggctgccacagtggtccggggccctcccctgtgcatcccctctgcccctccagggaggcctccgggcttgctttctgactcctatgtcttctccccagtaaaaggcttctcctgagccagaggtcttgacaccacagatttgtttccgcctgaggagagtaacattgtggctttggttaagggaattccatgggccagggagcagcagagggtgatatctaggggtgggggctttccaggtgctgagcccccactgggcagggctgccccagcacctgcctctctagatgggctgacaagacttagggagcccatggccagcagggcacaatcctcccgctaatcctctccctgggaagaccttccagcccaggcaatggaaggtgtggtgtcctcacagagcccctgcaagacacagatcagccttcagtgtccacaaagccccccagagttctcaggtcagctgagtctccaaaagcctggagaccagcagagaagggggccaggaatctgcatttgcgcttgggcccactccaggaggaggctgctccagttctggcaatggagaagctgagagtggggaggagaactcaggggctgggcaggaggaactgccggtggggcgcagagggagcattgctgtccacgcagccttggggccgtcttcattcctgaatcgaatcatgcccgccacgccaggaacttcccagtgcctgtgggacaaactggaagccccttcctggggcctgcaaggcctgcaccatccagacgctgccaacctctctggctcactcagtgccattcacctcgtccatcttgctagcctggctcctgcctcagggcccctgcagtgctgttctctttgccggggacacacttctctggagtccacatggtttgctccttcttgtaattcacatctcagttccaatgtcacctccttaggacactgctagccacctcatctaagtcgatcctcccagtctctcagtggaaattaccctgcatattcctttggctcacttagcaagttggcttaaaatatatatatatatattcttttcaactcgcactagaatgtcagctccatgttagggattttggttaattttgtcatgtagatgctcaatacatatccattgattgagtgcatgaagaatttgttcaccaccttggaggtgtggtgtgatttccagcaagtcttttggcgtctctgggcctcaggtactcatctgtaaaatgggtaccttaaatagactcctaaggttgatatgagaaatatgtgaatgtagccttgtgtaaatgtgactggcacaggtagaattacttccctgagggctggaccagggctgggtgggaggccaggcgtctgggcccaacaccactgtgctcccctctgtccacttctgtcccacagaaaacatctttggctccagccagagcccccacaggctccgcagaaggaagccactgccctctaagcgggtatctgctaccaccagcttcccagctctggaggaggcggatgctgaggagaaggaggcgttccttgccttcatggagcagctggggactggacacttacttcccaagtaaggccagggcggcatgtgcatggggagaggctctgccagccattgacggcaggggctttcctggacacagcaggggtcaagggggcaggcgccaggtagagccaagtgcaaattctggcttggccattggctagctgtgtgaccacagggatggcttgacttctgacctctgtttcctgggctgcagaatgagcctaaaagttgttgtggggttaaaaccacgtgcagaggatgcctgctcatggggagtccttcccacccctgcacctcccggccctgtcctgccctgtagggtcactctccaggaggactagcgattgggctcagcttcccaaggcacatgaattcttaaaaccatgggggtccctgcaggtgcctttcttcactcagtgaaggttcctggagttgggggcgatttcaggcattttgtgccctgggttgaacgggtttggagacagaagtgcatttcctcccatccatctcaggctctaggtgtcaggggtttgcctttgcttagagaaagggagccctggccgggcacggtggctcatgcctgtaatcccagcactttgggaggctgaggcgggtggatcacctgaggtcgggggttccagaccagcctggccaacatgatgaaaccccatctctactaaaaatacaaaaattagccgggcgtggtggcacatgcctgtaatcccagctactcaggaggctgaggcaggagaattgcttgaacctgggaggcggatgttgcagtgagctgagatcgcgccactgcactccagcctgggtgacagagcaagactctgtctcaaaaaaaaaaaaaaaaaaagagagagatagaaagggagccctgcctgctaacgtcccctcctaggacccccgggtctgttagaaccagtgagggaattgccctcacccactggcccaggtttgcttgccccacccatggggttctgtgaggacaagattcctcacgcttggctcccggagggtggggccaggtgttgtgaggcaggcagggtaggacttagggtgtagactggtggggcaagggggtggggagctttgtattcatttggcagcttggcctaggctcagccctctggcatccatcctcatgacttaattaaatccatgtgaaagcagcctttattgggcaccaaccgtgtggcaggccctgagctggtgctttcatcaggtgtttctcattccccagtgaccttgcttggcaggtatcagcccccaccccattttacaaatgagcccagagagggcttgggacttgctggaggtcacacagcctcagagtgagagaagagagagggcagatggaagctctgggccatcaggctcccaaatccccccatcccactattacggaatcatagagagacacagtgtggcgggggttcgagaagggagagggcacatctgggaatggttcctggaggaggtggcgttttagttgcatcttgtagggtgtcaatagatttggcccaggtgccaaagtctcttggagcgctgcagtgaaaactgaggagtggggctccccttgcttctccatcccaccttgtgtctgaccctcccatctctggctgtcttcccctccccaggcagatggaaatctggcaactgtgggggcagctgcggcaggaggagccccagctggcaggcaacctggcaggctttctggccaagatgaccagccgcctgcaggaggcccaggcggacaaggaggccctggagctgaccctgaggaagtgagtggggggcctggccgggtgtctgatacgaagtaggtgctcttcacattccagtggaatctggttgaatttccccagctcctcctgcagctgggcctgtgagctggatagggcagagctgcgctggaggaagaggtggctcaggggaccgggtggggaggacagagttggtaatggcaggagtgggaagggcagggtgtgtcttggtacaggacccactgtgacgcccaactccagggggcctgctcccgtagactgtaatgcatgtggtgaccctggagttgggttataagggcaggaggacggtgaaagagggagtggggactgagtgatggggtgatggggacaatgagaccctggccaggggaactggtgacagttacaagggtcggcatggtaggatcagcaggaccaatgtcaaagttgtatgggtcagggggttgttactgggatggctgttctcagggtgacagaggtcagtgactgctggcagagtgaggaaagcaataggatggattccaaacccaagcccagactgcccctgccagcagcaggctcccagaggtgctgatgggctgcctggccccaactcctgctcctcccaggcgtgactctgaccaccaccgcgaggtccagcagctctatgaggagatggagcagcagatccgccaggagaagcagcagctgcaggctgaggtgggctcccgccggcagcctgcctccttcccactgcccgggacacctctgctggctaaggaatggggccagtgactggccagggtggggaacaggaggctgctgtagtgaatcctctccctgccctgagcagctggtgttccccagagagacgaggtggggagtgtcgagcctgggcccccttcccatctctgccaagtctccttgttgccacaatctaggctggaactggaggagttgtcctgagaaccctccctgctggggcatcctggcccaggcaccccaggtggtggaggtggagtgtgagaagggctggcctgcctggctagctcttagagtctgcagggtgagggctgaatctacctactccacagagtgactctcggggcctggccctcacctcccagatgcaggacgtcctagaggccaaggagcgcgaggtgcagcgactagctgagggccagagggaggtgagtaatagggtttcccagaaacctacttccgaacaggtttttaatatctatgaacctcagtttcctatcagagacatggaaatcagaactcctgccttagaaggtactgtgatgattagagatactacatgtgagggcctgagacagtgcctggcacgtagtaggtgctttgtgcctcagttgttccatctctgaaactgacctagcttcctgcttagggtcaggttacttgctgctgcccggacactgcaggtcttatagcctgtagtcacttccaggtggcactgtggttgagtgtttgggtctgagaccctgccccatttttttttttttgacacggaatcatgctgtcacccaggctggagtgcagtggcgcaatcttggctcactgcaagctccgcctcagttcacctcaggagaatggttcacgccattctcctgcctcagcctcccgagtagctgggactacaggcgcccatcactgcgcccagctaattttttgtatttttagtagagatggggtttcaccgtggtctcaatctcctgaccttgtgatcagcgccccattatctcttcctttctcaacttgaagaccactgaccttggtaaaattgtgctctgctgtaaccaggacaagaagcatcccttcagcccgggacaagattcctcgagccgtcctcaccacggcctgggctggccctgttaccaggttgatttcccaggtgcctctgctgctgctccttggaaatcgaggcaggcccctcctgccaagtgaagagatagggctttacacatggggccatttcgtcctgtcccctgtggatgtgaagcttctcccctccaatcatttattccttcaccccacagctacttatccagcaccaactatgtgccagacactgttccaggtcctgaggatcatgacagacacatacctctgcccacagagttaccatctagtcagggagacaggtgacataataacataggaaatggtgatcagtgctaaggagaataaagtaaaacagggaagggggatagaagagtcgtaggagttgaaatcgtagtcaaagtaagttgagaagggagtcaaggaaggcctggctgagatgatgacattggagcgaagacctggagaagtgtgatatgcgggggaagggcatccaggcagagggaacagcaggtgcgaaggccctgagcgggcatgagctgtggaagttcacggaacagtaagcagagctgtggactggaacagactgaggcaacagccataggaaaggaggtgagggtcatgaggggaggtgaggaggctgcaggagactgtgcagtgtcccggaggccattgcaagagctttgcctttcccttcacttggccaagcaatgctccctctctgggtcatgagatttgctgttggatcaggagccccctgtagaccagacgggctcaggggccagcagccactgtagggcgctgagtagaggagggtgggatttggcttgggtgtggggcctttgtggcgctggtggtttttgtttctcacacagtctccctgccctccccaccctaggatttccagtgcccctcctagataggagctaatggagctagttaggccaaggagggataaccgcccacccctactctgatttaagctgggtctccaggagcctggacagggggtgggggtctgtgtcccacaatggccttgggaggctttttgcgccctggagggcatctgggcttctctccgcctcaccctccaccctgcagctggaggcccagctctcccacctcaggagcacacatcaggaggctgcctcagagaaccagcagctgcaggaggccaagcgtgacctggctgggcggctggaggaggtgcgggggcagctgcaggtgaccagggggcgcctggacgccgccaggggccgggtgtcctggcaggtggaggagaaactgaggcaagtggctgctatccctggactggggtggactctaagggcctcctggaaccagtggggaactctgagttctctaaggatctagctagcacacagtgcacacatagactccttccttaaaccccaccctctgccaagctggaactatcacaaccatttctcagatgaggaaactggggcacaaaaaagggaaacacctgtgcccaaggccacatggctagaagtaaaacatgcacatgtgtgcatgtacgtgtacacacatacacacacacatacacacacacacatgtcctagtgcagtgctagatccctagcaggcactcactctacttgttatagctcagagaagtgggatgggccagaatgatcaaggaaggcttcctggaggaggtgaggcttcacgtgggtcttgaggatggacaggattggatgaggaggaggaatggggagcacataccaggtgagaaagattgcctgagcaaggactgggaggagacctggccatggggagagcaagggatggtgagggctgcaggtgggatgggtgtgacaccacctacctgcccctccccgatctttgcttccctgcttcatttccagttttcctggagcgggtgagaagaccccagaccctcaggctgcctcccctgaggaggcccccctgcctgggctatttggggacaacgatgactgggaccagctcctgagcaactttggcagccctccgcacggagccctgcagctctgctggagcccgcccccgaccccaagagccacctcaggcccccagacaccccgtgtggtcaggcagatctccatctcggagccacaggcttttctatttggtcaggagccatcttcagatccagatggggctccaaggaccccacctggggtgactttcagcgccaaggacaataaaggagtggacccacatgagcaggacattagagcagagcagcctgttgaaccgcacgacccggaccccaaccaggagccagggtccacacccgagggccgcctcctctggggtctctcaggaagcctggtggcacctgcattcaaagtgctcattcctttggaggatgggccccctccccctgcgaactctccccctccccaggccccagctgggtccagcaaacagatccaggcctcagacccagatgacaagggccctgggtcttgggctcctcccagcggggctcagcctggggctggagcaggaccccaggaacccacacaaacccctcccaccatgactgagcgggaaacccagcccggaccctcacccacaactgctctcacaggagtgggcccagccaagccgcccaggcagagagatgccctccagcaggacctgcatgccactggctctgagccaagactggggacccagagggctagagccctcaccctggggccagctgagcccttccagggcctggaatttgtgggtccggtgcccacagagaggctggagcagggccaggcgggcccagcggtgcaggagggccttcctgaggggctaagagaagctcatggccaggtccttgggctgggtgagctgtctgccttcccccaccaggagctggaagaggaacccaggtctgaggaaggaaaacaagagggccgaggtgggcaggacctcagttcagagcagtcagagcagtcggttgaggctcacggcctagaaactgcgcattcggaactcccccagcaagactctctgcttgtttctctcccatctgccacaccacaggctcaggtggaagcagaaggccccactcctggaaaatcggcacctccaaggggctctcctcccaggggggctcagcctggggctggagcaggaccccaggaacccacgcaaacccctcccaccatggctgagcaggaagcccaacccaggccatccctcacgactgctcacgcagaagaacaaggcccgcctcactccagggaaccaagggcagagagcaggcttgaagatccaggaatggactccagggaagctgggctgaccccatccccgggagaccccatggctggagggggaccccaggccaaccctgattacctcttccatgtcatctttctgggagactccaacgtgggcaaaacatccttcctgcacctgctgcaccagaattctttcgccaccggattgacagctaccgtgggtaagggcattggggagggcggcagggagcaaggagagacgcaggggccagggccaacgagtgagagcgggcccagaccaagccctccctgaggaagctgcaggttctgccctggccacgggccctgcattagacattgttttatatgggcataaccttactatttcactaatcgtctctaattacaggtaatttgctttttctgcattgatctgattagcttataaggtgccacatcaacaatgcaccctgcaatttaggtgcctgcgagagttgatggtgaaaacaagcaagtatccactcatgtggcccatgggcaggccagagcaggttctgtgctggttggatttgctcatgactagctccaggctgggcagccatggtctggcaagaagtcaccttgggcaagttggatattttacacagaatgtatttgtagagtgtggtaaattaggaagccaggtgcctgagttcaaatcttagccctgccacttattagggtctgaatttggacaaatgatttaacccttttgaacccccaaatcctcatctgcataatggggacaacagtagtgctgccttcctagagtggttgaggactagttaatatgtcaagatcttagaatcataactgacatgtagtgagtactcagtaagtattagttattatggttgttattattattataagtaaatatttgatcatgtctaactcagtggctcctgcaagaaatggccgaaagcagagagccttccctccctaaaagtatcaggatatgtggccactgaaccctgtacagagctacagaaaagcaaacccagccgggcgcagtggctcacacctgtaatcccaacactttgggaggctgaggcgggcggatcacaaggtcaggagatcgagaccatcccggctaacgcagtgaaaccctgtctttactaaaaatacaaaaaattagccgggcatggtggcggttgcttgtagtcccagctactcgggaggctgaggcaggagaatgacgtgaacccaggaggcggtgcttgcagtgagccgagatcgcaccactgcactccagcctgggcgacagagcaagattccgtctcccaaaaaaaaaaaaaaaaaaaaaagcaaacccgagggaatggaggggagacccacctagggacaaagaagtcacgcctgtctttgtattagaccagggcacatgccgactggggatcagagccagaccagtcggtaaatgacagccccccacaagagaggcctggggcaggttctcaaacttttcttgcccaagaagcctcacctgggagctagttagaaatgcagttccctcgggaagaggaaacctatagcaggctggcctgatgttgagtggggtcacaggttctacaacactaccattattttattttatttatttatttatttatttatttatttatttatttattttttgagatggagtctcgccctgtcacccaggctccagtgcagtggcacgatttctgcttactgcaacctctgcttcctgggttcaagtgattctcctgcctcagcctcccaagtagctgagactacaggtgtgtgccacttcacctggcttatttttgtacttttagtagagatgaagtttcaccacgttggccaggctggtgacctcaggtgatctgcccgcctcagcctcccaaagtgctgggattacaggcgtgagccactgtgcctggccaaggctaccattattagtcacctaagctacagtttactgaccacctcccatgcactaggcatcttccatacatgtcttattccttacaacagccttccttagaatggagcctcctcctttattatgtggtaagaagttctcacaaaattcaatcaagaaaaacacagctgcataatcgtgaaaccaaccaaccaatcaaccaaccaaccaaccaaccaaccaaccaaccaaccaaccaaccaggcaagccggcatgcactgctagcctgctgggagtacctgagatccaagtgcttggtccagatctgtcccaatcccaagctatggtttgctgccccccggtggctatcgtcttttctggtttaaataccacaggaaatgatcctgccttcataggtcaatatttccctacctagtgtcaccttccctccattcctgctcccccacctcacaaaataagaactctaccctgcctgcatttgaggacgggaccagatagagaatcagagccaacggagttatatttgaatgtacattttccatatctatccccattttacagatgaggaaagcagagaattgaagacctggttcagtttcttgccctagctgggcccccaaagttaaggccacctaccttaaaagccctgcctccacaccagaagttttatcctcttttcagttcagaattgcatgctctctgggtcacttaaaacagcatttttttttttgagatggagtttcactctcgttgcccaggcaacaagattgtgcagctgcgcgatctcggctcattgtaacctccgcctcccgggttcaagtgattctcttgcctcagcctcctgagtagctgggattacaggcatgtgtcaccacgccttttaaaacagcattttaatcctccagccactctgcagtgtaggtctttctaatttgccactttgcagacaaggaaagagaggctcacagaggtgaagtgacttgcctgaggtcctgtaaccagtgtaacagttgcctgaagccagcattccttctgcccctctgggctccttgtctcccctgctgtctcgttaagagaggaaagtgcatgcaataattagggaatggaacaaagagtactgtaaaaataaaataatgaaacttatattctgggtggcctaaggaatgaacaacatagacaaggtgccctgtgttggcacaacttgcggcagggaggtctgggaaggcttcttggaggaagtgggtcctcgagtatggatgggatgcagagccgaggggaagcccggcagccaagggctccatcgcaccgcagctggtacaggggacaggtgtatactggggtaggccttggctaggagtcctggatggtaacttagtaggcttcacccctctctatgtgtcctaggagtagattttcgggtcaaaaccttgctggtggacaacaagtgctttgtgctgcagctctgggacacagctggccaagagaggtaacaggcactgtatatcagtgtgtcaggaacctaggctgagcgtaggggtgcagagggacagggagcagccctaataacacaggcaggaggcaactgccccccaaggattcaggaggtcagggaaggagagatgagtcaagcccaaggcaggggagagagggcagcagagccagaggtccctcagcctggcagggcatatattagggcttcccaacatggtcattaggggacagccacccaatcacctgtccttctaaaaatgctggtcttctactttcaacctaggcagtagtgatcaaaaatttttttttcttcttgagatggagtctcgctgtattgctcaggctggagtacagtggcgtgatctgggctcactgcaacctccacttaccgggttcaagcgattctcctgcttcagcctctgagtagctgggactacaggtgcccaccaccacatccagctaatttttgtatttttagtagagatggggtttcatcatattggccaggctggtctcgaactcctgacctcgtgatctacctgcctcggcctcccaaagtgctgggattacaggcatgagccacggcacctggcagtgataaaaacttaaaaggcatatcttatttgattctgcagttccacttctagaaattcattctataaatagactcatatgactataataacaaagggaccaggaccagtcatagtattctcacttgtgttatgaaacataggaaacaacctaaatgtccatcaataggggaccagttaaataaaggagggtcaatctacccagtataacaccataaagccacacaaagactgaggactctctttatgtactaatagggatttttttttttttttttgagacagagtcttgctctgtcacccaggctggagtgtggtggtgtgatctcagctcactgcaatctccacctccagggcttaagtgattcttgtgcctcagcctcctgaggagctgggactacagacacatacaaccacatccagctaatttttgtatttttagtagacacagggtttcaccatgttggccaggccgatctggaactcctgaccgcaagtgatcctcctgaccgcaagtgatcctcctgcctcagcctcccaaagtgctgggattacaggcgtgagccaccgtgcccagcccgatagggaaatttctccaagacatcctgttaactggaaaaaaacaaaatgcagaacactgaatattaatgagtatgatgaatgttttacactgtatttgtataaaatagagggggaaagatgtatgtgtatgggtgtatatatgtgtgtgtatatatatgtatatacgtaaaatgcctctggaaaaatatttaagaaactgataaccctggttgcctctggggagggggactgggtggctccaggatggggcagaaggaaggagacttttcattgagttctccttgagaccttttgaaatttgagccatgagaactgttacctagtcaacaataactacactgtacgaagaaaagcatacggacatgctctgtgggaagcaattagaagtaggataggttacttctcccactttgcagaggccagggcctggggtctggatgcctggtgtggcctcatgcagactctctgggcaggtaccacagtatgacgcgacagctgctccgcaaggctgacggggtggtgctcatgtacgacatcacctcccaggagagctttgcccacgtgcgctactggctagactgtctccaggtgagcagatggctgctggggttggccccagtccctccagtcaagagggaccttatatcctgcccactccctcttttctcccaggattacaaatgacatgacagacatatgggtgacaccacccactgagggcatgtggttggatgagctgggaatgcagtagtacaaagaaaccacaaccacatagtacagccttcaaaccaaactacttcctttatcctgtgaacattctcttcctacatatggcagctgtttgtaatgtcttcttcttacacttgaggctaatgtagttcttgtgccattccatgtggtaattcctctgttcacacatctctagtttttcccctgcttacttcctcaaagcatatatactgaaattctgcagtgtgtactagcacagcagaggggtgtgaagttagccatgttgccttctctctggaagtttctagtttagcaaaagaagcaggataaggtaatgtgtgaagaggggagctgagcactggggtctgacaggacctacatttgaatcccacccacccgaactctgtgactttggacaagtgaattgagttctctgaacttcaatttctggaattctctcataggggagttgtgacaattaattgatagaattgctttcagcacagcacctggtgtatagcaatcactcactaatcagaaactattattattattcatgagacaattgggaaaatgtataatcaagtgctggactgttcagaacaggcaggaagagaggacatgggcaggaacaacccaggaaggcttcctgggggaggtgttcttaaggttggccttggaaaataagtgagatgtttatcagcagagaggaaggatgggagaaagggtccaggtgagaaggttatggagtggatgtggcctgggagggggaacatgcgggggacacagttcagcttctaggaaggcaaatgtgccaggagcctggcacacagtgggtgtggctgacagaacatgttctgtgtgcaggatgcagggtcggatggggtggtcatccttctcctgggaaacaagatggactgtgaggaggaacggcaagtgtccgtggaagctgggcagcaactggcccaggtaagcacttgggcatcagcccgtctctgtgcgtggactgggcagacacctccctggcaggtggtggataggcatcacctgacctgggcagccgagaagaacccgtggcccattcctgcccctgccccaaccaaaggcctgttcagagtggacagcagcctagccgcctctgcctcccacacagccctggcctctggagatgcgctttaagcccaaacccaaggctggagtggcgggcgtgacactgaacctcactgttgaattagcacattcccacaccatgtccccacctacataagaaatagcttcagagtaaaaaggttttaaaagctttgcttaaaattcccaatcaaattttaattttatctctggtctctaattaacgtgctgccttctaagttctcctattttaagactcaaattctcccttgggatgattacatcaaaagccccactgccagacagtgaacactatctattcatgaatggcatttaaccacattccagaaaatctggagagtaataaaaatagagggaaaaatcactcctcgccccacctctcacacaacccctcttggcatcttcctactgtatttccttcctgtttctcttcccacttcccataaattgtgaggtcatcattgtggctcctgctggaagggaattttttttctttctttcttttttttttttttttttgagatggaatcttgctctgtcacccaggctggagtgcagtggcacgatcttggctcattgcaacctccgactcccgggttcaagcgattctcccacctcagcctccttagtagctgggattacaggcatgtgccaccacgcccggctaatttttgtatttttagtagagacggggtttcaccatgttggccaggctgatctggaactcctgacctcaagggatctgcctgcctcgggctcccaaagtgctgggattacaggcgtgagccaccatgctcggcctttttcttaaaagtagtaactcatccctttgacatagtaatttatcctctagcaatttatcgtaagggaagactcagaagtaataatccctaaaggaacacctaatggatacccatgtataatgtacaatcgaacaggtttatatgagggttttcaaatattatttataagaacaaacatttggcagcaattggtggttaaactgtggatgttcatgtgagaggttagtatttgccattaagaatcctgtcttggaaaaatatttaagggtgtgggggaaatgcttacaatataatagaaaatcatataagcagctacaaatctagatataggttaggttgaaacatatgaaattgctgatatttgactggagcttgccaaaaatagcaatttcgtgtggtttaacctaactgtacaggacagttagcccccgccccgtaaaagggttatataaaacagaatggcaatatctacccaaacactaacagcagtggtttagatattgagctggtactgtcttatactatatcttccaatattcccccaatgaaatatttctgaaattaaaaaacataactaacatttataaaatgtctccagaggcatttctccaagttgggatgcaggcttcccatgccactccgaaggctgtgaaatgtctcttcaatgcattccttgacaccttggccagccggggtgaagggacagtgggcaaagggctccagccagggaccatggcccacgctgagatggggctgtcttgctcgccactgaggtcagcttagggatgcattgggactctgatggccgggactttagtggcggggtatggcctggcctttcagttgtctctcccaaggcacatatgtccctccctgtctggcctgcaggaactgggggtctattttggggagtgcagtgccgccttgggtcacaacatcctggagcctgtagtaaacctggccaggtaagtgctgcccgccccccgccgcccccacccaccccttgcagaatcctctgggacagctccggccccactcttgactcccaggtgggacaggaaggcccattctgaggaaatgggtcagggaagcacctagttaaagacctgggctcaccagtctgaggggagagagagccctgcactgagagtctcctgactccagctctgcccttcccgttcgctgaatcactccccacaggcacttaggctctctgagcctcagttttttcatttgcaaagagggctgagaaaaggagtgtctctcttctgctcccaaacttccagtagcttccattaaaatccaaatgctttgcaatggcctgcagcatctctagtgccatctcccccacccctacacacacacacattcactcacacccacacacactcacactcttacacacactcacactcacacacacacacttgccaagttccagccactcagagactccctccctgatcacccacctgccatcactattttggatcacagcccctgtttgtgtccttcatggcccttcttgacacgacacatattaatgatatatgcatttatctgttttcttgttgtccaggaaggcagggccatgtctgttttgttcagcccctctccccatacctgggacctaggtgctccataaatgaataaaatgagtaaggcatgaggggagctagatcagatgagcaccatctggcacacagtaaatatatcacgaagaaatgaatggacttcttttgcttccccagcctccaagctctctcggcactgagccgcgccatagccctctgcttgggatgcacctcccccaccctttctgctggcataccttgtccatggctcagttcggtcaccatctccttcctccccagatccctccaggacctggtgtgaagtccctgtgtgcctccccatcattcccgggctgcagtcaccccttttcctgtctgtctctctcactactcaagggagggaatggtggcttctttgtcatagtcagagtcctgcacagtgcctggcacatagtaggccagaaagagaaggtcaaagtctcagtgactcaattcttcgggtctcatgtggaatgcagggcaggggcagagctgttgtgggggttgtgggtgcggcctcccaccccccagctgcacccatgggcccatccgtgctgcccgtaggaggtgagagagaggcctgatgcctggcactgtcacataggtcactcaggatgcaagaagaaggcctgaaggactcgctggtgaaggtggcccccaagaggccgcccaagagattcggctgttgctcctgatcacctgtcctgtcctgggtaggatggacacccatggggtttcctgtccctcagctcctgtcctttgttcctggacagcaacgacacagaggaccagcttggaggttcaggaaaacccttctcaactcaggactcggatcccagagcagggccgcatcacctctgcctttcacactccaaaggagggctttgctgagtgaacaaggcttgaggggcaggggtatggcaaaactctccaaacaaagaaagtctagaaaaacgacttaaggaaaatacaccaaaatattggccgcacatctgtgggtgtaaaattttagggagaatgtggggggggtggggtgttactttccattttacacatatttgtattttcagattttcaacaataacagtattcaatacataatcagaaaaaagagatgtggaggaggaggagagaaacttcccaaggagctcccttgggtgctgctggctcctaattagtgtaacctgttaatcacatgttgctcggtgttagagcggtccctctgtgctctgcctggcagggcgctgttggcctggtctccctcactatttctatttgcaagcatgggctttcttcccagcagaatctggttcctgggaagagtaatgttccaaaggcctctgatatgcctcgatgccctcctgtcttccagagccccaacctcactccctttccccaccatacaaaacacacctcccaggggtcacatttgggggtcccgccccctgctccaatgccatggtgtccccaagcacagggctttggcctgagttgtcagtctctggatgcatttgaggggcagctagggtgtggctggggggtccaagcagctggggagccgagactcagaatcattcacacacttctatttggagcttttgtggaagtttccagaattccataatattcacctcctgaatggtggctgccccttatcagccagggctggggtttccagtgccctcggagagcttgctttagagtcttggagagacggccatggtctgcgtttgtatgtctgtcacatcttaccatcatcacaaattgaatatacaacatgtgccaggcactgaatttgtttgtttgttttttgagacaggatctctctctgttgcacaggctggagtacattggcatgatcgccactcacaacagcctcaactgtctgggctcaagtgattcccccacctcagcctcccaagtagctgggaccatgggcacatgccaccacatccggctaattttttagctatttgcaaacacaaggtcttgcaatgttgcttaggctggtctcaaactcctgggctcaagtgatcctcccaatgtgctgggatgacaggcgtgagccaccgcccccagcctgggtttggtattttgtaatccttcaggtactggggaatttcctggctgaatcaatggaaaccccagtttcatagggggacaagcaaagacagttcaaggaacagagttacagagagagagaacgaaggagaaagagggagcaacagagggctgttgcatcacacagtcttagaccctggccccaacccctcttctcagttctgaaaggaacgtctcagcagcagtgagccttccatcaccagaggcgcacaagaagacaggtaatgcttggcaaaggtgaggtagagaagatcccagcatctgaagctgccaaagttggattagattcccttaatggaccccattcaacctccagactccatgtggatgattcccatggtccagctgattctttgtgtgtttttgttttgttttgttttgttttgtttttttgagacggagtctcactcagtcgctaggctggagcacaggggcgcaatctcggctcactgcaacctccacctcccgggttcacgccattctcctgcctcagcctcccaagtagctgggcctacaggcgcccgccacctcacccagctaattttttgtatttttagtagagacggggtttcaccatgttggtcaggatggtctcgatctcttgacctcgtaatccacccgcctcggcctcccagagtgctgggattacaggcatgagccaccacgcccggccctccagctgattcttttactgggcccttcactgatcctttttaccccaacgtcttctcccatctcaggtcccctcccgcagcccacaagcctgcccctgaactgagcagtttctcagtgtgctcagagagagagagagagagagagagagagagagagagagagagagagagaggtgtgggctgcagtgagtgatgctggccctggataaggatgggaaacaggtcctatagttgctaatggctctttctctggggcccagggacctggcaggcaccaacatctctgtcctgtgggccagggagttaatgaggcaggtaggcagggtgtgattcctgggagaggcagtagagcagacagcccctgtcgtttgggggcccggtacgggagtggcccccaagcctccccgtctcagctcagctctgttctggcctcaggcaactcaggttcgcaggaggtggagttctgggaggaactccacactgcccagcaccctcttttggctttcttgggccggatccacctgctgggcagggcacagctgtgcaaggaccaccagcctttcctgctgtcaaagggctcacaagccagggaacaggacccaggaacctcagagcagcacaaagtaggcaacgacagcagcaggagaaacttgaggtagacttcagagtgaacttccaggcaagtggtgagttcttggggcatgtcagccaaggaggctctgatttaggcttagccagagtctgattaagaaaaggagggtgggactgggctgatgggactcaggctgtggagtgagaagggagggcatggggagagaaggaaggctgggcaggagctctaagagaagagggcttttgggaactgagggtgagcaggggcagaatgacatccctcctttacccagtgcctaccgtatgccaggcactgttctgagcacctagctcgtgttaattcatttagccctcacaccatcaggcgtgctcccccatcttacggaaaaggaaagtactgcatagggaggctgagtaacttccccgtagtcacgtagcaagtaagtgctggagccagtgttaaacgcaaacgccgatacccatagacttaactctgaagttctgcaactgcttacaggaagatgcggatgcttcggggaaggaggggccaggtccctgaagcctcgtattgctccctgccaattcctctccagtaatagtccatgtcattggtgggtgtggaccaggaaaaagagacgaaaaggcagtgataaatgccaggaaagtggctggatgacagccttcatccaggacaggtccttcatttcccctcctcctgccgtctctgaagctggtgggacccgggaaggtggccgacatcagaattcacagaggccccctctccagtctcccctcagctgccctcaggcacgttgctgccctggggccccagagacgaagccaagttccccaggctggggctctgcaggagggactcagagactccttcaaacctggctttgagcccgcaggagaagagtgtctccagcccccaccccggtgtggtagaaaaggggagggcaactccagtaaggactcctctgctatgtcttgtttgctgctggattccgggaacctggtccagagcaaatgctcaggaaatatgtactgagttagcaggcaagcctccagctaaagctcccgggccctggcctggcctgcagggcggccaatggtgacatcagccactgggctggctctaggatgtctacatcccatcttgtagccagagtcctcccaatcggggactccccctgcccttgacatgtgggacagagtgggggtgagaagaaaggtctgaccactgggtgcagactcccccactctgccaggggcctgcacagcataacctagagggcaatgattcccaggctggtctgcccttagaattatttgggatctttcaaaaatgctaaagcccagaccaactatgtcatgtctctgggggtgggacccaggcttctgtatttgtgaaactcctcaggtgatcccaaagtgcagagaagcttgggaaccactggaaggggcttcacaccttctcaaagccctttcagacccacttttccatttgaacctcaaattaaacctgcttgtttcacagggcagggtttttgttttgtcaaaaaatagatacatatgtgtgtgtgtatgtatgcacatatatatttatcagattatgaaaacagtgtgtactccctgcagaaattttagaaataaattttaaagaagaaaatgaaaattaccctagtcttaccacttatgatagttactattgacatctgttttattttatttccttgctttcttacagctgaggaaactgaggtagagaaacattaagtaactctcccaggggccaggtgcggtggcgcctgtaatcccagcactttgggaggccgaggcatgagaatcgcttgaacctaggaggcggaggttgcagtgagtcaagatctcactccagcctgggtgatagagtgagattctgtttctaaaaaaataaataaataaataaatcccagggtactggagctagcaagcagcagaggcaggatttgaacccagggtactaatggagtccatcccatggggttgtcatgaggtctgcaggggctaatgtgtgccaaggacaggccttatctgggcccactacatgcagggggtctgtgaaaaaaggaggcttagcaggaatggggaaggcggcctttggggctggctggtttctactttgtccttgtgtgtttgaaacagaatggagcccaatgctacgttcaccatgcagctcacggccacacctgagcgactgctccgactcatctctgctggggtctgtggcctcatcctgctggtggggctgtcagctaatgggctcatgctgctggtggtgggccggggcccgggctccccccacccgctccactccctgacccacagcctcatgatgaacatcacgccatctgacctgctcttcctggcctgcgtggtgcctgtgctgctgctgagcttcctgcagcacaactggtggctgggccctgccatctgcaccattagccaggccaccaacacagccaccacgttctgcatcttctatagcatggtggccacagctctcctgcgccatgtggctgtggcccggcctgacctggccttcccagccggctggggcacccgcttgctgctctgtggggccatgtgggccctgggccttacagaatccctgcccaactggctgttccagagggtggcagtggaggaggagacagcgggggctcccaagacccaggcctgcctcttgctcctgagccctgctgggacctcctgctacatcagcctgctgggagccctggccttcctgccatgcacgctggggctgggctgctctttcagccacgtgggctggctcctgtggacccagccccaaggtcccatgggagagagcatccaggagcat

SEQ ID NO: 230 - DNA, 2068 bp, Homo sapiens
atggctggagggggaccccaggccaaccctgattacctcttccatgtcatctttctgggagactccaacgtgggcaaaacatccttcctgcacctgctgcaccagaattctttcgccaccggattgacagctaccgtgggcttcacccctctctatgtgtcctaggagtagattttcgggtcaaaaccttgctggtggacaacaagtgctttgtgctgcagctctgggacacagctggccaagagaggtaccacagtatgacgcgacagctgctccgcaaggctgacggggtggtgctcatgtacgacatcacctcccaggagagctttgcccacgtgcgctactggctagactgtctccaggatgcagggtcggatggggtggtcatccttctcctgggaaacaagatggactgtgaggaggaacggcaagtgtccgtggaagctgggcagcaactggcccaggaactgggggtctattttggggagtgcagtgccgccttgggtcacaacatcctggagcctgtagtaaacctggccagatccctccaggacctggtgtgaagtccctgtgtgcctccccatcattcccgggctgcagtcaccccttttcctgtctgtctctctcactactcaagggagggaatggtggcttctttgtcatagtcagagtcctgcacagtgcctggcacatagtaggccagaaagagaaggtcaaagtctcagtgactcaattcttcgggtctcatgtggaatgcagggcaggggcagagctgttgtgggggttgtgggtgcggcctcccaccccccagctgcacccatgggcccatccgtgctgcccgtaggaggtgagagagaggcctgatgcctggcactgtcacataggtcactcaggatgcaagaagaaggcctgaaggactcgctggtgaaggtggcccccaagaggccgcccaagagattcggctgttgctcctgatcacctgtcctgtcctgggtaggatggacacccatggggtttcctgtccctcagctcctgtcctttgttcctggacagcaacgacacagaggaccagcttggaggttcaggaaaacccttctcaactcaggactcggatcccagagcagggccgcatcacctctgcctttcacactccaaaggagggctttgctgagtgaacaaggcttgaggggcaggggtatggcaaaactctccaaacaaagaaagtctagaaaaacgacttaaggaaaatacaccaaaatattggccgcacatctgtgggtgtaaaattttagggagaatgtggggggggtggggtgttactttccattttacacatatttgtattttcagattttcaacaataacagtattcaatacataatcagaaaaaagagatgtggaggaggaggagagaaacttcccaaggagctcccttgggtgctgctggctcctaattagtgtaacctgttaatcacatgttgctcggtgttagagcggtccctctgtgctctgcctggcagggcgctgttggcctggtctccctcactatttctatttgcaagcatgggctttcttcccagcagaatctggttcctgggaagagtaatgttccaaaggcctctgatatgcctcgatgccctcctgtcttccagagccccaacctcactccctttccccaccatacaaaacacacctcccaggggtcacatttgggggtcccgccccctgctccaatgccatggtgtccccaagcacagggctttggcctgagttgtcagtctctggatgcatttgaggggcagctagggtgtggctggggggtccaagcagctggggagccgagactcagaatcattcacacacttctatttggagcttttgtggaagtttccagaattccataatattcacctcctgaatggtggctgccccttatcagccagggctggggtttccagtgccctcggagagcttgctttagagtcttggagagacggccatggtctgcgtttgtatgtctgtcacatcttaccatcatcacaaattgaatatacaacatgtgccaggc

SEQ ID NO: 231 - protein, 99 aa, Homo sapiens
MTRQLLRKADGVVLMYDITSQESFAHVRYWLDCLQDAGSDGVVILLLGNKMDCEEERQVSVEAGQQLAQELGVYFGECSAALGHNIPVVNLARSLQDLV

SEQ ID NO: 232 - DNA, 2379 bp, Homo sapiens
tgatcctcctgaccgcaagtgatcctcctgcctcagcctcccaaagtgctgggattacaggcgtgagccaccgtgcccagcccgatagggaaatttctccaagacatcctgttaactggaaaaaaacaaaatgcagaacactgaatattaatgagtatgatgaatgttttacactgtatttgtataaaatagagggggaaagatgtatgtgtatgggtgtatatatgtgtgtgtatatatatgtatatacgtaaaatgcctctggaaaaatatttaagaaactgataaccctggttgcctctggggagggggactgggtggctccaggatggggcagaaggaaggagacttttcattgagttctccttgagaccttttgaaatttgagccatgagaactgttacctagtcaacaataactacactgtacgaagaaaagcatacggacatgctctgtgggaagcaattagaagtaggataggttacttctcccactttgcagaggccagggcctggggtctggatgcctggtgtggcctcatgcagactctctgggcaggtaccacagtatgacgcgacagctgctccgcaaggctgacggggtggtgctcatgtacgacatcacctcccaggagagctttgcccacgtgcgctactggctagactgtctccaggatgcagggtcggatggggtggtcatccttctcctgggaaacaagatggactgtgaggaggaacggcaagtgtccgtggaagctgggcagcaactggcccaggaactgggggtctattttggggagtgcagtgccgccttgggtcacaacatcctggagcctgtagtaaacctggccagatccctccaggacctggtgtgaagtccctgtgtgcctccccatcattcccgggctgcagtcaccccttttcctgtctgtctctctcactactcaagggagggaatggtggcttctttgtcatagtcagagtcctgcacagtgcctggcacatagtaggccagaaagagaaggtcaaagtctcagtgactcaattcttcgggtctcatgtggaatgcagggcaggggcagagctgttgtgggggttgtgggtgcggcctcccaccccccagctgcacccatgggcccatccgtgctgcccgtaggaggtgagagagaggcctgatgcctggcactgtcacataggtcactcaggatgcaagaagaaggcctgaaggactcgctggtgaaggtggcccccaagaggccgcccaagagattcggctgttgctcctgatcacctgtcctgtcctgggtaggatggacacccatggggtttcctgtccctcagctcctgtcctttgttcctggacagcaacgacacagaggaccagcttggaggttcaggaaaacccttctcaactcaggactcggatcccagagcagggccgcatcacctctgcctttcacactccaaaggagggctttgctgagtgaacaaggcttgaggggcaggggtatggcaaaactctccaaacaaagaaagtctagaaaaacgacttaaggaaaatacaccaaaatattggccgcacatctgtgggtgtaaaattttagggagaatgtggggggggtggggtgttactttccattttacacatatttgtattttcagattttcaacaataacagtattcaatacataatcagaaaaaagagatgtggaggaggaggagagaaacttcccaaggagctcccttgggtgctgctggctcctaattagtgtaacctgttaatcacatgttgctcggtgttagagcggtccctctgtgctctgcctggcagggcgctgttggcctggtctccctcactatttctatttgcaagcatgggctttcttcccagcagaatctggttcctgggaagagtaatgttccaaaggcctctgatatgcctcgatgccctcctgtcttccagagccccaacctcactccctttccccaccatacaaaacacacctcccaggggtcacatttgggggtcccgccccctgctccaatgccatggtgtccccaagcacagggctttggcctgagttgtcagtctctggatgcatttgaggggcagctagggtgtggctggggggtccaagcagctggggagccgagactcagaatcattcacacacttctatttggagcttttgtggaagtttccagaattccataatattcacctcctgaatggtggctgccccttatcagccagggctggggtttccagtgccctcggagagcttgctttagagtcttggagagacggccatggtctgcgtttgtatgtctgtcacatcttaccatcatcacaaattgaatatacaacatgtgccaggc

SEQ ID NO: 233 - protein, 99 aa, Homo sapiens; identical to SEQ ID NO: 231

SEQ ID NO: 234 - DNA, 3984 bp, Homo sapiens
atggagactggacagagaacatctcgaaaagtccggaagctgggctccaaccggcggcggcagacaagagagccagctgatggtgaaggcgctgcagtggccccagagccagagtcttggtcctctcaggcagcggcagaactgcaggccttcttccaggactgtggtgccaaggagaggggctttgtcacccgcgaggacctggcggtggccaagttcagcttcctgggcagcaaggaagagtcagagatgatcttcgactgggtggatgtggagcggaagggacacctgtcccttgaagaattcagctctggactcaaaaacatctttggctccagccagagcccccacaggctccgcagaaggaagccactgccctctaagcgggtatctgctaccaccagcttcccagctctggaggaggcggatgctgaggagaaggaggcgttccttgccttcatggagcagctggggactggacacttacttcccaagcagatggaaatctggcaactgtgggggcagctgcggcaggaggagccccagctggcaggcaacctggcaggctttctggccaagatgaccagccgcctgcaggaggcccaggcggacaaggaggccctggagctgaccctgaggaagcgtgactctgaccaccaccgcgaggtccagcagctctatgaggagatggagcagcagatccgccaggagaagcagcagctgcaggctgagagtgactctcggggcctggccctcacctcccagatgcaggacgtcctagaggccaaggagcgcgaggtgcagcgactagctgagggccagagggagctggaggcccagctctcccacctcaggagcacacatcaggaggctgcctcagagaaccagcagctgcaggaggccaagcgtgacctggctgggcggctggaggaggtgcgggggcagctgcaggtgaccagggggcgcctggacgccgccaggggccgggtgtcctggcaggtggaggagaaactgaggcaagtggctgctatccctggactgggttttcctggagcgggtgagaagaccccagaccctcaggctgcctcccctgaggaggcccccctgcctgggctatttggggacaacgatgactgggaccagctcctgagcaactttggcagccctccgcacggagccctgcagctctgctggagcccgcccccgaccccaagagccacctcaggcccccagacaccccgtgtggtcaggcagatctccatctcggagccacaggcttttctatttggtcaggagccatcttcagatccagatggggctccaaggaccccacctggggtgactttcagcgccaaggacaataaaggagtggacccacatgagcaggacattagagcagagcagcctgttgaaccgcacgacccggaccccaaccaggagccagggtccacacccgagggccgcctcctctggggtctctcaggaagcctggtggcacctgcattcaaagtgctcattcctttggaggatgggccccctccccctgcgaactctccccctccccaggccccagctgggtccagcaaacagatccaggcctcagacccagatgacaagggccctgggtcttgggctcctcccagcggggctcagcctggggctggagcaggaccccaggaacccacacaaacccctcccaccatgactgagcgggaaacccagcccggaccctcacccacaactgctctcacaggagtgggcccagccaagccgcccaggcagagagatgccctccagcaggacctgcatgccactggctctgagccaagactggggacccagagggctagagccctcaccctggggccagctgagcccttccagggcctggaatttgtgggtccggtgcccacagagaggctggagcagggccaggcgggcccagcggtgcaggagggccttcctgaggggctaagagaagctcatggccaggtccttgggctgggtgagctgtctgccttcccccaccaggagctggaagaggaacccaggtctgaggaaggaaaacaagagggccgaggtgggcaggacctcagttcagagcagtcagagcagtcggttgaggctcacggcctagaaactgcgcattcggaactcccccagcaagactctctgcttgtttctctcccatctgccacaccacaggctcaggtggaagcagaaggccccactcctggaaaatcggcacctccaaggggctctcctcccaggggggctcagcctggggctggagcaggaccccaggaacccacgcaaacccctcccaccatggctgagcaggaagcccaacccaggccatccctcacgactgctcacgcagaagaacaaggcccgcctcactccagggaaccaagggcagagagcaggcttgaagatccaggaatggactccagggaagctgggctgaccccatccccgggagaccccatggctggagggggaccccaggccaaccctgattacctcttccatgtcatctttctgggagactccaacgtgggcaaaacatccttcctgcacctgctgcaccagaattctttcgccaccggattgacagctaccgtgggagtagattttcgggtcaaaaccttgctggtggacaacaagtgctttgtgctgcagctctgggacacagctggccaagagaggtaccacagtatgacgcgacagctgctccgcaaggctgacggggtggtgctcatgtacgacatcacctcccaggagagctttgcccacgtgcgctactggctagactgtctccaggatgcagggtcggatggggtggtcatccttctcctgggaaacaagatggactgtgaggaggaacggcaagtgtccgtggaagctgggcagcaactggcccaggaactgggggtctattttggggagtgcagtgccgccttgggtcacaacatcctggagcctgtagtaaacctggccagttctgaaaggaacgtctcagcagcagtgagccttccatcaccagaggcgcacaagaagacaggcaactcaggttcgcaggaggtggagttctgggaggaactccacactgcccagcaccctcttttggctttcttgggccggatccacctgctgggcagggcacagctgtgcaaggaccaccagcctttcctgctgtcaaagggctcacaagccagggaacaggacccaggaacctcagagcagcacaaagtaggcaacgacagcagcaggagaaacttgagaatggagcccaatgctacgttcaccatgcagctcacggccacacctgagcgactgctccgactcatctctgctggggtctgtggcctcatcctgctggtggggctgtcagctaatgggctcatgctgctggtggtgggccggggcccgggctccccccacccgctccactccctgacccacagcctcatgatgaacatcacgccatctgacctgctcttcctggcctgcgtggtgcctgtgctgctgctgagcttcctgcagcacaactggtggctgggccctgccatctgcaccattagccaggccaccaacacagccaccacgttctgcatcttctatagcatggtggccacagctctcctgcgccatgtggctgtggcccggcctgacctggccttcccagccggctggggcacccgcttgctgctctgtggggccatgtgggccctgggccttacagaatccctgcccaactggctgttccagagggtggcagtggaggaggagacagcgggggctcccaagacccaggcctgcctcttgctcctgagccctgctgggacctcctgctacatcagcctgctgggagccctggccttcctgccatgcacgctggggctgggctgctctttcagccacgtgggctggctcctgtggacccagccccaaggtcccatgggagagagcatccaggagcat

SEQ ID NO: 235 - protein, 1314 aa, Homo sapiens
MGQRTSRKVRKLGSNRRRQTREPADGEGAAVAPEPESWSSQAAAELQAFFQDCGAKERGFVTREDLAVAKFSFLGSKEESEMIFDWVDVERKGHLSLEEFSSGLKNIFGSSQSPHRLRRRKPLPSKRVSATTSFPALEEADAEEKEAFLAFMEQLGTGHLLPKQMEIWQLWGQLRQEEPQLAGNLAGFLAKMTSRLQEAQADKEALELTLRKRDSDHHREVQQLYEEMEQQIRQEKQQLQAESDSRGLALTSQMQDVLEAKEREVQRLAEGQRELEAQLSHLRSTHQEAASENQQLQEAKRDLAGRLEEVRGQLQVTRGRLDARRVSWQVEEKLRQVAAIPGLGFPGAGEKTPDPQADEEAPLPGLFGDNDDWDQLLSNFGSPPHGALQLCWSPPPTPRATSGPQTPRVVRQISISEPQAFLFGQEPSSDPDGAPRTPPGVTFSAKDNKGVDFQDIRAEQPVEPHDPDPNQEPGSTPEGRLLWGLSGSLVAPAFKVLIPLEDGPPPPANSPPPQAPAGSSKQIQASDPDDKGPGSWAPPSGAQPGAGAGPQEPTQTPPTMTERETQPGPSPTTALTGVGPAKPPRQRDALQQDLHATGSEPRLGTQRARALTLGPAEPFQGLEFVGPVPTERLEQGQAGPAVQEGLPEGLREAHGQVLGLGELSAFPHQELEEEPRSEEGKQEGRGGQDLSSEQSEQSVEAHGLETAHSELPQQDSLLVSLPSATPQAQVEAEGPTPGKSAPPRGSPPRGAQPGAGAGPQEPTQTPPTMAEQEAQPRPSLTTAHAEEQGPPHSREPRAESRLEDPGMDSREAGLTPSPGDPMAGGGPQANPDYLFHVIFLGDSNVGKTSFLHLLHQNSFATGLTATVGVDFRVKTLLVDNKCFVLQLWDTAGQERYHSMTRQLLRKADGVVLMYDITSQESFAHVRYWLDCLQDAGSDGVVILLLGNKMDCEEERQVSVEAGQQLAQELGVYFGECSAALGHNIPVVNLASSNVSAAVSLPSPEAHKKTGNSGSQEVEFWEELHTAQHPLLAFLGRIHLLGRAQLCKDHQPFLLSKGSQAREQDPGTSEQHKVGNDSSRRNLRMEPNATFTMQLTATPERLLRLISAGVCGLILLVGLSANGLMLLVVGRGPGSPHPLHSLTHSLMMNITPSDLLFLACVVPVLLLSFLQHNWWLGPAICTISQATNTATTFCIFYSMVATALLRHVAVARPDLAFPAGWGTRLLLCGAMWALGLTESLPNWLFQRVAVEEETAGAPKTQACLLLLSPAGTSCYISLLGAFLPCTLGLGCSFSHVGWLLWTQPQGPMGESIQEH

SEQ ID NO: 236 - DNA, 3325 bp, Mus musculus
ccaaaaaccttaattttctttcttgttcggtacctacattggaaccatcaaaaacaattatttcagtaaaccgtagccatgagggaaatcgtgcacatccaggccggacagtgtggcaaccagatcggtgctaaggtaaggactttaaaattttagctgaaatatgtaaagatgagaattctgtgttaattgtgagcattgttcacggagttcttgcattctccacccgtcagatttggcccctcaaagtttttcacgtataaatataacccatatttgtagctagcgttctgatattgaaaaatgaggaaatgtttttcttggcacattttcggaaagctaataaaagagcctttcgagtttagggaaaaggagaggctgagggactgtgaagagctggtcttaaaaggggttttctaacggttcgaggactggagggatgcggaaacgatccgagacaaagccgaggcgaggttttccccttgcgccacccccacccagcctggagggctctactggaacagaatggaggggggaaggggcgaggtttggcgggcagctgcagaggtgcccggtgcgcattacctctcaacaaaggcttggacactccatcgaacccgccatcccaatgctttttttaggtaatgactctgtataggggcctacttttacttttcattgccctttagggtgtgagcggtatgaaagtgagcttttcaaatatgtgagactgtctgggagactaaggagagggaaggaagggaataaagataggcaatggggctttttaaagatttttcccccttttttgctagcaattaacaatgtagcgggggaggggagggaggaagtgcggccgctaaattgtagccgaagggtgggaccctttgggggcggggttggagcccctggcgcgcagggacaatgcggcccctacccgcgggggcgcactggccccgcccctcgagctaggccccgcccgcgctgctcccgcctttgtggtttgctggaggagcggcccgccaccgcagtcacgtggagcacgtaaggggtgggcgactgcagtggccgcacctttctcccccaactcttttgtgctggcctggaagggcggttcctggcttcaggagccaacctgggtgcaaagccaaataggtgggctccaatccgcccacatagaggtttatagcgcctgacccacccatcaccggtcctatgccgaaaggttttagccttccatcgcgtaggttcctccatgggacttccgcaagcagataacggaattgcagtgtcttcacctcagcctcgtttcagcgtgtctggaattgaaatgaggggcgggaggcatgccttaggacttgagacattgaggcctcgttgctcttccctgtgcagttctgggaggtgataagcgatgaacatggcatcgaccccaccggtacctaccacggtgacagcgacctgcagctggaccgaatctctgtgtactataatgaagccacaggtgagggcagaaatccccacttaacatttattccctgtcccctgtattggacagtgagcccagatgaatgcatcactggctgccctggaactcccatagatcgtctacctctcaagtgctgggtttaaggagagcatcaccacgccctgtttttccacacttctaagtatctattacccctctgcatggttcccatttttttttccctagactcacaccctaagggactaaagattagctctactgccaccaggtggtagtgcctggaatgacaactttagtgctttgtggctgatctcccacccagaggtaatgcattgctgatccgtcaaacattgacttgaattcctgcaggtggcaagtatgtccctcgagctatcttggtggatctagaacctgggactatggactccgttcgctcaggtccttttggccagatcttcagaccagacaacttcgttttcggtgagttaggtggaatcgatttctatttgctcaactgaattattccagtcgttgaaagattaagaagtatttgtgtttctctcatatcttagtgattaaaccttttcccttactgcattccaggtcagtctggggcaggcaacaactgggctaaaggccactacacagagggagctgagttggttgactctgtcttggatgtggtgcggaaggaggcggagagctgtgattgcctgcaaggctttcagctgacccactcactgggtggaggcactggctctggcatgggcaccctgctcatcagcaagatccgggaagaatatcctgaccgtatcatgaataccttcagtgtggtgccctcgcccaaagtgtctgataccgtggtcgagccctacaatgccaccctgtctgtccatcagttggttgagaacacggatgagacctactgcatcgacaacgaggccctctacgacatctgcttccgtaccctcaagctcaccacgccaacctacggagacctgaaccatctcgtctcggccaccatgagcggcgtcaccacctgcctccgtttcccgggccagcttaatgctgaccttcgaaagctggctgtcaacatggtgccattcccacgtctccacttcttcatgcctggctttgcccctctcaccagccgtggaagccagcagtaccgggccctcactgtgcctgaacttacccagcaggtcttcgatgccaagaacatgatggccgcctgcgacccgcgccacggccggtacctcacagttgccgccgtcttccgtggacggatgtccatgaaggaggtggatgagcagatgctcaacgtgcagaacaagaatagcagctacttcgtggaatggatccccaacaatgtcaagacagctgtctgtgacatcccaccgcgtggcctcaagatggcagtcaccttcattggaaacagcacagccatccaggagctcttcaagcgcatctctgagcagtttacggctatgttccgccggaaggctttcctccactggtatacgggtgagggcatggacgagatggagttcaccgaagctgagagcaacatgaacgacctcgtctctgagtaccagcagtaccaggatgccaccgcggaagaggaagaggatttcggagaggaggcagaagaggaggcctaaggcagagagccctgcatcagctcaggctgcttagatccctcagctttctccaactgccctttgtcctccagtttctttctgctgcctctgtcttgtatttgttttgttctgttttctcattgggggtaaatggtgcctggcacatggcaggcactcaataaatatttgtttgtgg

SEQ ID NO: 237 - DNA, 1588 bp, Mus musculus
ccaaaaaccttaattttctttcttgttcggtacctacattggaaccatcaaaaacaattatttcagtaaaccgtagccatgagggaaatcgtgcacatccaggccggacagtgtggcaaccagatcggtgctaagttctgggaggtgataagcgatgaacatggcatcgaccccaccggtacctaccacggtgacagcgacctgcagctggaccgaatctctgtgtactataatgaagccacaggtggcaagtatgtccctcgagctatcttggtggatctagaacctgggactatggactccgttcgctcaggtccttttggccagatcttcagaccagacaacttcgttttcggtcagtctggggcaggcaacaactgggctaaaggccactacacagagggagctgagttggttgactctgtcttggatgtggtgcggaaggaggcggagagctgtgattgcctgcaaggctttcagctgacccactcactgggtggaggcactggctctggcatgggcaccctgctcatcagcaagatccgggaagaatatcctgaccgtatcatgaataccttcagtgtggtgccctcgcccaaagtgtctgataccgtggtcgagccctacaatgccaccctgtctgtccatcagttggttgagaacacggatgagacctactgcatcgacaacgaggccctctacgacatctgcttccgtaccctcaagctcaccacgccaacctacggagacctgaaccatctcgtctcggccaccatgagcggcgtcaccacctgcctccgtttcccgggccagcttaatgctgaccttcgaaagctggctgtcaacatggtgccattcccacgtctccacttcttcatgcctggctttgcccctctcaccagccgtggaagccagcagtaccgggccctcactgtgcctgaacttacccagcaggtcttcgatgccaagaacatgatggccgcctgcgacccgcgccacggccggtacctcacagttgccgccgtcttccgtggacggatgtccatgaaggaggtggatgagcagatgctcaacgtgcagaacaagaatagcagctacttcgtggaatggatccccaacaatgtcaagacagctgtctgtgacatcccaccgcgtggcctcaagatggcagtcaccttcattggaaacagcacagccatccaggagctcttcaagcgcatctctgagcagtttacggctatgttccgccggaaggctttcctccactggtatacgggtgagggcatggacgagatggagttcaccgaagctgagagcaacatgaacgacctcgtctctgagtaccagcagtaccaggatgccaccgcggaagaggaagaggatttcggagaggaggcagaagaggaggcctaaggcagagagccctgcatcagctcaggctgcttagatccctcagctttctccaactgccctttgtcctccagtttctttctgctgcctctgtcttgtatttgttttgttctgttttctcattgggggtaaatggtgcctggcacatggcaggcactcaataaatatttgtttgtgg

SEQ ID NO: 238 - protein, 447 aa, Mus musculus
TVAMREIVHIQAGQCGNQIGAKFWEVISDEHGIDPTGTYHGDSDLQLDRISVYYNEATGGKYVPRAILVDLEPGTMDSVRSGPFGQIFRPDNFVFGQSGAGNNWAKGHYTEGAELVDSVLDVVRKEAESCDCLQGFQLTHSLGGGTGSGMGTLLISKIREEYPDRIMNTFSVVPSPKVSDTVVEPYNATLSVHQLVENTDETYCIDNEALYDICFRTLKLTTPTYGDLNHLVSATMSGVTTCLRFPGQLNADLRKLAVNMVPFPRLHFFMPGFAPLTSRGSQQYRALTVPELTQQVFDAKNMMAACDPRHGRYLTVAAVFRGRMSMKEVDEQMLNVQNKNSSYFVEWIPNNVKTAVCDIPPRGLKMAVTFIGNSTAIQELFKRISEQFTAMFRRKAFLHWYTGEGMDEMEFTEAESNMNDLVSEYQQYQDATAEEEEDFGEEAEEEA

SEQ ID NO: 239 - DNA, 5136 bp, Homo sapiens
cccggcgcacgcgcgccccgcccagcctgctttccctccgcgccctcccctctcctttctccctctcagaaccttcctgccgtcgcgtttgcacctcgctgctccagcctctggggcgcattccaaccttccagcctgcgacctgcggagaaaaaaaattacttattttcttgccccatacataccttgaggcgagcaaaaaaattaaattttaaccatgagggaaatcgtgcacatccaggctggtcagtgtggcaaccagatcggtgccaaggtaagaattttacacctcttttatttctttttacaaggaaaaatccaggtaagttatgaaaaaatggttgtggggcatttgcacccgctatccttaatcaagatttgcccctctcaagtttgttacatttatatatataacaattgtagctagcatttgcctttggaaagctgggaatcatttttcttggcaggcacattttggagaaactagtaaaagggctcttcgggtttgggggcgggaagaccgaggacttataagatgttacttaaaagggcttctaacggtccgagaaccgggcagggagagagatgcggaaacggtcgcagacaaagcggggcgaggttttgcccatgtgcatcccgcccaacccccctgcggggtacttagggccaaaccggagcgggaaggggtgaggccatcgggcggctgcagagagctccagcgcaagggtggggggcgatgcgccagggtgggctgcgctgggcgctacctttcacaaaagaccagggaccccaacgcgcccgcgaccccagagggccggtcctgtatttgttcctgggtggaaggagaataagaacgggattaattttacttgctttcatggcccctaagagagacttttttagggcgtgaacagatatgtcgagaaaatgggggtgtgtggttttctttaatgagtccctcaggacttaatgggagagaaagaatcctttaaatcaaggggtagaaatgtagcgaaggaataaaaattccgaggccaagggggattttttttttttgcgcgcggttacagtgtagcgggggaggggcgggaggaagtgcggctgctacgttgtagcagaagggcggggccctgcggggcggggccggggcgccgtgggcgcgcggggacaatgcggcgttgcccgccggcaggggcgcgctaccttgggccccgcccctcgcgcgcggaatttttgtccctggccccgcccacgcgcgaagtcttttgtcggcggctcgacctgcgcgtgcgccgcagtcacgtggagggcggggggggtggtcgactgcggcggcagctctttcctcagacccccagccttttgtgcgccgcgcggtggggcggtgcccagcttgggggaaggagagcggcgcttatcgaagtgtggtcgacctccatccgcccaccgagcacttgggacccgctgcacatatccagagcagggaaagctgtggctttctcgggggagcgagtgtctaggggaagggtgtggcaggcccacgggatgccatgccctagaacaacggcctgagcgcttgtggaattaaaatgggagatgtggggccgaggtgggcgaattgggatccctccaggtcaggggttcgagaccatcctgggcaacaaagcgagaccctcccccatgccacgtttctacaaaaaataaaagtaaaaaattagctgggcgtggtggcgcgcgtctgtggtcccagctactcgagaggctgagatgggaggatcggttgagcctgggagttccacgctgtagtcatccgtgattgcaccactgcactgcaggctgggcaacaggaagaccctgtcttaaaaattagaagaagctgggcgcggtggctcacccttgtaatcccagcactttgggaggccaaggtgggcggatcacgaggtcaagagatctagaccatcctggccaacatggtgaaacccgtctctactaaaaatacaaaaagtagctgggcgtgttggtgcgcgcctatagtcccagctactccgggggctgaggcaggagaatcgcttgaacccgggaagcagaggttgcagtgagccgagatagcgccactgcactccagcctggtgacagagcgagactccgtctcaaaaaaaattaagaaaaagatgaaataaaatggtagttggggacatagttggctgggacttgacctgttgtggtctcgttgctccccctcggcagttctgggaggtgatcagtgatgaacatggcatcgaccccaccggcacctaccacggggacagcgacctgcagctggaccgcatctctgtgtactacaatgaagccacaggtaagggcaggagcccgggcagctcaggttcccttccctgtctcccacttatctgggatctctttccatttctgggcacgccttatcccctttgggtgaatctgtcattttgtccctttcgtgaaccaccgtcggggccaaagacgtctgctgccacctggtggcgggacctggaatgacaagtctctgatccctgctgtctcccatttccagtatatctataaaccttcccttctgccagatttcacagctcttaactttattctctgtaggtggcaaatatgttcctcgtgccatcctggtggatctagaacctgggaccatggactctgttcgctcaggtccttttggccagatctttagaccagacaactttgtatttggtgagttatacagatgatattagcagatgatataccatcgtgttcaacttatttgggtgcaaggacacagcaaaagttaggagatgattgttgtattggagtgctaatacagaaatgtgttctgaaatctaacggagggtagaggtagtgcctactattgctggtaaattatggggcagtagggggagaatatatcacagtgaaggagaaagaagatacatccgagggaattatttgaaaagttgaaagatggaaacatcatgtatcttccataccctgttaattgagcttttctcctgactgcattccaggtcagtctggggcaggtaacaactgggccaaaggccactacacagagggcgccgagctggttgattctgtcctggatgtggtacggaaggaggcagagagctgtgactgcctgcagggcttccagctgacccactcactgggcgggggcacaggctctggaatgggcactctccttatcagcaagatccgagaagaataccctgatcgcatcatgaataccttcagtgtggtgccttcacccaaagtgtctgacaccgtggtcgagccctacaatgccaccctctccgtccatcagttggtagagaatactgatgagacctattgcattgacaacgaggccctctatgatatctgcttccgcactctgaagctgaccacaccaacctacggggatctgaaccaccttgtctcagccaccatgagtggtgtcaccacctgcctccgtttccctggccagctcaatgctgacctccgcaagttggcagtcaacatggtccccttcccacgtctccatttctttatgcctggctttgcccctctcaccagccgtggaagccagcagtatcgagctctcacagtgccggaactcacccagcaggtcttcgatgccaagaacatgatggctgcctgtgacccccgccacggccgatacctcaccgtggctgctgtcttccgtggtcggatgtccatgaaggaggtcgatgagcagatgcttaacgtgcagaacaagaacagcagctactttgtggaatggatccccaacaatgtcaagacagccgtctgtgacatcccacctcgtggcctcaagatggcagtcaccttcattggcaatagcacagccatccaggagctcttcaagcgcatctcggagcagttcactgccatgttccgccggaaggccttcctccactggtacacaggcgagggcatggacgagatggagttcaccgaggctgagagcaacatgaacgacctcgtctctgagtatcagcagtaccaggatgccaccgcagaagaggaggaggatttcggtgaggaggccgaagaggaggcctaaggcagagcccccatcacctcaggcttctcagttcccttagccgtcttactcaactgcccctttcctctccctcagaatttgtgtttgctgcctctatcttgttttttgttttttcttctggggggggtctagaacagtgcctggcacatagtaggcgctcaataaatacttgtttgttgaatgtctcctctctctttccactctgggaaacctaggtttctgccattctgggtgaccctgtatttctttctggtgcccattccatttgtccagttaatacttcctcttaaaaatctccaagaagctgggtctccagatcccatttagaaccaaccaggtgctgaaaacacatgtagataatggccatcatcctaagcccaaagtagaaaatggtagaaggtagtgggtagaagtcactatataaggaaggggatgggattttccattctaaaagttttggagagggaaatccaggctattaaagtcactaaatttctaagtatgtccatttcccatctcagcttcaagggaggtgtcagcagtattatctccactttcaatctccctccaagctctactctggaggagtctgtcccactctgtcaagtggaatccttccctttccaactctacctccctcactcagctcctttcccctgatcagagaaagggatcaagggggttgggaggggggaaagagaccagccttggtccctaagcctccagaaacgtcttcttaatccccaccttttcttactcccaaaaaagaatgaacacccctgactctggagtggtgtatactgccacatcagtgtttgagtcagtccccagaggagaggggaaccctcctccatcttttttgcaacatctcatttcttccttttgctgttgcttcccccctcacacacttggttttgttctatcctacatttgagatttctattttatgttgaacttgctgctttttttcatattgaaaagatgacatcgccccaagagccaaaaataaatgggaattgaaaaaagct

SEQ ID NO: 240 - DNA, 1561 bp, Homo sapiens
atgagggaaatcgtgcacatccaggctggtcagtgtggcaaccagatcggtgcctgtctgacaccgtggtcgagccctacaatgccaccctctccgtccatcagttggtagagaatactgatgagacctattgcattgacaacgaggccctctatgatatctgcttccgcactctgaagctgaccacaccaacctacggggatctgaaccaccttgtctcagccaccatgagtggtgtcaccacctgcctccgtttccctggccagctcaatgctgacctccgcaagttggcagtcaacatggtccccttcccacgtctccatttctttatgcctggctttgcccctctcaccagccgtggaagccagcagtatcgagctctcacagtgccggaactcacccagcaggtcttcgatgccaagaacatgatggctgcctgtgacccccgccacggccgatacctcaccgtggctgctgtcttccgtggtcggatgtccatgaaggaggtcgatgagcagatgcttaacgtgcagaacaagaacagcagctactttgtggaatggatccccaacaatgtcaagacagccgtctgtgacatcccacctcgtggcctcaagatggcagtcaccttcattggcaatagcacagccatccaggagctcttcaagcgcatctcggagcagttcactgccatgttccgccggaaggccttcctccactggtacacaggcgagggcatggacgagatggagttcaccgaggctgagagcaacatgaacgacctcgtctctgagtatcagcagtaccaggatgccaccgcagaagaggaggaggatttcggtgaggaggccgaagaggaggcctaaggcagagcccccatcacctcaggcttctcagttcccttagccgtcttactcaactgcccctttcctctccctcagaatttgtgtttgctgctggggggggtctagaacagtgcctggcacatagtaggcgctcaataaatacttgtttgttgaatgtctcctctctctttccactctgggaaacctaggtttctgccattctgggtgaccctgtatttctttctggtgcccattccatttgtccagttaatacttcctcttaaaaatctccaagaagctgggtctccagatcccatttagaaccaaccaggtgctgaaaacacatgtagataatggccatcatcctaagcccaaagtagaaaatggtagaaggtagtgggcaagtggaatccttccctttccaactctacctccctcactcagctcctttcccctgatcagagaaagggatcaagggggttgggaggggggaaagagaccagccttggtccctaagcctccagaaacgtcttcttaatccccaccttttcttactcccaaaaaagaatgaacacccctgactctggagtggtgtatactgccacatcagtgtttgagtcagtccccagaggagaggggaaccctcctccatcttttttgcaacatctcatttcttccttttgctgttgcttcccccctcacacacttggttttgt

SEQ ID NO: 241 - protein, 212 aa, Homo sapiens
MSGVTTCLRFPGQLNADLRKLAVNMVPFPRLHFFMPGFAPLTSRGSQQYRALTVPELTQQVFDAKNMMAACDPRHGRYLTVAAVFRGRMSMKEVDEQMLNVQNKNSSYFVEWIPNNVKTAVCDIPPRGLKMAVTFIGNSTAIQELFKRISEQFTAMFRRKAFLHWYTGEGMDEMEFTEAESNMNDLVSEYQQYQDATAEEEEDFGEEAEEEA

SEQ ID NO: 242 - DNA, 2247 bp, Homo sapiens
cccggcgcacgcgcgccccgcccagcctgctttccctccgcgccctcccctctcctttctccctctcagaaccttcctgccgtcgcgtttgcacctcgctgctccagcctctggggcgcattccaaccttccagcctgcgacctgcggagaaaaaaaattacttattttcttgccccatacataccttgaggcgagcaaaaaaattaaattttaaccatgagggaaatcgtgcacatccaggctggtcagtgtggcaaccagatcggtgccaagttctgggaggtgatcagtgatgaacatggcatcgaccccaccggcacctaccacggggacagcgacctgcagctggaccgcatctctgtgtactacaatgaagccacaggtggcaaatatgttcctcgtgccatcctggtggatctagaacctgggaccatggactctgttcgctcaggtccttttggccagatctttagaccagacaactttgtatttggtcagtctggggcaggtaacaactgggccaaaggccactacacagagggcgccgagctggttgattctgtcctggatgtggtacggaaggaggcagagagctgtgactgcctgcagggcttccagctgacccactcactgggcgggggcacaggctctggaatgggcactctccttatcagcaagatccgagaagaataccctgatcgcatcatgaataccttcagtgtggtgccttcacccaaagtgtctgacaccgtggtcgagccctacaatgccaccctctccgtccatcagttggtagagaatactgatgagacctattgcattgacaacgaggccctctatgatatctgcttccgcactctgaagctgaccacaccaacctacggggatctgaaccaccttgtctcagccaccatgagtggtgtcaccacctgcctccgtttccctggccagctcaatgctgacctccgcaagttggcagtcaacatggtccccttcccacgtctccatttctttatgcctggctttgcccctctcaccagccgtggaagccagcagtatcgagctctcacagtgccggaactcacccagcaggtcttcgatgccaagaacatgatggctgcctgtgacccccgccacggccgatacctcaccgtggctgctgtcttccgtggtcggatgtccatgaaggaggtcgatgagcagatgcttaacgtgcagaacaagaacagcagctactttgtggaatggatccccaacaatgtcaagacagccgtctgtgacatcccacctcgtggcctcaagatggcagtcaccttcattggcaatagcacagccatccaggagctcttcaagcgcatctcggagcagttcactgccatgttccgccggaaggccttcctccactggtacacaggcgagggcatggacgagatggagttcaccgaggctgagagcaacatgaacgacctcgtctctgagtatcagcagtaccaggatgccaccgcagaagaggaggaggatttcggtgaggaggccgaagaggaggcctaaggcagagcccccatcacctcaggcttctcagttcccttagccgtcttactcaactgcccctttcctctccctcagaatttgtgtttgctgctggggggggtctagaacagtgcctggcacatagtaggcgctcaataaatacttgtttgttgaatgtctcctctctctttccactctgggaaacctaggtttctgccattctgggtgaccctgtatttctttctggtgcccattccatttgtccagttaatacttcctcttaaaaatctccaagaagctgggtctccagatcccatttagaaccaaccaggtgctgaaaacacatgtagataatggccatcatcctaagcccaaagtagaaaatggtagaaggtagtgggcaagtggaatccttccctttccaactctacctccctcactcagctcctttcccctgatcagagaaagggatcaagggggttgggaggggggaaagagaccagccttggtccctaagcctccagaaacgtcttcttaatccccaccttttcttactcccaaaaaagaatgaacacccctgactctggagtggtgtatactgccacatcagtgtttgagtcagtccccagaggagaggggaaccctcctccatcttttttgcaacatctcatttcttccttttgctgttgcttcccccctcacacacttggttttgt

SEQ ID NO: 243 - protein, 444 aa, Homo sapiens
MREIVHIQAGQCGNQIGAKFWEVISDEHGIDPTGTYHGDSDLQLDRISVYYNEATGGKYVPRAILVDLEPGTMDSVRSGPFGQIFRPDNFVFGQSGAGNNWAKGHYTEGAELVDSVLDVVRKEAESCDCLQGFQLTHSLGGGTGSGMGTLLISKIREEYPDRIMNTFSVVPSPKVSDTVVEPYNATLSVHQLVENTDETYCIDNEALYDICFRTLKLTTPTYGDLNHLVSATMSGVTTCLRFPGQLNADLRKLAVNMVPFPRLHFFMPGFAPLTSRGSQQYRALTVPELTQQVFDAKNMMAACDPRHGRYLTVAAVFRGRMSMKEVDEQMLNVQNKNSSYFVEWIPNNVKTAVCDIPPRGLKMAVTFIGNSTAIQELFKRISEQFTAMFRRKAFLHWYTGEGMDEMEFTEAESNMNDLVSEYQQYQDATAEEEEDFGEEAEEEA

SEQ ID NO: 244 - DNA, 2580 bp, Homo sapiens
cccggcgcacgcgcgccccgcccagcctgctttccctccgcgccctcccctctcctttctccctctcagaaccttcctgccgtcgcgtttgcacctcgctgctccagcctctggggcgcattccaaccttccagcctgcgacctgcggagaaaaaaaattacttattttcttgccccatacataccttgaggcgagcaaaaaaattaaattttaaccatgagggaaatcgtgcacatccaggctggtcagtgtggcaaccagatcggtgccaagttctgggaggtgatcagtgatgaacatggcatcgaccccaccggcacctaccacggggacagcgacctgcagctggaccgcatctctgtgtactacaatgaagccacaggtggcaaatatgttcctcgtgccatcctggtggatctagaacctgggaccatggactctgttcgctcaggtccttttggccagatctttagaccagacaactttgtatttggtcagtctggggcaggtaacaactgggccaaaggccactacacagagggcgccgagctggttgattctgtcctggatgtggtacggaaggaggcagagagctgtgactgcctgcagggcttccagctgacccactcactgggcgggggcacaggctctggaatgggcactctccttatcagcaagatccgagaagaataccctgatcgcatcatgaataccttcagtgtggtgccttcacccaaagtgtctgacaccgtggtcgagccctacaatgccaccctctccgtccatcagttggtagagaatactgatgagacctattgcattgacaacgaggccctctatgatatctgcttccgcactctgaagctgaccacaccaacctacggggatctgaaccaccttgtctcagccaccatgagtggtgtcaccacctgcctccgtttccctggccagctcaatgctgacctccgcaagttggcagtcaacatggtccccttcccacgtctccatttctttatgcctggctttgcccctctcaccagccgtggaagccagcagtatcgagctctcacagtgccggaactcacccagcaggtcttcgatgccaagaacatgatggctgcctgtgacccccgccacggccgatacctcaccgtggctgctgtcttccgtggtcggatgtccatgaaggaggtcgatgagcagatgcttaacgtgcagaacaagaacagcagctactttgtggaatggatccccaacaatgtcaagacagccgtctgtgacatcccacctcgtggcctcaagatggcagtcaccttcattggcaatagcacagccatccaggagctcttcaagcgcatctcggagcagttcactgccatgttccgccggaaggccttcctccactggtacacaggcgagggcatggacgagatggagttcaccgaggctgagagcaacatgaacgacctcgtctctgagtatcagcagtaccaggatgccaccgcagaagaggaggaggatttcggtgaggaggccgaagaggaggcctaaggcagagcccccatcacctcaggcttctcagttcccttagccgtcttactcaactgcccctttcctctccctcagaatttgtgtttgctgcctctatcttgttttttgttttttcttctggggggggtctagaacagtgcctggcacatagtaggcgctcaataaatacttgtttgttgaatgtctcctctctctttccactctgggaaacctaggtttctgccattctgggtgaccctgtatttctttctggtgcccattccatttgtccagttaatacttcctcttaaaaatctccaagaagctgggtctccagatcccatttagaaccaaccaggtgctgaaaacacatgtagataatggccatcatcctaagcccaaagtagaaaatggtagaaggtagtgggtagaagtcactatataaggaaggggatgggattttccattctaaaagttttggagagggaaatccaggctattaaagtcactaaatttctaagtatgtccatttcccatctcagcttcaagggaggtgtcagcagtattatctccactttcaatctccctccaagctctactctggaggagtctgtcccactctgtcaagtggaatccttccctttccaactctacctccctcactcagctcctttcccctgatcagagaaagggatcaagggggttgggaggggggaaagagaccagccttggtccctaagcctccagaaacgtcttcttaatccccaccttttcttactcccaaaaaagaatgaacacccctgactctggagtggtgtatactgccacatcagtgtttgagtcagtccccagaggagaggggaaccctcctccatcttttttgcaacatctcatttcttccttttgctgttgcttcccccctcacacacttggttttgttctatcctacatttgagatttctattttatgttgaacttgctgctttttttcatattgaaaagatgacatcgccccaagagccaaaaataaatgggaattgaaaaaagct

SEQ ID NO: 245 - protein, 444 aa, Homo sapiens; identical to SEQ ID NO: 243

SEQ ID NO: 246 - DNA, 32506 bp, Mus musculus
  misc_feature (1)...(32506): n = A,T,C or G
ttattccacgcatggcttgaaatgggtgagaagcagggttgccaggtgtcgggtcactagtgtaagttgactggctctcgggggagaaccacggctggaatttgttcagttgttacagtctgggccagagctgtgctggccatgcttgtggctgctgcaggcagagagagggagctccgagctgcagtggggagaacttgggctgcagtttctactttaaacattcctggtccagctatggactattcggcattgaacttggacagtatttctgcactgggaagcacccaaggcccacgaccagagcctgtatggcttgcaccacagggcctcctggtctgtctccaaatgtggggagaacccgcattctgccttcccaaagatcaccaaaatacgttgagaagtcggagttgctctcagtgtttagacgcatccggtcacaaccctgaaggacttcagaatctgagagctttcctaaagcaaaattttgtctctgcccttactcattctacgtttgatggcataagtcctccttcatggtctctctcgggaatctgcatgtggccggtggctgcagctatcttagatgtgtctaaactctttggacctctatgttgaaactgatttataggagaaacaatttaagtcaaaaatgtattcaagtaactgttaatttcacatatttctacctttttgttgttgttgttgtttttcgagacagggtttctctgtgtagccctggctgtcctggaactcactttgtagaccaggctggcctcaaactcagaaatccgcctgcctctgcctctgcctcccgagtgctgggattaaaggcgtgcgccactacgcctggcaccttttgtttttgtttttgtttttgtttttgttttttgtttttgacatggggtctcatgtagcccaggctggcctcaaccttgtcatgtaggcaagggtagccttcacctcctgatcctcctgtctctgccttccaactcctgggatcaaggtgtttgccagtgtgtctggcttgcttggctatttgtttatttacttatgagctgcggtcttgctattgtccaggctgaccttgaactcttggactcaagttcccttccttactgagtcctacctgagtggccaggactactggcaaatgacactgtgcccaccagccacaacatttttcccatggtaggcttgataggtgactagggaaagctcccgtgctgacagttgtgtggaggctcagcgtgctccactgcatccatattgctggccgccctgctccgactcactgcctccctccctctctccttgcagttgtcatggatgatgacgatgactcctgtctcctcgatcttattgggtaagatgctcctgtggggcccagggtggaccgctcgtgtgaggtgtgaggagtagaaagagctctgtagctatcttaagctcctggccttttaaaataaaaaataatactttaccatggttacagcaataactagcacagagagtttgtgtgtttgtttgtttgtactaagattttgttataccaggcagtggtggcacacacctttaatcccagcacttgggaggcagaggcagaggcaggcagatttctgagtttgaggccagcctggtctacagagtgagttccaggacagccagggctacacagagaaaccctgtctcagaaaacaaaaataaataaataaacaaataaataagattttatttattttatgtataaagtacactgtcattgtcttcagaagagggcatcagatcacatacagatggttgtgagccaccatgtggttgctgggatttgaactcaggacatcaggaagagcagtcagtgctcttaactgccacagaaaggtagttttacacacaggtcataactcagcaacccattccttttggttttacttgttattttttttagtaagtctggggatggcaggccagggtgttgcttagttttatttttagctcaccaagcaagggcaaggtccaagttcaccccccaggactgaagcagtaggcgcttcccagagacagaagtgtagaaaatggtttaaaatggagagatttcactggagctagtgtttcgtttctttttgccttatataactatcagcagctatttacgtagaagtagcagtacttacttgtttcactctctcacttccttcttttctagagacccacaagcattgaactattttctgcacggacctagcagtaaatcggtaagtgacagacaagtgtctcaggctcggcttttgtctctccaagccctgcagtaactgccatgttgaattccccctctgcagggcagcgatgatgtgacgaacgcagggtattctgcagccaattctaattcaattttcgccaactccacggtgagtgctgaaaaccagacctgaagcctttctgtctcaaggaaaccttacaagagaggcttcgattgcctctgtagagtgcaaagaatcattacctcaccttgtgactgacaggagagggaaaacctggatgacagtatgtcagtgctctgtttgtcatagaatcaggctcttaagtttcttcttgcttttgacattcctctatgttacgtatgcgtgagtgcctgagtgtacgtgtatcgatcaggaggaggaccgccttgagttggctgtctctttccaccaagtaggtcccacagatcaaatcccaggctttgtggtgagccttcaccctctgagccgtccctctggcccagcacgtccagctttctaagccttcaaccttatgaagtgacgccagtgttgtgacattagaatgttttgaatcagctgggcgtggtggcgacacctttaatcccagcactcgggaggcagaggcaggtggatttctgagttcaaggccagcctggtctacagagtgagttccagggcagccagggctacacagagaaaccctgtctcgaaaaaacaaaaaacaaaacaaaacaaaaaagaatgttttgaatcttgtcataggagctttaaggagactttttaatgattagttacttacagataatgttataaacaagataaggtagtagctaacactgttgaggggtaatatgtgcttgtgaggagggctcgtgcagactgcatctgatgctcacagtccctgcaggaagtggttttaccgttagctctgtcttgtagacaaggaagctaaggcacagagaggtttacccagccaagaggttcagtgctaggattctgactcaggccctaacctcaacagcatggtctgttaagatctaggagcatagacaagatgggaacggaggagtcttatttggagactctctcagatctatgtttaggggctggggagagacctcagtaggtgggagcacttgctgagccagaataaggacctgagttcaaatccccaggacccacgtaaaaagctaggcctggggctggtgagatggcttagcagataggagcacttgaccgctcttccaaaggtcctgagttcaaatcccagcaaccacatggtggctcacaaccacccataatgagatctgatgccctcttctggtacatctgaagacaactgcagtgtacttatgtataataataaataaatcttttttttttttttttggtttttcgagacagggtttctctgtagcccttggctgtcctggaactcactttgtagaccaggctggccttgaactcagaaatctgcctgcctctgcctcccgagtgctgggattaaaggcgtgcgccatcacgccagcaaataaataaatcttaaaaaaaaaaaaaagaagaagaagaagaaagaaagaaaagaagagaagagaagagaagagaagagaagagaagagaaaagaaaagaaaagaaaagaaaagaaaagaaaagaaaagaaaagaaaagaaaaaccaaaaaaataaaaaaaaataaaaaaagaagaagaagctaggcctggctgcaaaagtgctccaaccccagtgtcagggtctgagacaggagggatgctggggcttctccacagcccgcccagctcagcttcggtgagaggccctggctctcagaagtcagacagagtccagtgtgacctccagctctcagcggtctcggccatcctcatgctagaaatatgggtgccagccacctgcctcacctctgctccagagaaaacaatcttcttactctcaattgctctccccgatgcctatcatggttctttaggacctgctgagggctagcccagccttggctcgtttgtccaatcgttcagccattaaaacctcattagctgcagatctgagtgttggtatttacaggcatgtgcaccacacacaagaatacttgtttgtttgctctttctttctttctttctttctttctttctttctttctttctttctttctttcattaatttttatttgtttgtttacttttgctttgtttgaggcagagtctttgtgtagccctggctgtcttagaattgactctgtagaccaggatggcctcaatctcagatccacctgcccctgactcccaagtgttgatatttaaaggcgtgtgccactactgccaccaccaccaccagcactggattagaatacttgttcttgattggtctgtttttaattctcccattctttttgtttctttctgaatatactatatagtacacagagcatagtcccctaaggctgaggggctggctggtagaggttgccttcacacaagatgtctttggttccttttccagaacagcaagttaaaagtttttttctatctgtgccacaaaagatgactgggctgtggcaggagtcttagtttgtattactctcttcagcttctcttcctgggtctgcattggagtctccctggattgtctgttccccttgggttccttaaagacataactaacacatgtgtgcatatctggaaaggggtggcttttccttttgagttaactggctttgtttttgttcgctccattgtttttagtttgaaatagttttcctaaatactggagtgttagtcaggaaatacaggaagtcagaagagcactcattttatgtgggaactcactctggtcgggtctggtgttctggggccgtagggtatcttcttggacatctagcaaggtgatactcagggctcctcaaacctgttttgactttgtggtgtgcagtggtctggatatatatccctgggctgaatcccactagcaccttagaaacaacctgaaaatccatttttctgagagtgcttatccccagtgggatcctatgttcaatctttagcaccctgcccacctcctccaaaaaggaaggctagctggcagtggtggcgcatgctcaggaaacagaggcaatcggctctctgtgagttcaaggccagcctggtctacagagcaagttccaggacatccaggctacacagagaaactcagtcttgaaaagccctccagccccccaaaaaggaaaaaagtatgacccagtagcttggaaataagaagctgatctctagatagccttagttatctcatgttatctgtctgcctgtcttacatctattttttgttgttgttttgtttttgaagcaagtcttactctagccctagctatcccggaactcaccacgtatactaggcagacgttaagcttatggagccagctcctcctgccgttagactgttgggttaaaggcctgtgccagcatgcccacttctctttaaggatgagacagaggctcacagtgtggcccagattggcctcacccttgctgttagcccaggctaacctcaaattcctggccatccagcctgagtttccttgctaagacagcgtgtgtgagccgcacctcagctagcttcctgtatgttccctataaaatcatctgtcaaagcaatggtcgtacagactgttcatcataactaaagaaataaaacaggagaaagaaggtaagtagtttggagagagaaagttgtgttttccaggaggactgcaggttcaaggccagtctgagtaggaccttgttttaaagtaacagcaaccataaaatcagtgtggcctggaactttaccattaaactttatatttatagtcattcgggagaggggtttttaagcttgtcttctgaaggtttgatatgccttataacacactgattctgctttttttagaacgctgaccctaaatcggccctcaaaggtgtgagtgaccagcttggggaggggcccagtgatgggctgccgcttgcaagcagccttcagtttcttgaagatgaacttgagtcttcacctctccccgatctcagcgaggaccaaccctttgacattcttcagaaatccttgcaggaggctaatatcactgaacagacattggcagaagaggcgtacctggatgccagtataggctcaagccaacagtttgcacaagcccagcttcatccttcttcatcagcatcctttactcaggcttctaatgtttctaattactcaggtcagacactgcagcctatcggggtgactcacgtgcctgttggagcatcgtttgcaagcaatacagtgggtgtgcagcatggctttatgcaacacgtggggatcagtgttcccagccagcatttgcctaacagcagccagattagtggctccggtcagatacagttaatcgggtccttcggtaatcagccttccatgatgactataaataacctcgatggctctcaaatcatactgaaaggcagtgggcagcaagccccatctaatgtgagtggggggcttctggttcacagacagactcctaacggcaactctctgtttgggaactccacttccagtcctgtagcacagcctgtcaccgttccatttaacagcacaaatttccaggcatctttacccgtgcataacatcattattcaaaggggtcttgcaccaaattcaaataaagtcccaattaatatccagccaaagccggtccagatgggtcagcagagcgcgtacaatgtgaacaaccttgggatccagcagcaccatgcccagcaggggatctccttcgcccccacaagctcgccccagggctccgtggttgggccgcacatgtctgtgaacattgtcaaccaacagaacacgagaaagcctgtcacctcgcaggcagtgagcggcacagggggcagcatcgtcatccattcccccatgggccagcctcacactccccaaagtcagttccttatacccacaagcctttctgtcagctccaactcggtgcaccatgtccaggctataaacgggcagctgcttcagactcagccctcccagctcatctctggccaagtggcctctgagcatgtcatgctgaacaggaattcctctaacatgctcaggaccaaccaaccatattccggacagatgcttaataaccagaataccgccgtccagctggtgtctgggcagacttttgccacctctggaagtccagtgatagtcaaccacgcctctcctcagatcgtcgggggacagatgcccttgcagcaggcctcacccaccgtgttacacctgtcacctgggcagagcagtgtttcccagggaaggccaggcttcgccaccatgcccgcggtgagcggcatggcaggacccgctcggttccccgccgtcagctcagctagcactgctcatcctactcttgggcctacggtgcagtcgggggcaccgggatcaaactttacgggagaccagctgacacaagccaacagaacgccagcgcccgtcagtgtgtcccaccgtcttccagtctctgcttccaaatcccccagcaccttgagcaacaccccggggacacagcagcagttcttctgtcaggtcagtgccggacacgtgtgggggtggggctgggtgggagttcctgtcatatacatataattatataagtgtcaccctgggtgaagtgtacttcagtgtttcaattttggttgatcaattcttcctcttaatggacggctcttagctgttgtagagtggagactctggaatggaattggatttggggccagtagatgactcaggaggcgaaggcactgactgtcacacctgagtctgacccctgggcacacatggtagaagacaaccgcgccctaagtggcccactgacattgacacacatgctatggcaggaatattgtgttagcttactgtcactgaggtgacacactgtgaggaggagcgggttacacttccatgtcacagtccatccgtcactgagggaagtcctcgtgggaaatcagcatagatatctggagacagggtcggtgcatagggcacggagaagcgctgctctctgacttgctcaccatggcctgctcagctagtttggtttggtttgtttcaaggcagggtttctccgtgtagccctggctgtcctggaactcagtctgtagaccaggctggcctcaaactcagaaacccacctgcctctgcctcccaagtgctgggattaaaggcgttcgccactaagccctgcttctcagtttcttatatgcacagaaccacctgccaagggatggcaccacccacagtgggttgggctcccccacatcaatcgtcaaccaaaaaatgcttcacagacttgcccagaggccagtctcatggaggcagttcctaaactggatctcccgagtctcagatgactccagcttgtgttgacttatcaaaaacttaactactccaagtatacacttgtgcgcacacacacacacacacacacacacacacacacacacacacacatacatgcatatacacatatgcatgtatggtcactggctcaacccagagggaggcatggtgggggtggggggtggggcgcagatcaagaacactctcctttgacctgtccctgagccagcccaatgggtaacatcacagattattgctggaaagctctcagtgctcctcagcttctgtcctctacttgacagacatttccttttcttctcattctgagcgtgctccgtaggggtcagacacacctcagtgagagagggcttcgcctagtgtgcttgaggcccgagttccaacacagcagaacagtcggcagcaggcaccaatcacaccgaagtcttctcccgccaagaggacttaggctgtatgtagcctgcttgcacccacacagctgcctcctctgtctttatttccacagccttctgcatactcaggagaaactttaggacctataacagtttctcctctctgtgctgttggttttacctgttgatttgtttcttagtgtctgtagaagagcttaacctcttatatttcagtatgagtcttctacaggtacagatagtctcttagaaaccatatacctttgacttggtaatcacactaagagtcagagcaaggctgggcgtggtggcacacgcctttaatcccagcactcaggaggcagaggcaggcagatttctgagttcgaggccagcctggtctacaaagtgagttccaggtcagccagggctataaagagaaaccctgtctcgaaaaaccaaaaaaaaaaaaaaaaaaagtcagagcaagcaggttttttttttaaagatttatctgtttgtttgttcatttattatatgtatgtacactgtagctatcctcagacactccagaagagggagtcagatttcgttacggatggttttgagccaccatgtggttgctgggatttgaactcaggaccttcggaagagcagtcagtgctcttaccctctgagccatctcaccagcccagcaagcaggtttttaatgactggggcggagagatgacccagcagcagagagcannnnnnnnnnnnnnnnnnnnnnnnnnnnnnnnnnnnnnnnnnnnnnnnnnnnnnnncatgggatctggtgtcctcttctggtgtgtctgaagacagttgacagtatactcatatacataaaataagtaaatctttttaaaaaatgtagagtttaaaataattaaaatctagggtggagagatatccccgcgactaagaaaactggctgcttttgcaaaggcctggctcagtccccagcacccacatggcggctcccactttgccactccagtcccaggtgtctctgactccctcgtggggcttctatgggcaccaggcacatacatggtacacagacattcacaggcaaaacgcccaaatacgttaaaaactaggaaatggaaagccaggtctcctggaagaggaaggagccatcccagaggctgtgatccgttcagcctcactcctcagccacccagggcggcagaagggaggtcctttcctttcctcacgtcagcgccaggctctagagcctccaacagactctcctgaccttgctgttgttctcacctgctgatttgtttcttagcacacttgattattttgggggcagtacacacacacacacacacacacacacacacacaccataagcaccttgggggtcagaggagagctggtggggtctctcctcacagtacctgggccccgggaagcagactcggttcaggcttggcagcaagtgccctaactagctgagatctcaccagtccttgttttctgtgtgtgtgtgtgtgtgtgtgtgtgtgtgtgtgtgnnnnnnnnnnnnnnnnnnnnnnnnnnnnnnnnnnnnnnnnnnnnnnnnnnnnnnnnnnnnnnnnnnnnnnnnnataggtttgcagaattcacttattctctttccaccacataaattctggggattcagtgttctggtctccttcaggtgtggtagcaagcccctttacctgccaaatcatctttggattttatgtgtatgggtgttttgcctgcatgtatgtctgtgtgctatatacgagcctggtgccctcataggccaggagaggatgttggatcacctggaattgtagttacatttggtcaggagctgggagccaagccctggtactgtaaacagcagtgaaagctctcctgagccgcctctctggcctccagctgaagcaggactctgttttgtgttttttaaaacaggatcttacaggctggagaggtggctcagcagttaagagcactgactgctcttcccaaggtcctgagttcaattcccagcacccacatgatggctcacaaccatctgtaatgggatctgatgccctcttctggggtgtctgaagacagctacagtgtacttaaaataaatacagtgtacataaaaataaataattctttaaaaaaaaaaaaaaagacaggatctcacacagtaccctaggctggactaaaacttcctgtgtagtttggatttccttggattcgagcagtcctcctgcttctgcctcctaagtgcacaggccaccatgcctgtcgtgtgtgtccgtgtgtgtgcacagcgcatgccctgaccttcaaacccccacccctctccccagtcattcttttggaaaagtacaaagttactatttcttatggtgtccctgggctggaccactgtgagtaaactcagggtatgcattttcagggcggtcctcaagactctgtgattgctcctgtcactggctgtctgccaggtctccccactgtgcttcttctgctggggcggggtggggccacacctgtgttccagcacttgggagatggaggcaaggaggatcatcagggatcaaaactagccttggctacgtagtgacctcggggccaccctgggctacctgaggctctgtaggtacacagatttctttcagactgactgcactggtctaaccttgcagtggccattccttactgtcactacagtgtccctatgtggagacttttccagagctgtcgctctgatcctgtattctgggtggttttccttcttctctggtatcatttatagctataggttcttgtttcacactatgtcctagtacacaggaggctgagagaggattgtcacaggttcaaggcaacctgggccaagaggaacagacgctgactcaaacataagctgcacgatggataaaaatacagagtggtacccaaatggtcaaaagctcacagccagtctgccactcccgtctccccgaagtctcattcttgctaggccttcagattccctgtgacacagactctgtagttacaggcaggtgacatggctagacaggctgtttgttctctgcatcacactgtggacactgcactctattatataactgagatagtacgtattgatctgctatgtatgttcacctatagcatggccatttcctcttcccctccctcaggtgggaggagaatgtggctgactccccagtttcttgtagatgatgctaaaaagcagtctctcctggaagcttcagaatagttctctgtgagtctgtatgtaagagaggacagtgggacgtggcgtgacatccaggttctctgtgagtctgtatgtaagagaggacagtgggtcgtggtgtgacatccagggtgctcctgctggtggttttcaggggctccattctggagtgaagagatacgggcatagctttgtgaagacagcatgcactgtaagggcaggaagtaggtcacatgccgttcacatccacggcaacaagagtggctctactttataattcctgtgtaggttttctatagaaatcctagactattgcaatgaacaaaaacaccattatcggaagcgtgaactgtttatgtttgtaaaaattttaatttagcaaatactttttaaaggtttatttgattacttttagtttgtccatgtatgtgtctgtgtaaggggtatacgggtgccagcggtggctagagatgccagtccccgggagctggagttgcaggcagtggtgagccacccaaggtgggcactgggaactgaactcaggccctctgcaagagcagcaagtgttcttaaactgctgagccaaaccttccagtctcctaatccagcatttgtggttcatcttatgcgcaagtgaaagagttcagcagttaggcagtggctgaagaagcctggaacctgaattgatccctgaaacccatgtaccgctggaaggaaggggagggcccagtccacaaaggtgtcctcgtacctccacacatgcacacacacatgcatactggcatacacgtgcacactcgcacacatgcacagatgtgcacacacacatagtaatctatttttaactgttaacattctcgaggactgcatttcttggcgttgcgttcagggtgggtagttagtcagctctgccccaagcactcacagagagcaggaagtttaccccctgctctccagccactgcttgcttacagtgacccctggagcctgggctcagtctgagactcggagccatggaaactgaaaggggacagaaaactgctcgcctggtgtctgtctcccatagcctagattctgcagtatctgtgttactcgtactaagggtccatgtgtgtctatgtagtgtgctcaagaacaaacacatttcaaagtcctttataaacactccgactgtttgcctgtaacttcttcagcatctcccgagaagaggggcttcctgacatttcatgttgttaccgccccaccaagagagttaatgccaagccagataatgccgatttctgtgatcaagacattcgtgcactttacagtagattttcacccagaattcagtcagaaaatgttgtttgcacattggtgaccttacacctttaacccagggttgagagcactggctgctcttagcgccattaccagcgcccgcttgggacagctcccaacggtctataactccagttccagggggctctgccattgctgtcctggaacccactctgcagacaaggctggcctcaaactcagagatctgcctgcctctgcctcctgagtgctgggattaattttaagtcatgcgctatcatatccagaaggaaaaaaaatcagcatttttaaaaagacttaaggagggctggagagatggctcagcagttaagagcacccaactgctcttccaaaggtcctgagttcaaatcccagcaaccacatggtggctcacaaccatccgtaatgagatctgacgccctcttcgggtgtgtctgaagacagctacagtgtacttacatataataaattaaaaaaaaaaaaaaaaagacttaaggacctgcgaggtggctcagcaggtaaaggtagcagccgcaaagcctaagcatagtctctggaaagcacacgttgaaaagagagaacccagtcccacaggctgtcccctctgaccaccacaatcatacacgctgtggcatgtgctccccatgcccccgaaatgtaaagataaaaacatacttggacaaagtagataaacagtgtagtgagtcttcagccagcgattaggtgtggcccagatgagcttgtgactccctgctcatctatacctcccccctccagaccgtccgtgtagtcccgtctctgatctggttgcttctttgtgcttatcctactttcttcttctcagtgctccagttgtcccaaggggcgagcccattggaggcactcgcacgggccctctgcctctgacaggtcacctaccgcactgagcacttctgcctgctgctggaggcgtggttgggaaggccttgcctctaactgagagccaggcgtcctctgtggagcccaaaggaacaccaggctttacactgccttctaaatggatccaaatgtacaagtcggaagtaagccaggtgctttttatgagaatttagcgtgtcaagcaaaaactatgataggtctaagccttttcagagctccaaaaggtttagtagctctaaaattccttgagagccaggagccagcatgcaccctcaaggccttgggtgtgagggtgcaggtgcgagcgagctgaattctctgtcttggtctccagccctgcctctctcctatcccctaccccacacacacatacacaccttactgtgtctgcaggtgtccagctagacagacttgctttcttctcctatgcttttaataagtctctaaaccctatttaaaaaaacaaaacggggctggtgtgatggctcagtgggtaagagcacccgactgctcttccgaaggtccagagttcaaatcccagcaaccacatggtggctcacaaccatccataatgagatctgactccctcttctggagtgtctgaagacagctacagtgtacttacatataaccaataaataaatctaaaaaaacaaacaaaaaacaaaaacaaaacaaaaactgcccggcgtggtggcgcacacctttaatcccagcacttgggaggcagaggcaggcggatttctgagttcgaggccagcctggtctgcagagtgagttccaggacagccagggctacacagagaaacactgtcttgaaaaaccaacaaaacaaaacaaacaaacaaacaacaacaaaaaaccaaaaaacaaacaaacaaaaaaaccatttttaaggcagggtcgcttactatgtagctctgactggcctcaaactcacagacatccacctgcctctttctccccagtgctaataggtacccaccacacccagcttgagattcttctgtgaaaatctctctcaaacatcctctccatgaatgatggagatattggcagtaaccaagacagtgccgggccctgaccagataatttttaaccctttccctggagctgcacgtaagccgccttgtgacagtctcacacaacagtggaggcggtaggcacagtggtcacaggccgctggatactgtgccttgcctctttcccgcggtcatattctgcagcaggtgcagggagccttcctggggaagcaagtgttgggtcatccctgcctgtgccctgtcagcaggtggcgtgtggctaaacctgtcttcagttctctcatctgaaaaaaccgaggaacttagctgcataatcgaggcaagtggggaacattctaaacaatgtgacacctgcctgcgccttaatccccataaattctgatctcaacagcgtggagcaaggaccttaggcaccaacattttccaaaagctcccaagcgacgctaaagtgcagctaaagtggggtggagggcccagacccagccagttcccgcagccggttacagccctcatgtcacctcattagacacgtgttccttgtcatggcgattgatgtgggttcagcctctgcctcacagctccattccagagcactagtcctcccaaagggctagcctggtgactggagccaggccctctgggagctcctactcctaggaggaggccacatccctggccggcatcagggtctctggtgctccaaggtcctctgagtaggcagacacatggtgctattgaacctgcactgtggcaccagcctgccctctccatcttgcttctggggctccttccctgcacccccccacctccctgtctccttgcctgttcttttcactttactgcacactaaggatgtgacctcagtctgtgctcagtgctgaacactgccgctcgctcttcaggccctagaacatagagccctgtttcaggatcagtgagaagccagcttgcatacactgtattccaagtggacatgtgttaggtttgggcaaactctaacaagatggcacagcacaagacaatgctgacagacctgggaccatccactgtttattttgtgagagtgtatggccgcacaggccacagcgagagtgtgccgatcagagagggccacttgcatgggctggttctcttctcccgcactgccccggggcggggcccagggactatactgaggttatctggcttgatggcaggagctttacctgctgacccttcatgctggctgctgacctgtgaccttccaaagggacgcaaaggccaacaagacaaaaggtctaggtggtgaatgttccagaaaggagagatcacaaatgaaagcctgggagagaaggtgcaatgtgctataggggaaggaaagcaagtccaggggacacgaggaagatgttggataggaaaggtgtgtgaggtgtgcatcctatgggtcttaggtgacaggagccgagttatgccagacgtgagcctgtgatcccagcactcaggaggcagatgcagggagatgtcgttgagtttgaacctagcatagaacaaccagggctacatagggataacttgtctcaaaaacaaaacaaccgccaggcgtggtggcactcgcctttaatcccagcacttgggaggcagaggcaggtggatttctgagtttgaggccagcctggtctccggagtgagttccaggacggccaaggctacacagagaaaccttgtctcaaaaaaccaaaacaaaaaacaaaaaaacaaccagtgtcctaggccaggcgtggagacacacctgtctgtggtcctggctctcaggggttgggaggtagagaccagctcagaagtttaagattagcctcagctacaaagtagttctgaagccaccatgtgctttgtgagaccctgtctcaaaacagacagacaaacaaacaaacaaaaaaccccaaaacaaaaaagagccaatgtgttaacttgagtgtgaaatatcaaagactcatgctagccttgtagtggtggatatggtgggaaacacgggctgcgcggggaatcaaaacagtgacgttagagctcatgattggctggatctccagtaaggcgaccatctgaattgagccaattagattaaaaaaaaaaaaaaaaaaagctagattagattaaatgcaggtttactgagaagctggccccaaggaccaaggcccagcaaactcaccatggggaggagggaaagaaatcatgcacactaagagagctgagaggaagagagagggaggacaaggagaccgaagtgtctggattatatagggaagcgcctctttctgggacagcctggagcccagggctgccttgatatgtatgtcctttcaaatgtgtcactctctggtgaccaagtatcagtgggcctatgggggccattctcattcagaccaccacagtttttaagtgaatcagatccaaaggatctcttgtcttcttttggcttttttttgtttgcttgtttgtttgttttccgagaccaggctgggctcgaactcagaagtctgcctgcctctgcttcccgagtgctgggattaaaggtgtgcgccaccacacccggctctcttttggccttttttgtcaccaggtacacacatcctacacagtgtagacacatagacaaatcactcatgcacattaaataaatcggaaaaaaaaaagcaatctcttaagacttaaaacaataaattaacattcctcttggctctttgttctacaggctcagaagaagtgtttgaaccagacctcccccattcccacatccaagaccacagacggcttgaggccatcacagatccctgggctcttgagcaccgcactgccaggtcaggaaacccctacggaagttctgcagtctgccctgaagtctgcccgtcctgtttttgcgttcctggagcatggcattgtcttcctgcctccctgtttgcacagtgtttctgtttgcatcttacctaatctcctttctccttgatggctccttttctctgtaccctgcccaccctaagaatagagtgtgctcctctggctgtagggcaccgttgattggggatagatcatttaccatatcactcagaaagaaagaagcacttctaaagtgtggcgcacgcctttaatcccagcactcgggaggcagaggcaggcggagttctgagttcgaggccagcctggtctacagagtgagttccaggacagccagggctacacagagaaaccccttctggggggaggcggggggaggttatgtagaaaatgtgcttcttagaagtgatgggccttggctctgcaaggctcacagaactttgtgaccagtcccacactgctatgtgtgcgtgtgtatgtgtgtgtgtgtgtctgtctgtctgtgcatgtttggaagccccactccccaaactggacacctataggctgtctgtctgtctgtctgtgtgtacatgtttggaagccccactccccaaactggacacctataggctgtatccagtcttaaggcacttaccacttgctggactccattcctactcagagtagaaacaacctttggcctaagaccgagtatagcaacttttcttaccagctcaacacatggtttaaaacaacaacaacaacaaaaaaaaacaaaaaaaaaacaaaaaacaacaaaaacagaagctagcgcgtcccttcctgcaagtgtatttgcaagtgtattttggaggtctgaagtgctggcaggcttattgtggggctcttggggtcccacttgaggtttaataataaagacacagagacatctgtgcagtgtaagacctgtttactggggcagtctctcagctagcctctattatattattattattattattattattattattattattattaaactcgacttatccgggtctctccactttgcctgcctcccagctaaatcccattctgcttctgtctggcctgcttctctacctcctagatcaaccctggcactctaccccagcctcagccttcctctctttattctacaaaagccacattccttatccatccagtctgaaccagtcagcagctggataaccttctttttaccattcagggctgtgtgacctttatgctgctgcttgctttttaacatgataatctcagagaagcataggagggggaaccattccctacataatagtaaacagttccctagagcatcctgccagaattgactctgccagcacagccattagcaattaaaaatactgggacacacccacattgccattagattcaatgtggaagagatggggggcggggaggggagggcaggctacccaaacattggctgacttatttctcagaagcagacttctgaaaactacaggtagctttgtctatttattaccatggactaagtaggttctatttattaccaaaccagagtttaatagtgcctgcctctgcctccactgccaagagatcagtgcctccctttaacttcctcccaaccggtgttcttcaagaaattctttcagactgggtgtggtgatcaagccttttctcactgcactctggaggcagaaacaggacaggtctctaatggtaaaattagagtcagcctgatactcagcgagaagttccaggccagactggggtacataatgagaccttgtatggaacaaagaaagagagagagaaagaaagaaagaactccttttagaacacacatactggatctgactcctgtcttctaccttcattctaacaggacaggattctggaagcaaaattatgccagcgaccttgggggccacacaggcacaaccagaaagctcagttggatcatccccgagccagacagctgtgcaggtaggaaacggtttgcagttccgttcatggtttctaaccagagtgtgcagtctcagaaggctttgtcgttggtacctaacacggggcacacaactagtctgtctccaagtgcttgcaacagtgtgaatgctgaagactttcccagggggccaggcctggtcacatcacgcttccaggctgtgtctttctcaactgttcctgacatgtttctggtgcctcatgaagccatcatagattaagggctgggatgttgtgaagcacttgcctagtgtgggtttagtacctagcagtgagtacctacatacacaccagtaccctccgcatactagatggacggacggatggacggacggatggacgggatggacggatggatgtgcttactggattatgggttgtcctacagcttagagtcatctgagatggaagccttattgaggaattgcctggaaatgagattgccctgtctataagagtgggcacgtctataagagagcctcttgattgtcatatttgtcagagggtccaccccactatgggtggcaccattttttgtttaagaaagctaaacctgagcctgcaatggagtaaacaagttagcaagcagtgttttcttcgaggcctcggctaatgtctgccctgacttcctcagtgatggtctgtgaccggagagtgcacaccagagaagtccttttctccccaaacttgcttttttttttttttttttttttttggtttttcaagacagggtttctctgtatagtcctggctgtcctgtgtcctggaacttactttgtagaccaggctggcctcgaactcagaaatccacctgcctctgcctcccgagtgctgggattaaaggcgtgtgccaccactgcccggctccaaacttgcttttaatcagaggtcttaccaaacaagaagagacctatagctcaggggtaaagcagttgcctagactgtacacccttgggattgatccccaaaagtgctgtacagacacacatacatacacagagagagagagagatcttggggctgaggattatagagctttgcttgttatgcagatgaaagacagagtacttatggacaatggcaactcaaggatgagcttggtttggctcactgttggcgagtgagtgtggtctctggcagggaccaggagagcagcagtggggagcagctggcagaattgtgtctgcagccaggggacagaaaatggcagtgctccctccctccttgtacagtccttgggatggtatgggggtggggggggctctcatacaggagcccagagctttctttcctagaaggttttggctcctctcaggctgacagtctgtaataagtgtcacagggtatatataactcagtagttagcctttgcctgatgagcacaagtccccagcacttcacaaagaaaaatcagagcagtcaccatgtcagagtggtatctgtcccacaaattgtgaccaacctgattttcataatgagttccaggacagccaggggtccatagcaaggcaagatttttttgtttgtttgtttttatgtgaggaccaatcatgaatgcatgaaatagggcatttctgtagctgtttgactcaactttgtagtgtataaaatctcagagcatttcacactactagtcttaaaaaggtaggaaagccattttatgtttagctttttttaaaaaacagattgttttgtttttcttttcaaacatttatttattttatgtacatgaatacactgtagctgtcatgagacacaccagaagagggcatcaagatcccattatagatggtcctgagccaccatgtggttgctggaagagcagtcattgctcttaactgatgagccatctctccagccctatgtttagctttttgagttttttttgggtttttttgtttgtttgtttgtttttgtttttttgttgttgttgttgtttttcgagacagggtttctctgtgtagccctggctgtcctggaactcactctgtagaccaggctggccgcgaactcagaaatctgcctgcctctgctcccatgtgctgggctacacagagaaaccctgtcttggaaaactaaaactagagttgctatccagctttctgtagatataactttggtactctttgttacaaggaagctgtttgtgcttgctgggctctgtcttcagcgggttgcattttaaagtccttgttgacagataataggaaaaacttggaacacagtaacctttatctataagtgtactttgtgactttctccctgtgttttatcgttaggtggatagtcatccaggacagaaaaggcctgctgccaaacagctgactaaaggagctttgtaagttctatttcaattcttgttttctcagagtgctacagggcctttgtagtcactaaacataccacatatctcagttatagtggctgagtttcttagccttttcaaaaatgtactgcgaatgacagaccagccagggctacaactttcttttttttttttttttttttaaggaatttgagagctggggcaatggcttagttgggaaagttcagactggagttcaatctctgacccacataaagcaagccatacacagcagccagctcttctaagcccagactggggccagcaagtgaaaggagcttgccaccaagcctgatggccagagataggtcaggctctgcagcccacatggtgggagggaagaactgagtcctccaggccgtcctctgacctccataggtgccagggcgctggtgctttggtactcacgcagcctcacacaagaaaagaggcagcagggctgttgatttactttgaaaaccttttcctacagtttgctttcatcaggacctgtaaatagatcagataaagtacactgttgttttgttcttgaagagaatgccccctgtctctcgagacagaaaaaccgcttgtatgtggactgttattggactgttgctagccagtggtcagccattgctgtggtctctccaaacacccacactgaggcctggtgggaaaactacgggtttgtttgttttttgttttgggttttttgttttttgttttttgtttttttttggtttttgttttgttttggtttttgttttttttgagacaggatttctctgtgtagtcctggctgtcctggaactcactctgtagaccaggctggcctcgaactcagaaatccgcctgcctctgcctcccaagtgctgggattaaaggcgtgcgccaccacacctggctgaaaactatgtttttgaggtcagggtcatagcccaacaataataagaatgtggagaatgctgtccgttgtcctgtagaactgtactgtagttaactcgcctttggactcattggcttcctatgtggccttagctgaacactcactctccctcttaaagcatcctccagcagttacagagggaccaagcccatgctgtgacacccgacaaaagccagttccggtcactaaatgacacggtgcagagactgctctcctaccacgtgtgccagggctccatgcccacggaggaagacctgaggcaaggtgagcagccacagcccaaaagaacagtgcagcgccctgactgggagacaggcagctgttcttatcacaggcataacttgctttctcagtaccccagcctgtaaggaaggtaggccctgttcttaataatccatgagtggcttctccaaatgccgttccttgctggcacaggggcagcagtgaggaacacaagttagctccctgaggctcccaagcaagtctaagacattggctgaatgccttgggacatccgttttaggaaggttaggaacttctgagaatcccacacacccggtgcctgtccctgctctctgtcactaagtccaatagtagagctctggtgttaccccactttccctcctgcctgccaggctctccatcctccactgccatggtcttgatcctcccagagcctctgatctccccacaagctggggcttcctgggagggctggcgagtggcttccagagtcaactgcaagtatctttaaagactctaggaagcgtgggtgggagatgtgacatctcttagacagtctttcctgcttcagcgcttcctgccacctgcttctgtgaagggacagaggcttggggagcctgtcagccagaaagtggactccattgctctttcttcctggcccgcctacagcagctgccagtaatccgatgttggttttctgggctgtgttagagggagttctgttaccacacagggaccccgggtctctgcaggatcttaagcagagggaagcttgctgcagatcggctgttgggatgagttcctgtcaggctcaggaacagaggccctcagtctatggatgattctcttactgttttctccctgtttgtttgttttaagtggacaatgaatttgaagaggtcgccactcagctcctcaaaaggacccaagctatgctgaacaaatacagattcctgctcctagaagacgccatggtaaagtgtcccctagcatggctgcttgcagctcagccagctctaaggcccagcgaaagaaaggctcgaggacttcataggactccccaccagggcagagtttacacagcagaagtgtttaaggttgaaggaaaactccacacttagccattgctgggagggacagtggcaaatgtcatctacagccatttccgatagggaatttctgagccaccacaagagactaccttgctaggcatggtggcacactcttttaatcccagcccacaggaggcagaggcaggtggatctctgtgaattcaagggtagccaggattctgtagtgaagccctgtctctaaaaatgagctctgttttttttttttgaaagatttattttatgtatatgaatacactgttgctgtcttcagacacaccagaagagagcatgggatcccattacagatggctgtgagctctattgttgcgaaggggctacttacagctgactgtggctgccagtgcttataatcccagcataatcaggaagctgaggcaggatgattgtccttgagactttgttgtaaaattagcagcaaatgtgatagcatcctgtgtgtatagcacatgtgtgtgtagcaaggagctcaagagcatctaggcagcaagctctcacctacccctgcttccttcagtacccaagcccagaggtttgaatgacacagtcaacgcttctgaagtgactggcctctctccatttcagaggatcaacccctctgcagagatggtgatgattgacaggatgttcaaccaggaggaaagagcttccctgtcgagggacaagcgtctggcgctcgtagatcctggtaagagtcatcagggtacagggagagtacaggtaggcagttttcccagcagtgtggctactgggaagttttgtgaaccaatctttggtgagtccagcaggcagatcgggaattctgggaaggaaaaactgacaaagttgagaggggtgtgtggatataccaagactggctggtctacaagatccaaactggaatttcgcattcagttaaggccctggttttccccattaaacttcaaatcctgtctttctaatcttggagaactaaattgagccaggggcttctcagtgtatttggaaaggcccttgcgctgcattagaaagcatcagtgcagcatggtccccgattgtgagcagaggactttcccctcggccgaccagggtcccgccccctgcgagctttccagttttccctactgacaacgggctcactgtggagcccggctgacctggtgctcttgtgtaggccaggctgtccttaaaccacacagcctgtctctgcctcccaagtgctgaggtgagaggggtgagcactcagatccaaatccacccctttaaaatattttttaaaatgttttttctgtttcatttttaaaagatatgtttatcgattggttgattgattggtgtaatatatgtgagtacactgtcactatcttcagacataccagaagaaggcatcagatctcattacagatggttgtgagtcaccatgtggttgctggaatttgaactcaggacctctggaagagcagtcagtgctcttaactgccaagctgtctctccagcccctcctatttcctaagatttcctttttaaattatgtgtgtatggcaggcagcacatgtgagtgtaagtgaccagaaaggtgctggcccttctcgggctggagttagagacagctggaaccctcctgaaacgacagctgggagccagactcaggagcagtgcacacacttacctgctaagccatctctcagacccttaattgttaattgtgtttgtgtgcgtgttggggatgggggaataggcactgagttcaggtgcctgtggaaactggacgtattggattccctggaaaaggagtcgcgaaccacagaacatgggtcactaatatgtagtcctggctggactgatctcagcaaccacatggtggctcacaaccatctgtaatgggatcagatgccctcttctggtgtgtctgagttcaaggccaagcctggtctacaaagtgagttccaggacagccagggctacacagagaaaccctgtctcgaaaaaaaacaaaactaaaaccaaaaacaaaaaacaaaaacaaaaaaaaaaaaccaatgtgtgtatattattgtgaaggcctgcatgtggtgtgtgtaggtagacatacacacggcaaagcatctgtgtggaggtcagagaacaacgtgtggaagtcagtccatagctctccctggaaccttggttgttaggtgtgtgcagccaaggcttcctcctctctctgggccatctcactggcctgagcctaacacgaggtcctgccttgctcagctatatgtattgcctaggttgatctcaagttcatgtgcctaaagtgatcctcctgcctcagcccctgagtagctgagactagaagctgaacaaatataaatcacaaataccatagcagtccatggaatgtaagtctcacgtggatttgtttatgccatctataaaaatgcttttagaactcacatgctagataggatttgacattctgagttgttttaaattgcatcctagcattttcttttaaaaaagatttatttatttatttatttatttatttatttatttatttatttatttaatgtgtgtgagtacactgcagctgtacagatggttgtgagccttcatgtggttgctggaaattgaatttaggacctctgcttgttccattcaaccccgctagctctggtctgcccgactcgctcagtccctgctcacttgggcccaaagatttatttattattatacataagtacactgtacctgtcttcagacacaccagaggaaggcgtcagatctcattaagggtggttgtgagccaccaagtggttgctgggatttgaactcaggaccttcagaagaccagtcagtgctcttaaccattgagccatctcaccagcctgctttttttttttttttaacttaaaaaatgtgtgggtgagagagaaagaaaaggtgtgagtatacatgtgcatgacagaagacagcttgtgggagttgttctctctttcaaacttgtggtcctggagttggactgtggtcatcagactggctggcaagctccttaagtcactggctgtttaagatatatatatattatagatttatatatacacattgtgattgtgtgtgtatgtgtgtgtgtgtgtgtgtgtgtgtatgcaacatatatgggggtgtcctcagagaccaaaacaaaaagagagctttagattccttggaatttgagtccacagggacactctcagctgctgtgaactcaggtcctttggtagagcagcaagcactcgtggcctttgaaccacctctccagcccctggagtttgtatcttgctgtgatcccagtagtgtctgagtgcattcgctccataccgcagcgggctcgtcccctgtggcctcactgctgccttcctttgctgtagtctcctttctccaacacctagtcttcttttttgttctatttgtttgtttttaggttttttgtttgttttttgagacagggtttctctatatagtcctggctgtcctaaaacttactcttttagaccaggctggcatctaattcagagatccacctgcctctgcctcccaagtggggattaaaggcatgtgctaccatcacctactttgtctttttgttttgtttttttgtttttgttttttcgagacagggtttctctgtatagctctggctgtcctggagctcactttgtagaccaggctggcctcgaattcagaaatccgcctgcctctactttgtctttttttaatatttttaaacttttatgtatatggttgttttgcctacatatacatgcctgatgctcaaagagcccagaagagggcgtcagatctcctttgggggggggggggttgttgtttgtttgtttgtttttcaagacagggatctctctgtagccctggctgtcctggaactcactctgttgaccaggctggccttgaactcagaaatccacctgcctctgcctcctgagtgctgggattaaaggcctgcgccacagatctccttgaactggagttacaggtggtcatgagccgcttcatgaatgctggggctcgcaccacatcctctgcaagagcagccagtgctcctgaccgcttcagggtctctttgtccccagttgtgatgtcattttggtttttttgtttttttttgtttgtttgtttgtttttgttttttgtttttgttttttcgagacagggtttctctgtatagccctggctgtcctggaactcactttgtagatcaggctggcctggaactcagaaatccgcctgcctctgcctcctgagtgctgggattaaaggcgtgtgccaccacgcccggctgtgatgtcattttggttgttaaaataaagcttcactctgaagcccaggccatgccagaattcatgatattgaactcagggtaattacccgagtcagggcgggggttacaggcaggagcccccaggcctagctgttcttttctgacagtttaacattaaggttaggcctgccttggctaaggcattcataaatacactgtgtggactgagaggaatggagaagtctggaaggaacgctgggtatggaccaggagccacagaaggccagtgttagaggatctgtttctagcccttttctgaggaactgaaatctctgtctttggtaaaatagtttgtgatgactctgtcagtttgtcatgtcttgcgtgatgagagcctgaataccggtgtcaactagatggcaccctctttttccatcttagcctccatccctgtagctcaggatcggaggtgtgatgggtgctctgtgcatcctgtctagttttctagatgaagccgcctcttcctttctcccttcagggaagccactgtggtctctacctcagctcctcacaaatgcttctggaacctggcaaagcccaactcttcactcagacatagctcctccaagcccttctgtccttccaggcagctaacgtgtgtgcctttttgccatttgctttatgttctgggagaagtggtggggtcctcacacctgtctattaactctatcactcagagacaggttgtcccctttgccacaaagtccactgctctcaggaaggaagcaggttgaagctggaacttttattttcagagcagttagttcccaaaagaaacactggggagtaggcttgtaactcacttggtaaggtacctcctctgcatacagcttcctgtgtggaagctggcccaggaagctgggctacttgaagaagattctcctctcttaagttgtctctgagagtttctgagggaagggtcatgagtggagtgggcgggaagataagcagaagagggcaaggggtggggctagccaggactgcagggttgcctttgtgcctgcccaatcgagaggctttgccctgtgctagttctctgaccgctaaagttctttctgatctcctttccagagggttttcaggccgatttctgttgttccttcaaacttgacgaagctgtacctgagaccccgcttgacaggagtgaccagcatcgcagcaaaaccagctcgctccatcaggtgcccagggcccaaagcagagaccgagccaagccaggcatggcagaagcaacgaatcatgaccagtttcatctagtgcctaaccacatcgtggtctctgcagagggaaacatttctaaaaagtcagaaggccacagtagaacactgaaatttgacagaggggtcttaggccaataccggggtccgcctgaggacaagggcggccggagggaccctgccaaggtcagcaggtgctctccgggccccgagggccaccgcaaaagcttgcccaggccagatcacggctctgagagcaagctccccggcgtcctggccagctcgcacatggagatgccctgtctcgactccttccaggacaaagcgctgaggaattccccaaagaatgaggttttacacacagacatcatgaaagggtcgggtgagccccagccagatctccagctcaccaagagcctagagaaaacctttaagaacatcctggaactcaagaactcggggcggccgccaagcgaccctacggccagcggtgcggcggacctggacttccccagcttttctccaatggcttcgcaggaaaactgcctagaaaaattcatcccggaccacagtgaaggcgttgtagaaacggactccattttagaagcagctgtaaatagtattctagagtgttaatagcagccgtcctcctccagaccctgccccggaccagttacactctctcccagcaaagcaaatggaaacggctcccgtctgtctccagcctgcttggtcctccatcacaggttatcctttctaatctcaccctgttcttttgaagagcaatacatgtcgtcatggctgcggggagacccctcagtacacccacctctctctagaaagcagtccgataggccctccacatttcaagtgttacgaaagtgcttacggccattgttgttcgttaatttgttttgtggtttgtttcttagcactgtcgctcaagaccacagtacacttggccctgggtaaaattttgacaatcataagtcatttcaaaagaacagacttattaaagaaaaatcaaacaggactgatttaaagactttctcactgcagctccaaagtagtggtttggttttgttctgttccagggggagagggtatctgcgtagggaagactctccctgaccagcccgctgagtggtgggtagccggtgctctgcctggaagcccaccgccctggctaagacgccaggagcacagccacagagcatcctcctgacatccagtgctgtgcgatgctgcaaaagcaaagccttgtgtttgtcttcaacacattcgtgctgaattctgtctgagaatggtctgttcttagccccaggtgtacgccctgaaattctcacaggctcactagggaacagtggaagtcagttgtaaggcagcgagttggggaggcaccggggtctccgtgtattccatcaacttaaaagaggtttgcattttataattgggtgaagtcaacataacctatgttctttattatcgctgaattctgttccattcaacctcgttgtcccctttccctcagcccttagccaagcatcaaaaggctttcacttaaaaactgtgttgtactctttcagttgaggcttttgaacgggactctggccttgttcgtgagaatagtagtcaacagtatcagtcattcattcccaaacacagtaaaccaaaggtcacaaccagcaggccactgaaggaaggaaccgaggcaggagacagggggccatgtcctggccccgcccccgctgtgtgtggtccagttcaccatagcgatcgagccttcctctttattatttttgttcctt

SEQ ID NO: 247 - DNA, 4463 bp, Mus musculus
ttattccacgcatggcttgaaatgggtgagaagcagggttgccaggtgtcgggtcactagtttgtcatggatgatgacgatgactcctgtctcctcgatcttattggagacccacaagcattgaactattttctgcacggacctagcagtaaatcgggcagcgatgatgtgacgaacgcagggtattctgcagccaattctaattcaattttcgccaactccacgaacgctgaccctaaatcggccctcaaaggtgtgagtgaccagcttggggaggggcccagtgatgggctgccgcttgcaagcagccttcagtttcttgaagatgaacttgagtcttcacctctccccgatctcagcgaggaccaaccctttgacattcttcagaaatccttgcaggaggctaatatcactgaacagacattggcagaagaggcgtacctggatgccagtataggctcaagccaacagtttgcacaagcccagcttcatccttcttcatcagcatcctttactcaggcttctaatgtttctaattactcaggtcagacactgcagcctatcggggtgactcacgtgcctgttggagcatcgtttgcaagcaatacagtgggtgtgcagcatggctttatgcaacacgtggggatcagtgttcccagccagcatttgcctaacagcagccagattagtggctccggtcagatacagttaatcgggtccttcggtaatcagccttccatgatgactataaataacctcgatggctctcaaatcatactgaaaggcagtgggcagcaagccccatctaatgtgagtggggggcttctggttcacagacagactcctaacggcaactctctgtttgggaactccacttccagtcctgtagcacagcctgtcaccgttccatttaacagcacaaatttccaggcatctttacccgtgcataacatcattattcaaaggggtcttgcaccaaattcaaataaagtcccaattaatatccagccaaagccggtccagatgggtcagcagagcgcgtacaatgtgaacaaccttgggatccagcagcaccatgcccagcaggggatctccttcgcccccacaagctcgccccagggctccgtggttgggccgcacatgtctgtgaacattgtcaaccaacagaacacgagaaagcctgtcacctcgcaggcagtgagcggcacagggggcagcatcgtcatccattcccccatgggccagcctcacactccccaaagtcagttccttatacccacaagcctttctgtcagctccaactcggtgcaccatgtccaggctataaacgggcagctgcttcagactcagccctcccagctcatctctggccaagtggcctctgagcatgtcatgctgaacaggaattcctctaacatgctcaggaccaaccaaccatattccggacagatgcttaataaccagaataccgccgtccagctggtgtctgggcagacttttgccacctctggaagtccagtgatagtcaaccacgcctctcctcagatcgtcgggggacagatgcccttgcagcaggcctcacccaccgtgttacacctgtcacctgggcagagcagtgtttcccagggaaggccaggcttcgccaccatgcccgcggtgagcggcatggcaggacccgctcggttccccgccgtcagctcagctagcactgctcatcctactcttgggcctacggtgcagtcgggggcaccgggatcaaactttacgggagaccagctgacacaagccaacagaacgccagcgcccgtcagtgtgtcccaccgtcttccagtctctgcttccaaatcccccagcaccttgagcaacaccccggggacacagcagcagttcttctgtcaggctcagaagaagtgtttgaaccagacctcccccattcccacatccaagaccacagacggcttgaggccatcacagatccctgggctcttgagcaccgcactgccaggacaggattctggaagcaaaattatgccagcgaccttgggggccacacaggcacaaccagaaagctcagttggatcatccccgagccagacagctgtgcaggtggatagtcatccaggacagaaaaggcctgctgccaaacagctgactaaaggagctttcatcctccagcagttacagagggaccaagcccatgctgtgacacccgacaaaagccagttccggtcactaaatgacacggtgcagagactgctctcctaccacgtgtgccagggctccatgcccacggaggaagacctgaggcaagtggacaatgaatttgaagaggtcgccactcagctcctcaaaaggacccaagctatgctgaacaaatacagattcctgctcctagaagacgccatgaggatcaacccctctgcagagatggtgatgattgacaggatgttcaaccaggaggaaagagcttccctgtcgagggacaagcgtctggcgctcgtagatcctgagggttttcaggccgatttctgttgttccttcaaacttgacgaagctgtacctgagaccccgcttgacaggagtgaccagcatcgcagcaaaaccagctcgctccatcaggtgcccagggcccaaagcagagaccgagccaagccaggcatggcagaagcaacgaatcatgaccagtttcatctagtgcctaaccacatcgtggtctctgcagagggaaacatttctaaaaagtcagaaggccacagtagaacactgaaatttgacagaggggtcttaggccaataccggggtccgcctgaggacaagggcggccggagggaccctgccaaggtcagcaggtgctctccgggccccgagggccaccgcaaaagcttgcccaggccagatcacggctctgagagcaagctccccggcgtcctggccagctcgcacatggagatgccctgtctcgactccttccaggacaaagcgctgaggaattccccaaagaatgaggttttacacacagacatcatgaaagggtcgggtgagccccagccagatctccagctcaccaagagcctagagaaaacctttaagaacatcctggaactcaagaactcggggcggccgccaagcgaccctacggccagcggtgcggcggacctggacttccccagcttttctccaatggcttcgcaggaaaactgcctagaaaaattcatcccggaccacagtgaaggcgttgtagaaacggactccattttagaagcagctgtaaatagtattctagagtgttaatagcagccgtcctcctccagaccctgccccggaccagttacactctctcccagcaaagcaaatggaaacggctcccgtctgtctccagcctgcttggtcctccatcacaggttatcctttctaatctcaccctgttcttttgaagagcaatacatgtcgtcatggctgcggggagacccctcagtacacccacctctctctagaaagcagtccgataggccctccacatttcaagtgttacgaaagtgcttacggccattgttgttcgttaatttgttttgtggtttgtttcttagcactgtcgctcaagaccacagtacacttggccctgggtaaaattttgacaatcataagtcatttcaaaagaacagacttattaaagaaaaatcaaacaggactgatttaaagactttctcactgcagctccaaagtagtggtttggttttgttctgttccagggggagagggtatctgcgtagggaagactctccctgaccagcccgctgagtggtgggtagccggtgctctgcctggaagcccaccgccctggctaagacgccaggagcacagccacagagcatcctcctgacatccagtgctgtgcgatgctgcaaaagcaaagccttgtgtttgtcttcaacacattcgtgctgaattctgtctgagaatggtctgttcttagccccaggtgtacgccctgaaattctcacaggctcactagggaacagtggaagtcagttgtaaggcagcgagttggggaggcaccggggtctccgtgtattccatcaacttaaaagaggtttgcattttataattgggtgaagtcaacataacctatgttctttattatcgctgaattctgttccattcaacctcgttgtcccctttccctcagcccttagccaagcatcaaaaggctttcacttaaaaactgtgttgtactctttcagttgaggcttttgaacgggactctggccttgttcgtgagaatagtagtcaacagtatcagtcattcattcccaaacacagtaaaccaaaggtcacaaccagcaggccactgaaggaaggaaccgaggcaggagacagggggccatgtcctggccccgcccccgctgtgtgtggtccagttcaccatagcgatcgagccttcctctttattatttttgttcctt

SEQ ID NO: 248 - protein, 1060 aa, Mus musculus
MDDDDDSCLLDLIGDPQALNYFLHGPSSKSGSDDVTNAGYSAANSNSIFANSTNADPKSALKGVSDQLGEGPSDGLPLASSLQFLEDELESSPLPDLSEDQPFDILQKSLQEANITEQTLAEEAYLDASIGSSQQFAQAQLHPSSSASFTQNVSNYSGQTLQPIGVTHVPVGASFNTVGVQHGFMQHVGISVPSQHLPNSSQISGSGQIQLIGSFGNQPSMMTINNLDGSQIILKGSGQQAPSNVSGGLLVHRQTPNGNSLFGNSTSSPVAQPVTVPFNSTNFQASLPVHNIIIQRGLAPNSNKVPINIQPKPVQMGQQSAYNVNNLGIQQHHAQQGISFAPTSSPQGSVVGPHMSVNIVNQQNTRKPVTSQAVSGTGGSIVIHSPMGQPHTPQSQFLIPTSLSVSSNSVHHVQAINGQLLQTQPSQLISGQVASEHVMLNRNSSNMLRTNQPYSGQMLNNQNTAVQLVSGQTFATSGSPVIVNHDQIVGGQMPLQQDTVLHLSPGQSSVSQGRPGFATMPAVSGMAGPARFPAVSSASTAHPTLGPTVQSGAPGSNFTGDQLTQANRTPAPVSVSHRLPVSASKSPSTLSNTPGTQQQFFCQAQKKCLNQTSPIPTSKTTDGLRPSQIPGLLSTALPGQDSGSKIMPATLGATQAQPESSVGSSPSQTAVQVDSHPGQKRPAAKQLTKGAFILQQLQRDQAHAVTPDKSQFRSLNDTVQRLLSYHVCQGSMPTEEDLRQVDNEFEEVATQLLKRTQAMLNKYRFLLLEDAMRINPSAEMVMIDRMFNQEERASLSRDKRLALVDPEGFQADFCCSFKLDEAVPETPLDRSDQHRSKTSSLHQVPRAQSRDRAKPGMAEATNHDQFHLVPNHIVVSAEGNISKKSEGHSRTLKFDRGVLGQYRGPPEDKGGRRDPAKVSRCSPGPEGHRKSLPRPDHGSESKLPGVLASSHMEMPCLDSFQDKALRNSPKNEVLHTDIMKGSGEPQPDLQLTKSLEKTFKNILKNSGRPPSDPTASGAADLDFPSFSPMASQENCLEKFIPDHSEGVVETDSIAAVNSIC

SEQ ID NO: 249 - DNA, 86504 bp, Homo sapiens
cgcagaaaccccgttgacaaggcactgctttttcatgacggtgagtttccctttgagtgtattataattttgtgataaaaatttcaaggagaaaaaaaaaacacacaacctccttcctctgcctctttccttcggggaggggaaaagcgagggagggggggctggagatctgtctccagactgaaaagaaaggagcaaattaaacaccgagttgccaaaaccaggatattaggtttcagcccagagagctattggctaaggctgtgttttttttttttttttgggggggggtgggtttgtgggtgggtgatggtggtggtgggtggatgtttaatggacacggagaaaaggggaatcgagtgtttatgcctttcccagcgctgccggggccccgggaagaccaagttcagtgtctcgggcgggggcgcaggcgggcagggggcggcgaggccgggccgggggcgcctcggcggggtgggggcccggcgcctttctttttccttttttttcttttccgcggatgcaaatttctggagcggggagagggagagcccgggaagggggtggcgtggcggttggtggtggggaggggaggggagggaagccttttaatgactcattgattgagccggtttaaaattagttgtgtgcgcgagtgtgagtgtgttttccgccccccggagccgccgggagccgggaaggagggagcagggctcggcgaggggaagacggcgcggcggggccgcgagcagggggcagggagggcctggagtgacggcgggcgaggaagaaaaataagcttttccaatctcctcccctctgttttccccccctcgtttcttttctctctcggaagctctagggtgtgaatcacattttctttcttctcggcaaaatggaccccgcgtctggggagggggaggggagagggtggggagggaggcggcggagacggggtttatttttcatcctggcttccccattcccgccgcatctgcgggcggccgcggcgaggagagcaggtccggggtgcggcggggagagctcggggcaggcgagtcgccccggccccgttcccgctcccgctccgagcccgcggcggcggcgcgcacctgccgcgggactgccccttcccagccgcctcgctgccttttcgaagcaccgccgaggatccgcggccgcgtccggccgagcccccagccgcgcggaggaccggcggcccagccgggcgtctcctgcgaggcccgcgctgttcgccgcgccggccagaagagatgtgcggctgggacggcgcatttttggccgagtgcgcgcgggcgttatgctgttcgcgcccccccgagtcgccccaaatgcgggatattgggtgggggggtgcggttggaaggcgctaagatggcgctgggcctggcctgtcgccagggctggtggcgcagttgctcggcgggcgccatctttctcgcggcgcgggcggcgccctccgaggacatctcgatgaccagggcgccgcgaggcccggggctagcgggagccgagagcagggtgctgaattctggagatgggactggggtcgcgcggccttctccttccccacgcccccagacccaaaagacgaggccgccggctcggagcgggaagggctggggccagcttcttcctcctaaccacttgtttgtgatggaagaagggggctgggggtcgagcctcgcggctgatgggttccctccctgaccccgcacccccactcctcccagtcgaaattggaggtgaggcgctcctgccattttctctcctgcggtctgagagtggacgtctttgtcttctctggcccggcgtgggggcagggcattgagccttttccttaattcttcagttattgaaagtagagtccaaccaggttacaaaactaaaaaaaagagtccaggacattgtctgtctgccttccggtagcatggttctctgtgggtaccctacgctttgtttcttagttttactctaaaacaaccctgaggagacatttactagttgtcagattacgggaaggtgatgggttccagttttttgaaacttattttgttggctttcatattacttcaaatggcagtgaattaaaacagtttcttagaactctaatctgaaaagttaaatacgctttaaaacagtctgaaactcttctaaaaagcaaaactgcattattaaaagcatccatgtaagtatctgttggtagtatctattagagatgggggaggggtttaacttttacattattattgaaaagaggaggggaaaggtctataaagctctgatctctctagaagtccacatacatggaaagtaaatagttaatttctagtgtagaaaaataacaccgtggtgccagtaggtgtgtccttgtgtttataaatatacatagtggatgttttagaccatttaatgagacctattatatattgaatacctgctgtatgccaggaactgtgcctgatgctttgtataatttctattatatcagcccagaaatagtgattttatgatctgtctaccggggaatgaactaacgttcatagaagtatagtaattgttcgaggtcttgcagttttaagtagtaaagttgccattggatcacaaaagctgtattcttccccctacacctatggtttccaaatgtgagcatcagaattaatttgggagatgtttttaaatagagatttgtaacatcacctcttccaccatcatttgctagggccaactgggtcttttaataatgtgtcaggcactccaacttcttgatgttcaatattgacattctggcccaccctgcacccgctatatccaaagatctagtattccaaagctctccaggtgattccagtgacacagacacacgtttggactgtcttgtactatgctatgcactgttctgctcttttttgaattggaacatgagaattgaggtccatgtaattttgagtttcagtagttttttgctcacattagtctcatttttgtttttcctcttgtagctgccatttatcaaatcgaaattatttcctcagagaaaaaggtttaggtatcctaagactttaaaatctcagtacgtttttttttaaagtatgttgtctcattctattgagaagttatacaacatacaggcttctaggtctagccaggccatctagtttagtcaagacagctgtgtaacaaacgtagccttgaggcctggcacggtggctcatgcctgtaatcccagcacttttgaggctgaggcgggcggattacctgaagtcaggagttagagaccagcctgtccaacgtggtgaaaccccgtctgtactaaaaatacaaaaaagctagccgagtgtggtggcaggtgcctgtaatcccagctacttgggaggctgaggcaagagaatcacttgaactggggaggcagaggttgcagtggcccgagaccccaccattgcactccagtccgggaaacaagaacgaaactcccatctcaaaaaaaaaaaaaaaagaattgaatccaggattgatccagaaattgagaatagggtagaaaagaccctgatataaagacctgaagataaatccttaaaagaaaagattgtttcctgaattttgaattgtggacatatcttctgggttttgggaagtaggatagtcaagttatgtggaacctaatagtagaatatggataaaaacacaggtcagggccaggcacagtggctcacacctgtaatcccagcacttcgggaggccgaggtgggcggatcacgaggtcaggagttcgagaccagcctgaccaacgtggtgaaaccccgtttctactaaaaatacaaaaattagccgggcttggtgggcacatgcctgtaatctcagctactcaggaggctgagacaggagaatggtttgaacctgggagacggaggttgtagtgagctgagatcgcgccactgcactccagcctggagacaaaaaacacaggtcaggaagaagcatctagagcaggtgatgaatagatgaccttactaaaatgagaaagaaccaagtcagtgatgaaatcattaatttctctggattaaggatcatggattttattttgtgctttctcttgttgattcttctcaaatcgttgtgtttagtaattgctagggagagtagtttaaaacttagatttttgatgcagatgtcagaattataccatctttgcatatgtccacattggaaaatttttgtaaggagcatttgttggatacctctgtgcagtctgtgtccagtctagaccactaggtgggtggagtgacttccagtttttgaagggaagtcacttctggtttttctccccttgttttttatggtaaatgccaaagtaattataatctttgactagactaaaatccaataaagcttgaaaggagggggaaatctaaaataaacctgcttagagggaaacagtagcttctttaaccttgttggaattttaagaccggcaagatctctgcactcatgaaatttacagtatagtggggaaggacagaaaatagttaaaaaatcaagataatgacagattaagaaaaaatattaagtggctggtggatctaaaagagtatgttgggaatgaccattttggctagtaagggtcaaagaaagtcttttcatagaggtgatatttgagctgagacgtgaaacatgaacttgtgctagccatgtgaaaagctggggagacattccagacctgggaacaagttcaaagacctggaaggctggttgttagactggagagaaggctcctctgagcaaggggagaaattatgaaaagggtaggaatgagatggagttggagagatcctataggtcgtcttgtattactccatgggggatttttggatttaattctaatggcaatgagaggggttttaatttgggcagtgataatgtttttaaaaataactggctatttagaggaagagaggaaacagggaagttaggaggctattgtagtcagcccaagatcgatagtatctcaggcaagtaaagtggcaatgagatacagcagagtagacagcaacttttacatatgtattttggaggtggaatcagaaggatttgcttaatgggttggctgtggagggagagggaggaatcaagggtgccttcaggttgcaggctccagccttgggctgctgatggtaccatttgctggttggagaagactggaggaggaacaggtggagaggagtgggtagcaagagttctgtgtaaatacttgggaggcatccaagcggagagttaagtaggcactgaatatttaagttgagctgaggggagtgatctagactggacataaattttgggagtcactagtatacagatggcatgtcatggaactgattgagattgtttgtggccttaagatcaagccctgcgagactggagtaataaaactctggtctcccacacagccagctctgtgtggggaaaaaaaaaagccctaaaacactaacaacggctaaagcttgggcaaaggagactgaaaaggttcagccattaaagtgggagagtattttattattttcaagaaagagggaatggtcacctctgtcaaatgctgctgagaagttacacaatgagaatagagaaatgtctatttggatttgacaacatgatggtgactgttttgacaagtggtccaagccacattgggatgcttcgaagagagaataggaagtgaggtgaatatcgacagctcgttagggaaattttgctgctgtaaagtggagagaagcagcttagtggcttcagagggagatggggtcaaagaagagggcttttttttttttttaatttttttttaagacaagatgtcactcagtcatccaggttggagtgcaatggtgcaaattacggcttaccacagactcaacctactgggctcaagtgatcctcctacctcagcctctcctgagtagctgggaccacaggtgtgcaccactgtaacccaactaattaaaaaaaaattttttttatagagacagggtctccctatgtaaagaagaaggcttttcttttaaacaatgggaactagataggctaatgagaatatttaatagagaaggtgagactaatccagaagagagaccaagactaccaagggagcagcattctttttttttttttttttttggagacagttttgctcttgttgcccaggctggagtgcagtggcgcaatctcagctcactgcaacctccacctcttgggttcaagcaattctcctgcctcagcctcccaagtagctagaattacaggtatgcaccaccacacccagctaattttgtatttttagtagagacgggtccaccatgttagccaagctggtctcgaactcctgacctcaggtgatccacgcacctaggcctcccaaaatgttgggattataggtgtgagccaccacgcctggccgggagcagcattcttaaggaattcaagacacaggaagaacacttgcctttagtgggagcaagacaacgcagtgtggcagaagacaaagaatgggggcacaagtgcaaggtgaattggaggtagaatataggacttaactttctgacggcttctgttttctcagtgaagtctgaggcaaggccagtgacttaaacaaagaaggggtagtggatgatttcaggaaagatggacacttcaccttgagcaacaggacaaggaactgagtaactgggaaacaaggtagtttcaatgctgggcattgttgaatcccttgccgtggcttggggccatgaatttaaggtgaaaccagtcagctgagttagttgtgtgatttttttttttctcctagcaacattcagctgttatgagggcagcgaagagcaggcaggtgatcagttcacccaaaattcgtgttttgccctgcaggtttgacagaggagaagcagtgccagaggcttgagagtagttgcaagggggtgattttgatgatgaaccttgaaatgttagctgagtaggaaagcaagagaagaatcagagtgggggccatgaaaatcattactggcttaaagtgagttaatgggcgcagagtttcagtttgggaagatgaaaaatttctaaagctggatagggctcttggtttcacagcaatgtgaatgtatgtaatgccactcaaccaaacacttttaaatatttaaaattcagtaactctatagagaaataaagggttttcccaatcctggaaaaaaatggttaaaattgtaaatcttacatatattttaccatagtaaaaaatgaattaggctgggcccatggctcacacctacaatcccagcactttgggaggctgaggcaggcaaatcgtttgaggccaggagttcaaaaccagcctggccaacatggcaaaactcatctctactaaaaatacaaagaaaatagccaggcatggtggcacacacctgtaatcccagctactcaggaggctgaggcatgagaattgcttgaacctggaaggcagacattggagtgagctgagatcttcccactgcactccagcctgggtgacatagctagactgtctcaaaaaaaaaaaaaaaaagaatgaacacttaaatatttgtggcagatagaggtgttatttgcatatggaagaaaattgctttagaaatgaaatttcagattactgaaactaaagagaaagtatctcttcttatcatggtaccaagcttgagggtgcataagtcacctatagacgtagagattgtagtataggacctgggaatattacattatttgctcccatgtttactgttttgttctaagcctttagcacagcattcaaaacaagttgagcactcagtaaacatttgctgactcagtacttggagaacctaggtagagtagaatgatgggaatcaaaaggaaaacagtattctgttagagatcagcaatatcttacactagtagagggatctgtgagaaagaatcaagaccattgaatgtgtggcggcttatagcatttgacattctgatctgtgcacgtgatgagaaaaaaagtctgattacagaacagggaaggagagaaataagcattgagtttcattttttgtttgtttttgagacaggttctcactgttacccagcctggagtgcagtggtacaattgtagctcactgcagcctggacctcctgggatcaagggattcccccaacctcagcctcccaagtagctgggactatagaaatgcaacaccatgcccagataatttaattttttttttttttttttttttttgtagagacaggggtttctctttgtcacccaggctggcctcaaactcctgggctcaagcagtcttcccacctttccctcccaaagtgctgggattacaggcgtgagccactgcatcctgccgagaaaatcattttttatttaaataatgtcaaatggaagtatgtagcacccccccccaccttcttttcccctttctttcctctttgagtctgctgtcattccctttttcatgagttttctctgctccccaaataggctaaacaataaccgtaaagtgagattagagaaaataagaatggagtagatgatggaattcaaaatagctgtctacattcttcactgagaaagatagctttgagttaaaggtgagaggagcaaatctggggaaaaacgggtgaaacggcatgatttaagtagcataccagatgcgtttctgcatggcatggctcttgcttgatgaataatgttctgtatagtagaagaggaaaatacagtgagtgaaggagctggcagaaggtgggctgggggagttggggaagagtgaaatgagtatggagaggtgagagagctgactgcaaaggcatgtggggtgtggattttaaaaggaaagccctgaggtggaaatcactaacatggtgcctggctacaagcagagggagctcaggacttgactgtgctgggggtggcctgcccttttgtagtgcagttgaggagagctcaggggctgtcagaatgctgtgtgggaaggtggaggacgaaagaggacctgggagcagcaactttgttctggtttgttgttttctcttccctacctcgtatgtactcccactcaggaaagatcctgagacctctctgtaccagatcctcttatacccaggttctccttaatcccaatcaactttaatctataaagttacgatttgtttacttataaatttatttttaataaagttgtgaaaccgaacatgttctgtttttgtgggttatttggctctcttatcttgcaaacacattaaacacttaacattacttaaaattaaagccctgagtctgagaatgtgagagaataagatatgaaagatattgcctttctagaaatggtttatttcagttgaacccaaatccaggacactttttttcattaggagttgaactttgtgtcctggcctgaaatggaaacattttcacagggaagaaaatgagggggaaaagaaataatatttgttaaaccttcaccttgtttgagaccctgatgggttctaatgggtttggtttttgtttttgttttttgagatgagaactcactatgttgcacaggcgtgtctcaaactcctgggctcaagcggtcttctcacctcggcctcccaaagtgctaggactataggtgtgaaccactgcacctggcctctgatgggtttttagtaaatacagtcatgtgtcatttaatcacagggataggttctgatgaatgcatcgttaggtgatttcattgtgtacaaacaccatagagtgctcttacgcaaaccaatatggtataacctaccacacacctaggctatatgatatagcctattgctcctgtattgtaaacctgtacagcatgtgactgtacctggatactgtaggtaactgtaactgtatttgtgtatcaacatatctaaacatggtacagtaaaaatatgatacaaaagaaaaaaatggtgcacctgtatagggcagttaccatgaatgaagcttggaggactggaagttggtctgggtgagtcagtgagtggtgaaagaatgtgaaggcctaggacactgtgcactactgtgaacttaataaacaccatacacttaggctacattaagcttataaaatatttttccttcctcaataataagcttagcttactgtaactttttttcttatgaacatttttggtttttttctgagacagtatcttggtcacccagggttgaagtccagtggcgtgatcatagctgcagcctccatctcgtgggttcaagcagccctctcacctcagcctctactgagtagctgggattacatgcatgtaccaccatgcccagctaatttttttttttttttaaatgtagagatgagttcttgctatgttgcccaagctggtctcaaactcctggcctcaagcagtcctcctgcctcagcctcccacagtgttgggattacaggtgtaagccactccgcttggcctagatttcatttaaccctgagactttttagaagtgcaaataagtatatttagaaattgatgctgagtgtggtggcttatgcttgtaatcccggcactttgggaggccgaagtaggtgaatcacttgaggtcaggaatttgagaccagcctggccaacatgaagaaaccccatctctactaaaaatacaaaaattagccaggtgtggtggcaggtacctgtaatcccagctattctggaggctgaggcacaagaattgtttgaatctgggaggcggaggttgcagtgagccaaaatcgtgccactgcactccagactgggcgacgagagtgaaactctgtcacaaagaaaaagaaaaaaaggagaaagaaattggctggctggtttattttatttattttttgagatggaatctcactctgttgcccaggctggagtgcagtggcacaatctcagctcactgcaaactccacctcccgggtttaagtgattcttgtgcctcagcctccccagtagctaggatttacaagcgcatgccaccatgcccagctaatttttttttttttttttttttttttttttttttttttttgagacagagtctcgctctgttacccagactggagtgcattggcgtgatctcagctcactgcaagctctgcctcccaggtccatgccattctcctgcctcagcctcccgagtagctgggattacagacccagctaatttttttttttttttttttttttttttttgtatttttagtagagacggggtttcactgtgttagccaggatggtctcaatctcctgacctcatgatccacccgcctcggcctcccaaagtgctgggattacaggtgtgagccaccatgcctggctgctaatttttgtatttttagtagagatggggtttcaccagttggctagtctggtctccaactcctaacttcaagtgatccaccagccttggcctcccaaagtgctgggattacaggcgtgagccaccgcgcctgaccaggttggtttattcttattttccatttgtattgtgattctccaaatctgtgagagttttaggatggagaaatctgtgaaagtcaaccccttttctctaggtgtaatcacacaacatgaaggtttacaactgggatgtttttggcgctacttctatgcgtaggcctcaagatgacttttttttttttttttttttttttgagacagggtcttgctctgttgcccgggctggagtacagtggccccatctcagctcactgaagcttcactagtagctgggactacaggtgcacaccatcatgcctggataatttttgtatttttgtagagacagggtttccccatgttgtccaggcttgtctcgaactcctggacaagatgacatttttatttttatttttatttttatttttattttttaaaatgtaaaactatgttacttgtttataaatcagattaaaagaaaaaatttgagacaggggctcgctgtgttgcccaagctggtcttgaactcctgagctacagtcatcttcctgcctcagcctcccagatagcacggattacaggcatgagccaccgctcctagctactataaatctgactttatatgtcacatgatgtacctagaatttatttttttacagcatgtgtgatagagataaagcaatctgacagttaatttcaaaagagaataatacaaagaaaaatgacatttgggtaaccatgttgtttaaaaaaaaggctcaagtgctttaacttagaaatgcagaacatattctgttacataaaatacttaatgccggacaaaattcacttactctgtgtgtgtgtgtgtgtgtgtgtgtgtgtgtgtgtgtgtgtgtttggctatgtacccatgaccttgaactcctggagtcaagtaatcctcctgcttcccctgccaagtagttgagactacaggtgtactccaccatgcctggctctattttatatattttataagtactaatatattattctctgttcttttttcatttgaattgtcaagttttaaggctaagctagacatatcaattaagaacttactgtaagtggctgggcacagtggctcacgcctgtactcctagcagtttgcgaggctgaggcgggcggatcacttgaggccaggagttcgagaccagcctggccaacatggtgaaaccccctctctactaaaaatacaaaaaaaaaaaaaaaaaatagccgggcgtggtggcgggcacctgtaatcgcagctattcgggaggctgagacaggaggattgcttgaacccgggaggcggaggttacagtgagccaagatcacgccattgcaatccagcctgggcaacaagagcaaaacgccatctcaaaaaaaaaaaagaaacttaccataagtcatgcaagagtctatttactgatctctccaccaatactcacaaagagaattacgcatgaacgacagtcaaggtaactgaaaagatctacatctattgttagaaagttgtctaacttgttttccaaaactttctgctattagatttaaaaacgtgacaaaaagtcgggtgcggtggctcacacctgtaatcccagcactttgggaggccaagactggtggatcacctgggttaggagttcaagaccagcctggccaacatggcgagaccccgtctctactaaaaatataaaaattagctgggcataatggtgcacgcctgcaatcccagctactcaggaggctgaggcacaagaattgcttgaacctgggaggtggaggttgcagtgtgccgagatcgtgccactgcactccagcctgggcaacagagagcaagactctgtctcaaataaataaataaatatctataaataaaatgtgacataaaacctatttcacattgttttatttctgtcatatattacctaaattcccaagatataattattatttaatagatgttctatgtttcaaattaccttactatcaaaaattaccttgagcttgactctcaagcatatctttaggacataagaggctgtgaaagtcacagaataaatattttcagagcatgatgtggattttgtataatgtatatgcacctttaaaatatgttccattcttttaagattaacttttaaaattaaatgttctaatatttttcttacatcatattgctttctagaatgtttcttttctaagcggaatgtcttgttttgaaaattattaccataactatctactctgaaataaaaaggcactgcagtgatatttcatcatcaaatatttattaaatgctaaattggtgtaaagcatttggagggcacaggaacacataatctaggcagttggatcatatgtacacacataaaactacacaacagtgtatggtaagtgccaaatgattagtacaagcaagagcaaaggagagagaacctttgactgaggtggtgtgagagcatctattcatttatccattcagcaaatattattgagcacataatgtgtgccaggtgccattctaggctcccaggatgctgcagtgagcaaaagaccaaagccctgttctcttgggaaagacagacaataaacctaagtagactttgtagtatgttatggggtaaacatatagaaagataggaagacggggagtgctggggtgtgggaagattgtctggtaggtcatgattgtctttgagcagagtcttgaataagccttaagcctgaggatatctggaggaagggcattccaggcagacagcagccagtgcaaagggcctaagatatgagcatgcattttgagttctgggcgtggcaaggtagcaagggctagaatcaaaagggatcagagaggctggggagcagagcagttgtgtagaacattacgggtgttcacagtcgagcacataaaagaattttggtttttacatgggaggaaatgaaggttcattggagagttttgatttctgttttaaaagggtcacttctggaatttgggttgagaatagattctagactataaaagagcaaaagcagagacagccagtgggagatgatgatggcttggaccagagagatggtagtggaggtggtacatgttggattctagatgtttttttgaaggtatagccagtgggatttcctgacatatgcgatgtgggtataggataatgagctgtcggccgggtgcggtgctcacacctgtaatcccagcactttgggaggccaaggcgggtggatcacctgaggtcaggagttcgagaccagcctgaccaacatggagaaccccatccctactaaaagcacaaaattagccaggtatggtggcgcatgcctgtaatcccagctacttggaagactgaggcaggagaatcacttgaacccgggaggcagaggttgcgtgagctgaaatcgtgccattgcactccagcctgggcaacaagagccaaactctgtctcaaaaaaaaaaaaaaaaaaaaagctgttaagggttacatgtaggaaatggaatttgaactggagcctaaaggaaaaggaagattttgttgaccaggaaaagatacataagcagaacttatgtataagatacataaggaaaagatacataagcagaacttatgtataacttataagaggaacttaggtggaaaagaaccaatttaggttgggattttataagagaggcggacagtaaggagacttctttggatgaagtgagaagtggaaggctgggaagggaccttgcgatcagtttgtgaaatgcagtaaatgtaaggccaaagtatttgaattttcttttatacgttaaaatcctaaaggttttcaagcaaggagtgatttgacttaaaaaggaaaaaaaaaagttatagtcaataacagctttggaatcagaccgatctgagttctagcatcttgctgtaggtaatgccttgagtgagtaacttccctgagggagtgtgcctcagtttcttcctctggatagaggacttacgtttcagagggagtttgaaaggattaagtgagatcatgcatataaagcattaacataatgccaacccatttgggtctcagctatcactgtttttttaaattattaaattgttataggcctggtgcagtgactcatacctgtaatcccagtactttgggacgccaaagcaggtggatcacctgaggtcaggagtttgagagaccagcctggccaacatggtgaaaccccatctctacaaaaattgcaaaaattagccgggcatggtggcacatgcctgtaatcccagctgctccagaggctgaggcaggagaatcacttgagcctgggaggcagaggtttcagtgagccactattgcatcactgcactccagccttggtgacaaagtgagacaatgtctcaaaaataaataaataaaatggtggacccagatatggaaaagaatgatatcatgcccttcgcagaaacatggatggaggcagaggtcattatcctaagtgaactaactcagaaacagaaaatcaaataccacatgttctcactaataagtaggagctaaacaatggtacgcatggacataaagatggaaataatagacactagagactttaaaagggggtagggagggagggaagtgagggttgaaaattacctattgggtacagtgttcactatttgggtaatgggtacactgaaagcccaatccccaccagtatgcaatatacccatgtaacaaatatgcacatgtactctctgaatctaaaattaaaataaatctaaaaaagagtcacataaactagaaaaagaaaaaaaatttttttaattagaaaaaaaaaggtgggccgggcatggtggctcatacctgtaatcccagtactttggtagcccaaggcaggcagatcacttgaggcaaggagtttgagaccagcctggccaacgtggtgaaaccccgtctctactaaaagtacaaaattagccaggcgtggtggcaggcaccagtagtcccagctactcgggaggctgagataggagaattgcttaaacccaggagggggaggttgtagtgagttgagatcaagtcactacattccagcctgggtactgtctctaaataaatacataaaatcagaaaaaaaattgtgtagtgtttgcatataacctacacagatcctcccatatactttaaatcatctctagatttgttttaatttttattttttattactgctccttgcggagcgtggctaccccataggcagcatgcccagagtagccagtcatttctagaatatttacaatatctaatacaatgtaaatgctatgtaatagttgttagactatattgttttaaaatttgtattattttttattgttatattgtcattttttgttttacttttcctaaatattttcaatctgtggtcatttaaatctgggggtgcagaacccatgaatatggagggctgactatattaacagtgcctggaaattttttacccagtagaaatatgtattagacacaaggtctcactatattgcccaggctggacttgaactcctgagctcaaatgaacctcctgccttggcctctcaaagtgctgggattacaggcaggagccaccatacctggctgaaatatttttatatcacattatactagcagatatcttgaaatattactgtcttccaaatgagggtagttattagattcaccactaaatcttttttttttttttttttctgagatggagtcttgctctgtcacccaggttggagtgcagtggcgcgatctcagctcactgtagcctcagcctcctgggttcaagggagtctcctgcctcagtctcctggctgggactacaggcacgtgccaccacgcccggctagttttttgtatttttagtagagatggggtttcaccgtgttagccaggatggtctcgatctcttgaccttgtgatccatgagcctcagcctcccaaagtgctgggattacaggcgtgagccactgcacccagcccatcaccaccattcttttccagaagtgttcatcttctccaactgaaactatgtatctcatgatctcttgatacaaataattacaatacaaattccagttcacatggcatttcttaggatttattaaagatttcagtagatagaagtttatgtctcttaaagagagtttagaaagatgacattaaatcaatatctttaaactctttgtagaaactcattgtgaaaccttgcttggagtaatatgctacaaatatatttgtccatattctttcttaaatatttatttatttatttatttatttatttgagacagaatcttgctctgtctcccaagctggagtgcagtggcccaatcttggccgactgcaacctccgcccccaggttcgagcaattctcctgcctcagcttcccgagtagctggaattacaggcatgcactaccacattcgggtaatttttgggtttttgttttgttttgttttgtttttttaaaatgcagtctcactctgtcacccaggctggaatgcaatggcacaatctcagctgactgcaacctctgtcttccagcttcaagtgattctcctgcctcatccttccgagtagctgggattaccggtgcctgccaccatgcccagctaatttttgtatttttagtagagatagggtttcactatgttggccaggctggtctccaactccttaccttgtgatccatctgcctcggcctcccaaagtgatttttttaatttttagtagagatggggttttgccatgttggccaggctggtctccaactcctgacctcaagtgatccgtccacttcggccccccaaagtgctgggattacagggctcagccaccacgcccggccttaaatcatttttaagcttaaacaaaagcactcttgttttctccttgctaagaaactgattttgtccacacatttttttttcttttttcttttctttttttttttgagacagggtcccgcttcatcgcccaggctagagtgcagtgctgtgatctcagctcactgcaacctccgcctcctgggttcaagagattcttgtgcctcagcctcctgagtagctgggactacaggcacccaccagcacatccggctatgtccacacattttctatttgagtctatctttataaaagggaatcctcagtgtatcttccttggtaacattgactttgtaaaatggaattttgtttgttaacattgttattttcatagggtttatttttcttggaacatgctataaaaccaaaatattttgaatgttactcattgacagagagcaaagagtcaagagttttcataataactttaatcagattgctaatactgatgcttaataaaagaaatatacggccaggcacagtgactcatgcctgtaatcccagcactttgggaggcccaggtgggcagatcacctgaggtcaggagtttgagaccagcctggccaacatggtgaaaccctgtctctactaaaaatacaaaattagccaggcgttgtggcaggtgcctgtaatcccagctactcaggaggctaaaacaggggaattgctagaacctggaggcagagtctgtggtgagccgagatcaagccactgcactccagcctggctggcagagcgagactctgtttaaaaaaaaaaaaaaaaaaaagagagcgagagagagaaatctacattttgtttataattactgacattttgaattttttaaagcagttacatacatagggaccagaatatatttaaacgacactaagaaatggtgtcctactattaagcagttttgactttaatagctcaatttttaccatactgtattttagtgaatgttttgactgtgggctaggaatgcaaacggcagtgtcccatcttttttactatttatgactggcattgtacaaaaatgtccatagtctgtaaaagtggaaaaaatcatattggtagtagtattgcttttatttcatttaaaatgttctctaaaataggtcagatgtggtggctcataccttaatcccagcactttgggaagcagaggcaggcggattacttgaggtcaggagttcgataccagcctggccaacatggtaaaaccctgtctctactaaacatacaaaaattatccagctgtggtggcgcacacctataatcccagctactcaggaggctgaggcaggagaatctgcttgaacccaggaggccaagattgcagtgagccgagatcacgccactgtactccagcctgggtgacagagtgagactccatctcaaaaaaaataaataaaaataaaatgttccctaaaataaattccctttgcattaggaaaaacataaatgacttagataaatctccattttgtttaataaaatatatcataatgctgggcatggtgactcatacctataatctcagcactttgggaggccaaggcaggaggattccttgaggccaggagtttgagaccagcctgggcaacatggtgagcaatcccttctgtatgaattttttaaaaattagtacagtggcatgcacctttgttttcagctacttgggaggctgaggtaggagaatcactttgagccatgttcatgccatcgtactccagcctgggcaacagagcaagaccttatctcaggaaaaaaagaaaaagaaaaagaaaaaaaatacatgcatatgcataaatattttcctgaataaaactagaaatcagataagtatcagagcagtttctatttaatattcagatagtttgtctttattgagaatatataagtaagacttacttttggctctttcagcttttcgtgtttttttttgttgttgttgttgttgttgttgttgttgttgttttgagatggagtttcgcccttgttgcccaggctggagtgcagtggcacgatctcggctcactgcaacctccgcctcctgggttcaagcgattctcctgcctcagcctcctgagtagctgggattacaggcacacaccagcatgcccagctaattttttgtatttttagtagagacagggtttcaccatggccaggctggtcttgaacttctgacctcaggtgatctgcccacctcagccttccagagtgctgggattacaggcaggagccaccgtgcctggccttttttttgtttttaatagagatgaggtctcactatgttgcccagactggtcttgaactcatgcacataaacagtcctccgtcctcagcctcccaaagtgctgagattacaggtgtgagccaccacacccggctcctcatttctcaatcatttcctgtgtatggttttccatagttatcaaaatgccctcacactctcttagaaaacacagtaaagaagtataaaaacatttttgtcagggcatctggtttttaatatattgtagagttgtcttttctttaaggtctagtgttggtatactcactagaccttaaacccatacctggctgtgccagaaattcttcaacttagacatttacttccgagtcttttaatgaaccacaactattattaatataataaattactgtgctaaatgtttggagacttcaactaattattttatatttatgttcagcacataaatccctttataaggaggtttgttaaatattaagtggattatcttggaaggacacacaatcttttattctgtggatctttaaaacttgtatttccttacgcctgagagaagtgaattgtctgatttggagcagatgtggggaatcagttgattcctcactttttttacactggcttgatagatgcctggctggataataagggtccagcattagtcagtggatcctggaccatggaggaccaggcctgcatcccaaatcctgtgctgtaccatcgtcaaaaagtgctcacatgtagccttggtgcatattcttggaaagtaaattagtaactgacattaaccctaaaaatgtcctttggaaaccagaatcttaggaaagtaattgcattgggtaaacagttattaggcatgtatgtatcaggcattgcactaaactctgctaacacagaaatgaaaggaaactcatccagttttcatggaacttgtaagccagtggggaagtcagaaaaaccaagtatactcatatgttgcttaagaaggaggatacgttctgagaaatgcgtcgctagacaatttcattatcttgtgaatatcagagtacacttacacaaacctagatgatctagcctactgcagacccaagctatatggtatagcctattgttcccaggcacaaggctgtgcagcatgttactatactgaatactgtaggcaaccataacacaatggtaagcatttgtgtgtctaaacctattcacacacagaaaagaaacactaacaatatagttttttgttattgttgttgtgtttgtttgtttgtttgtttttttgagacggagtttcgctcttgttgcccaggctggagtgcaatggcatgatctctgctcactgcaaactctgcctcccgggttcaagcgattctcctgcctcagcctcctgagtagctgggattacaggcatgtgccgccatgcccagctaattttgtatttttagtagagacaaggtttctccatgttggtcaggctggtctcaaactcctgacctcaggtgaaccgcccacctcagcctcccaaaagttctgggattacaggcgtgagccactgtgcccggccagtattatactcttaagggaccataatcatatatgtggtccactgtgtatgaaaggttgttatggggatgcatggctgtattgtcatacatggtgctggtaagatgtcagatgtcctctagggatatgaataagtgaataatgaattttgcttcgggatttaaataaaactaaagaaaggcagtgtcattttactcaagacctttaggataagtaggcattgtcagttgaccgcttggaggtgggtgggaatgtcttctaagtaaaaggaacatgcaaagtcaaataattgaaaaactgataagttttggggacatcaagtggtcaaggtggcaaagaactaagggcttcttacagggacaagtggggtgggtagagacacaaatgaggctagctagtgcctattgtaatgagccagtatattcagttctctgatgccaaaaaaccatacagtctaaaagttgcctgccttcgggatggcagaattaagtgctgtctcatcagcactctcatagcactttatggtgtgtgtattcatttatatttgggctctgcttttttaaaaaaattgggcctcgctatgtagcctagtctggtcttgaactcctgtcttcaagcgatcctcctgccttggcctcccagagtgctgggattacaggcgggagccactatgtccagcctgcaccctgctttaattgggaacataagataagcataatgaagataatcgcacagagcagtgtctgatcagtgtccaaagatgtagttgctgctttcagaattctgggcagagaattctgaagacaggctgaggttgtcagagaaggattcacagagatcagatccaaattaatttttgaataatggttgtattttcagtagacatgggagaggaagaagagcatttcaagtaaggaaatttgtcacctggacaaagacagatgctgggaaagtgcatcattgtgtttggaggctaggagagtggcagtgggctagaatagagggcaggggaaatagtggaaaataactttagccctattgtatgttgtcagcttaaataaaagtctttgttttccactttagattgttatcctataggaataacctggtctccaaagtaagaaaaatatgctttcttggaaaactgaggttttcaaggaaaagtgaataaacacactctccctgtgtgcctgcttctgttgcaggtttgccatcctgtgaccaacacattagaaagggtgctaagttcatttttaaaatatttcctgagttcctattatgtgccaggggctattctgggtgctaaggttcattggtgaacagacacaaacctctgccctgatggagctgactttctaatgtaaatatgagtcagtgtgctaaagaggacaaggaacgggccaggtgcggtggctcacacctgtaatcccagcactttggaaggccgagacgggtggatcacaaggtcaggagattgagaccgtcctggctaacacgatgaaaccccgtctctactaaaaataggaaaaaattagccaggtgtgctggcgggcacctgtagtcccagctacttgggaggctgaggcaggagaatggcgtgaacccaggaggcagagtgtgcagtgagtcgagatcatgccactgcactccagtctgggtgacagagtgagactccatctcaaaaaaaaaaacaaagaaggaagaagtagagcaattatttggtgggaaagagtaaaaaaagattgatactgaaggtggcttagggtgatgcattcccaaataagattttgcccacagcatctttccttcagtcaggttgccaagataacgggattctccccttaagtttggagagttggagcctcagtttgtgtttctgagtcaaccagaggcccttgtttgcaggtcccacctgactccactcagacctggaacaggttccccaatttgcctgaaattttcccaggggcaactagtaacccagattccagatgaatcagaatctccagggttggggcaggggaggacaggactccatggtttttgttttcttgaaacagagtcttactctgttgtcgagggcagtggtgcagcgatagctcactgcagccttgaccttccggctcaagcaatcctctcacctcagcctccccagtagctgggaccacaggcatgtgccaccacacccagctaatttttttttttttttttgagacggggtcttactcttctggccaggctggagtgcaatggcgccatcttggttcactgcaacctccacctcccaggctccattgatcctcccgccttagcctcccatgtagctgggactacaggcatgtgccaccatgcccagctaatttttatatttttttagtagagacagggttttgccatgttgcccaggctggtctcaaactcctgaactcaagcgatctgctcaccttgacctcccaaagtgctaggattacaagcatgagccactgtgctcagctggtatttcatgtttgtttgtttgtttgttttttgagacagagttttgctcttgtcatccaggctggagtgcaatggcacgatcttggctcactgcaacctctgcctcctaggttcaagcaattctcctgcctcagcctcccaagtagctgggattacaggtacccgtcaacagtcctggctaatttttgtatttttagtagagacacggttttgccatgttggccaggctggtcttgaactcctgacctcaagtgatccacccgcctcggcctcccaaagtgctgggcttacaggcgtgagccaccatgcccagccattcatgtttttaataaccaactccagttcatattattattattatttatttatgtatttagttatttattttgagacagagtctcactgtcaccgaggctggggtgcagtagcttgatctaggctcactgcaagctccgccttccgggttcatgccattctcctgcctcagcctcccgagtagctgcgactacaggcgcccgccaccatgcccagataattttttgtatttttagtagagatggggtttcaccatgttagccaggatggtctcgatctcctgaccttgtgatccgtccgtctcagcctcccaaagtgttgggattacaggcatgagctaccacacccggccttcatattattttgaagcaaatctcagatgtcatttttttttcattcatacctatttcagtatggatttctaaaagatacagattctttttttaaaaaatgtgatccctgaggtcaagtgattgagaccatcctggccaacatggtgaaacccccatctctaaaaatacaaatattagctgggcgtggtggcgcgtgcttgtagtcccagctactcggtaggctgaggcaggagaatcgcttgaacctgggaggcggaggttgcagtgagccgagatcacaccactgcactctagcctggcaacagagcgagactccgtctgaaaaaaaaaaaaaatagtgcacgcctgtacaactgaaaaaatttaacagaatgatatatttataattcatcaggaattacagaatttcaatgctgatggactctgggaaattgtaaatttgtaggattaacctaggattatggaattatatgagcttttaattaggcaaggtctttgggagcacagtctccatacaaaacacagctgccttatatttaaaacctgggtattttttcaatatttattatacccacttatgtgctatttgctggggatatgaagacaaatatgatgagattcctgtttttgagggtagtactataatatcttttttttttttttttaatacggagttttgctcttgttgcccaggctggagtgcaatggtgcgatcttggctcactgcaaccttcaccttccaggtttaagcgattctcctgcctcagcctcccgagtagctgggactatgggcatgcaccactgtgcctggctaactttgtatttttagtagagatggggtttctccatgttggtcaggctggtctcgaactcccgacctcaggtgatcgcctgcctcagcctcccaaagtgctgggattacaggcaagagccactgtgcccagctgtttatcttaatgaaatgtgggccctatatgtatacctattctcttgcttgctaaaataatcatggatgtcttgattttcacggatttctgtttccattgccagattcaccattgttgatgatcattcctttataatagatgacaagtcatggacttctgggagtttgggagctggttaagtgaaatgattttcaaacttttttcttgcagttgagtaagaattgagctactcagctgaagggtgtgtgtgggggagagatgggagtgtgaagagtgcctccaccaccagctgttttaggcctccaagacagctcctggataccttaaagaatactgggtcccaaagttaaacactcaccgatgtggtctgttaagttcattaagaaatgggaaacaggacccagaggttggagcttctttgtcgtcacatgattagtcaatgtcagtatccaaaacaagccctgtgacttccaaattcagtgtccttgccctgtgtctccagcctctgtaaagccttgccagaaattctccccagcccccttcatggttggtcactctttcccccatgttatagcacatttttttgccagctggattgcttagtatgttaggcttatttctttttttgttgtttttttaatactttaagttctggcctcccctagcccccggcaccccccccaacaggccccggtgtgtgatgttcccctccctgttctcattgttcaactaccacttataagtgagaacatgcagtatttggttttctgttcctgtgttagtttgccgagaatgatggtttccagcttcatccatgtccctgcaaaggatatgaactcattcttttttatggctgctgttaggcttatttctgccccacctcattcctacctcaagtaggaattaaagcagtttaaagaccttcaaattcttcatttcatgagatgaacgagggtcgtttattgcctatgttaattgtcgtcttttccaactatgagaatttttttttttttttttttttttgagacagagtttcgctcttgttgcccggactagagtgcagtggcacaatcttggctcacggcaacctctgcctcccaggttcaagcgattcagattcaagcctcctcacctcccagattcaagcaattctcctgcctcagcctcccaagtagctgggaccacaggcccaagccaccatgcccagctaattttttgtattttttgtagagatggggttttgccatgttgcccaggctggtctccaactcccgagctcaaccgatccacctgcctcagcctcccaaagtgctggaattataagccaccgtgcccagctgggaatttttatttatttatttttctttattttttgagacggaatctccctctgtcacccaggctggagtgcagtggcatgatcctacctcactgcaacctctgcctcccaggttcaaccaattctcctgccttagcctcctgagtagctgagattataggcgtgtgccaccacacctggttgagttctgtatttttagtagagacggggtttcaccatgttggccagacttgtctcgaactcctgaccttaggtgatccacccacctcagcctcccaaagtggtgggattacaggcgtgagccactatgcccggccaaatttttaaatttctaagtctttcttgtaataatttgccttactcttttccacccactcctccttgcttttaggaggccctagctgatgacaaaataaatgaagaaatccttggttgaataataactaaaaaacttaaagccaatcatgctgagtttgacagcttcttttctccccaaatggatataattgtgaaaatattgtcatgttttcttctagcaaaacgtcatattatttcacaaaaagcccagcgatttcacctgaagaagcttgggaactcctgccaaaaattgtagcacttctcacattgcaatggtaatgaattgttgcatgtctgtcttccaaaagaaagtgagttccttcaaaacgggaaccatgccagaaggtgaagtcttgcaatttcaaaatgtaacagcacagaacaattacaatatagtaaaaagaataagatgagaatactttacatccttatcgacatgaatcgttatttgccctgcataagtggctattcatggcataactttttgatgatgacacccattggaaaactgtttgctcaaacacaatagttcacttttcagccttgcttcttctgttctacaaaatgtgaaggatttttaaatttgttattacatttatgtcatactattttatattcccaccccctagcatagtacctggcactagtgtttgttaaatgaataatgaatattctttatgcccattgaatagctttattagagacaggaattaaagaaggagcctttctaatttcctaagctgtttttcaagggtagaaaacaaaaggaggcacaggagaaaactgtataaacaatttaaatatctgtcctccttccttctccctttctcctattctccctctttctgaatactctgatcctataatctctgccgatgaactcatataaccccttcaagagatttggttcaagaccttataaatgactatggggccaaaatcgagtaaccgggtctggatttaacttcctgtgtagaaatggtgaaaatcagacacaatatatgaaataatggtattttagatattagatatcaggcagcacaggacagtgactcctgagaggacaaaacaaatgagatgagccctgtaaccaacccagcttactgtcaagagtgtttccttaccatagctcaggggaggaggaatccacaggaaggctgataatcttcctgagttgagctgatgtctctgagaggttaaaatggcctaagtttggccgggcacggtggctcacgcctgtaatcccagcactttgggaggccaaggcgggcagatcacgaggtcgagagatcgagaccatcctagccaacatggtgaaaccccgtccctactaaaaatacaaaaattagctgggcgtggtggcgcacgcctgtaatcccagctactcgggaggctgaggcaggagaatcacttgaacctgggaggcggaggttgcagtgagctgagattgcgccactgcactccagcctgctgacagagcgagactccatctcaaagaaaaaaaaaaaaaaagcctacgttcccagggtacccagagtaccagagagagagagcactgcactccactctactatctggagatctacagagtctttctcaagttttcagctgataactgatgtgtttaagaaaacttcctaagttctgggaagaaacactacttggagctcacatagggcagagaatagtttgtgttcccatctgcaagagtgcaaaaacccttgtaattcatgggatatcagatgaagtactcagaagggtatttattgcctcactatagggcaaaatgaatcctaaagattgacaaagcttaaaagcaatccttaaaaggatcagacattttgtaaagaaactttgtaaagtaacttaactgtgtcctagacaaagctcaaaaatatccaacacctgataatgtaaaattaacaatgtctgacatccaataaaaaaatgaccaggcacgcaaatttgggaccaaccacaacaacaaaatcaatcaatagaaagagatgcagaaattatacaaatgatagaattaatcattttttttgttggccagatgaggtggcttatgcctgtaatcctaacactttgtgtggcggaggtggcggattgcttgaggccaggagtatgagaccagcctgggcaacatggtgaaaccctgtatctacaaaaaatacaaaaattagctagccatggagctcatgcctgtaatcccattactttgggaggctgaggcaggaggatcacttgagaccaggggttcaagaccaccctgggcaacacagtgagaccctgcctcttcaaaaaaaatttgtttaagttgttactatcttatataagttcaagaaaatagtggaaagattaaacaaataatggcatggaatctcatcttgggccaagacaacaaagcaaaaaaaaattttaaataataatgacatggagtattttaaaaagacccaaattgaacttctggagatgaaaactacagtgttttaaaataaaagcgcactggatgggattaacagaagattagagactgcagaagaaaagatttatgaatctgaagatatatgaatagaagctatcctaaatgaaagccggagagattaaaatactaaaaaaggccaggcatggtggctcacacctgtaatcccagcactttaggaggccaaggcaagaggatcgcttgagcccaggagttcaggaccagcctcctggacaacatagtaaaaccctgtctctacagaaaatacagaaattagctgggcatgatggcaagtgcctgtggtcccagctactcaagaggctgaggtgggaggatcacctgagcccaggaggtcgaggctgcaatccgctgtgatcctgccactgcactgctgcttgggcagcagagcaaaaccctgtctcaagaaaattagtaaattaaattaaaaaaataaaagactgaaagaaaatacagcatcattgagctgtgggacacttcaaatagtctaatgatgtaattgtagtccccaaagaagagggaggggcataaaatatttgaaaaaattaatgactgaaatttttctaaattggagggaaactataaacctgcagattctagaagcttagtgaaccctaaccactggaagcatgaagagaactacaccaaggcttttcataatcagattgcttaaaaccagtggtaaagagaaaaatatttaaagtgtccagaggaaaaaatgacacattatgaaaaaaagaaaggtaagaatgatggcagacttttctttggaaataatgcaaatgagaaatagtacatcagtatctttaaagaactgaaaggaaaaaaactcatcaatcttgaacaatatgcccagtgaaaatatatttcaaaaacgaaggcaagataaacactttttgtgggggtggggatagaatctctgtctgtctcccaggctggaatgcagtcacacaatcacggctcactgcagcctcaacctccccaggctcaggtggtcctcccacctcagcctcctgagcagctgggattacaggtgcgcaccaccatgcccagctaatttttttattttttgtagaggtggggtttttccatgttgcgcaggagggtctcaaactcctggattcaagcaatccacccacttcagcctcccaaagtgctaggattacaggcgtgagccaccgtgcccatctcacactctttaaagatatatcaaaactgaaagaattaatcagcaaagacctgcactacaaaaaatattaaaggattcctttcaggagaaggaaaatgataccagatggaaatctggatttacttaagagaatgaagaacactagaagtagtaaatatgtcagtaaaaataaagtgactgcagttcattttaccttcaataggtccgggggtaaaaatgtgattttgaagactgcaactattccgtagttcatgtctgcttaaagtctctcaataatttgctaacctcagcaccttttagaggtaaatttgtttgtaaattattaggaagttatgactcatgttatagcaacttactacaagtaaagcaaatgtcagtagtttttggtaaggtatctcgtattggctcttggtgggtttttttttttttttttgagacacggtctcactttgtcacccaggctggagtgcagtggcgtgatctcagctgactgtagtctcaaccccctgagttcaagccatcttcactaggctatatacatacacatatgtatatgtatatatataaattatatatatacacaacacacatgtatacatacatatatatacacatacatgtatgtatatgtatatatacgtatacatacatatacatgcatgtgtgtgtgtgtgtgtgtgtgtatatatatatatatatatatatttttttttttttttttttagatgaagtcttggtctgttacccaggttggagttcagtggcacgatcttggctcactgcagcctctgcctcccaggttcaagcgattctccttcctgccttagcctcccaagtagctgggattacaggcatgcgccaccatggtcggctaattcttgtatttttagtagaacagggtttcaccatgttggccaggctggtctcgaactcctgacctcaggtgatccgcctgcctcagccactaggctattatttttgaaagaagcaaaagaacagataagcagataaaggaggaaacaaaaacatttgtaatagtggccacataccaaatttcagtttgcgcagtctttgaaatcctgttctattacttttttttttctttttttttgagacagggtctcactctatcacccaggctggagtgcagtggtgcaatctcagctcattgcaacttccacctcctggttcaagagattctcatgcctcagcccccatagtagctgggattacaggcacgcaccaccacgcctggctcattttttttgtatttttagcagagacagagtttcaccatgttggccaggctgttttatgactcctaagggtgaagtttggttttcttccattgctactggtcagaatatcttttttttttttttttttttttgagatggagtctcgctctgttgcccaggctagagtgcagtggggcaatcttggctcactgcaacccccatctcctgggatcaggcaattctcctgcctaagcctcccgagtagataggattacaggcatccaccaccacatacagctaaattttttgtattttcagtaaagacagggtttcaccatgttggccaggttggtctcaaactcctgacctcaggtgatccgcccatctcggcctcccaaattgttgggattacaggcgtgagccaccgtgcccagcccagaatatcttaaataggcaaaactgatttgctgaactgggtttcctgaaatatctgttcttgcaaccaattatgtttcttcatgagagcttagattttctccctctgtgtggaaaaaaaattaatacactgttatatctctgccttggaggtctttgaagttttgctgtgaacttaattaaattcagactgtttttaagatacagtatttcttggccgggcgtggtggctcctgactgtaatcccagcactttgggagcctgaggtgggcggatcacctgaggtcaggagttcgagactagcctgaccaacgtggagaaaccctgtctctactaaaaatacgaaattagccaggcatggtggtgtggccctgtaatcctatctcgggaggctgaggcaggacagtcacttgaacccggtaagcggaggttgtggtaagccaagattgcgccattgctctctagcctgggcaacaagagagaaactctgtctcaaaaaaaaaaaaaaaaaaaaaaaaagatacagtatttcttttaagacagctgatgtggcttattctccaggccagtaggctgctttaaaatattctaagggctgggcatggtaattgtaatcccagcactttaggagaccaaggtggaggatcacttaagtgcagcagttcgagaccagcatgggcaacatagtgagacctcgtctctaccaaaaaaaaatgaaaaaaaaaaaagttctaagtatttagctgggcactgtagcatacacctgtaatcctagctactcagaagactgaaaggggaggatcgcttgggcccaagagttcaaggccaggctgggcaacataatgaaaccctgtctcttcaaaaaaaaaaaaagttctgagtatttggtatatttagtatacttaaggaaagcgagccttacttgaggttctttttaaattttattttatttttgagatagggtttggtacttttgcccgggctggagtgcagtggcaagatcacggctcactgcaaccttcatgtcctgggctcaagtcatcctccgacctcagcctaccaagtagctgggactaaaggcaagcaccaccacacccagctaaactgacttgaggttcttgtacttcattttgtgtccttcttctccttgttttattaattgtttttcttttttgattagatcttacatgcatgtggcacaaatttcaaaatgtacaaaaggacatataaataaagagtatcagccgggcgtggtggctcacgcctgtaatcccagcactttgggaggccgaggcgggcggatcacgaggtcaggagatcaagaccatcctggctaacatggtgaaacccagtctctactaaaaatacaaaaaattagccgggcgtggtggtgggcgcctgtagtcccagctactcgggaggctgaggcaggagaatggtgtgaacctgggaggctgagcttgcagtgagccgagattgcaccactgcactccagcctgggcgacagagcgagactccatctcaaaaaaaaaaaaaaaaaattgtgtatcttcctctgttccccagtcaccctgttttcttcccagaagcaactagtgttactggttacctgtgcttcattttaggttctatacatttacacacacacatcatttatatgtgtgtgtgtgtgtgtgtgtgtgtatatatgtgtgtgtgtgtatttcccccacacacacatttgggaacataatgtacataatattctgcacctttcttttttaattgaccatatatcctaccaagttagtatgattaaaactgcctcattagttttaatgactgcagagtactccactatgtaggtaaaccataattgatttaaccaggacatttaatcatggacatttagggtttttaagagagttttttaaattaagatataatttacataccataaaactcacccttttaaagtatataattcagtagtttaatacaagaactcttttttttttttttaagaggcagagtctggctctgtcgctttggctggagtgcagtggtgtaatcatagctcactgcagccttgacctcctacgctcaagcaaacaatcctcccatctcagcctcccaagtagctggaactacaggtgtgcatcagcacactcaactaatttttaaatgttttgtagagattgggtctcactacattgccaagcaggttcaagaacatttttattgccccagaaagaaaccccatacccatgacatctagggttttgccgtcctttgttaaaaccaattaatactaaaataataataatactgccctggatattcttatacacatatcatttggcacatgtgaaagaatacccacgtgacagctggttatggtggcacatacctgtaggcccagctacttagggggttaaggatctcttgagcccagaaattcaagtccagcctgggcaacatagagagaccctatctctaaaaaaaaaaaaaaaaaaaagtgagtaaaaaagaatatctgcagtacaaatacctggaaatggatttgcttggtaagctgatctgtgcacttaagattttgaaagacattgctaaattgccctcactagaggttatatgagtctgtatcctgtcagtgtataaaagttcctatttccccactccctgctagcagaatccttcatccaacttttctgtctttgccaatctgacaggacatgtagtatctcactacaatattaatttttatttcccttattgtaagtaaggttgattattttatatgcttaggagctagttgtatttccttttctgtgaattgattgctcataaactgattaaatctttgatattaaatctttgatattctggatggatcctgataaaaaaattttccttatttataagagctctttatgtattagggagaaaagccctgataaaaaattttccttatttataggagctctttgtgtattagggagaaaagccttctggggtatgaagtggaggtatttttcttagttatttttgtttatttgttttagtctttgactttgcttatgatgtgtttttcttttatcatgcagaagctttgcactttatgtcgttgactttgtcagtcttttatgacttgtgtgtcttatgacatccttagactttcctcactccaagattgttaaaaaaaaaaaaattctcccatgagttattctattactttaaggttctttctccatccaccatttaactcctagatccatctagaatttatttttgtgtaagatatgaggtgtgaatctaccttattttccccatatggttaacaacttttccccaccgctttgaaacgtcatttttacactgtgtcctcttgattaaaagctattatttaagatgtttgttggtgcaattcagaacagttttaaatattagctttaattttttaagagaggtagtcaggtgttcaggacagtgatttctgaactcttggggtgcctacagcccccttccctccacgacaaatcccactgtctagtgctatttacagaggggaagacgtcttgctcatgtctgttgggccaagaaatagtttccaatcactcatccagggatttccccttagcctcataaaatccacctggggtcagccacccatctagggattccagggttgttacttgaatgtgaaaagagcctcaacaggagtccagaagtaaatggagaatctttccagagaaaacagaattcttcacttttaggtcattagtgactgatcttcagattatcttctcgttttatttatttttatttttatttttaattttattttttgagacagaatctctctctgtcacccaggctggagtgcagtggcatgatctcggctcactgcaacctctgcctcccaggttcaagcaattctcctgccttagcctcccgagtagctgggactacaggcaagtgccaccatgcctggctaattttttgtatttttagtagagacgggtttcaccgtgttggccaggctgatctcgaactcctgacctcaggtgatccacccacctcggcctcccaaagtgctgggattacaggcatgtgccaccatgcccggcctatcttctcattttaaaatcatagacaattttacaattttgctctggtaaatttactttgatggaccataggtcatctggtgaaaggaacccctggattaggctatattatgactacattttggcattatttgaagctagagaatacagggctaagggtcatctcttttaatttgaaactgtttaaggtgagaaaagagtgtgaccctttaaaaagcagaattctcagggtgcccctgactgtaaaggctcctagagttgtacctactgggaccagaggagaaggcctgtctggcagttcctgatgctgctgatagggggtagatattcccagggagccttctttcaagccaagtgtttgactccctgttttgtttggtagagaaggttgcacaatggcttttaatctcattcaatattataaaagtgttctgtttgcactactcaagtagtttgtcactctaaacttaggggtagcagctgttctctgtgcttgaaagtgctagtggtagtaacacctcaatggagtgactggtgttgacttcctgcctcagggcttgtttaacccttagggcacctcatcaagtagaggaactaggcaagtgtgtcaagtaaggagggaagctgggagagttgtggaagtgtttttctttggtataggctatttttcacttacatttttattaattagtttgttccagagacggacacttaaaaaaaatgaattcacaaaggatacaggggaattcaatttaagcggtcatgttaaaaaagtaatatctcctttataggcttaatgtatgtcataattggctaattttttccatatgattatgatgcctgagagacaagcctatggtatgctgatgagccatggttaatacaattttatctcactaaatgtcgtcaggatttaagggaagaccttcacacagatttttctgtatctacgtgatgatcattttcctgcttttcctttctgtcccatcttcactcctccacagtcatgttacactagtatagtcatgtgagtgtgcccatgagtgactccaagttgagttctaaaaagcagatttcacttagccagctgcccttgtcagtttcagccttgggagtcaccttttggtatcttttcccactgcttcttcctcctttctcaaccatcatttctcctctccactggattctactcacagggtttgtaatctcccagatcattcagcatctgaatgaattcagccgccaaggggaagatcactggcagatcccagtgggggtacttaccccttccagactcttcctgaggaaagcaagttaccttccatgtagcaggagtacattttatactagtttggccttgtgactgttagagtgggaagtctgagggaactggagaagagatgcagttttaacagaggaaaaacatttagtagagactgtcccttctgccttcgggcgtgtccctcttctgggcatcttttcaggatttcattcctacgtccaactgccgttcacaactgccctttccaactgctccagaactcttggccctggcattccgtgatgtaaattattccacacatggctcaaaagggtgtgaagctgtgtgccaggtgtcggatcactagtgtaagtttcccagtctgtggggagagctgctcttggaatctgtgcagttgttgttgtttcagcccaagcatagtcatttcactggctaagcttgacactgtcgctggtgggggagagagggatctcggggcctggagctagggtgaacttttttggttgagattctctactttaaggattctagtgttaggatgtagattgtttggagttgaacaggggtggtgctgctgcaaaaggagaatgtgggaccggccggccagagcctgcagagactgcctgcggctagggtgccccctcttctctctctaaatgcaggaagaaccattttcctatcttcctaaagatagccagaatatggcaaaaaatgtaggttgctcaccatgtttaggaacattgagtcacaaaattaaaagacctctatgtctatgagatcttttctaaaacataaatattatttctccccttgtttattgtacattttgaggaagttactgttcatggtttatagccccttgggggaatctgcatgtgagggaggttgctgccaactatctttgatttgtctagattcttttttgacttataagttaaaggtttgttttcaataaaaagtttaaattgaatactttatctctcaaatgacctcaaaatttttaaaattacattaatattaagcagaggaaaactcacgtgaattacagttatttatccagaaaagtgtaaggcatacttttgtattgcattgatactactgtctttaatctgctttactgaaacctgttttcctctcccttttctttatagttgtcatggatgatgatgatgactcgtgtctccttgatcttattgggtaagatgcttattccaaaacctgggtaaatcaaatgtgtgaggtttgctgaacactaagacaacctaatagcatataacacctgataggtattttaaataaaaattaaataataatcataggtttagtagagaaacagagacatgattaacataggggttgtaattcagtaattctttttttttttttccttttgagacagggtctcactctgtcacccaggctaaagtgcagcagcacaatctcagctcactgtagcctccacctcccaggcccacacgatcctcccacctcagcctcccaagtagcggggactacagtcacacaccaccatgcctggctaattttttgtgtttttttttttttgtagagacagggttttgccatgttgtacaagctggtctccaactcctagactgaagtgatcctcctgcctcagcctcccaaagtgctgggattacaggcatgagccactgtgctcagcaagtaattatttattaaatttatttcctaataaatcccaggaggcagaagtgaataataataggaaatggcacaacatcaaaacaaaaacaagattaaaaaaaaaaaaacctactaatagttttaaaatagggagaggattttactcaggtaataaatcattttctttctactctagtaaaaattagttctaaatatagatagtatatttgtttgttgttttatctctttttttcctctcttttctagagacccacaagcattgaactattttctacatggacctagtaataaatctgtaagtaatgcatagaataccacagacatctattttgtttctgctttacagttaaagtagtaaccacctattgaatttgtatctttgcagagcaatgatgacttgactaatgcaggatattctgcagccaattcaaattcaattttcgccaactctagtgtgagtattggaaactaaatgcaatgattgaatggtttctgtctgattgatgccttgtgaactgagcctttaactgcctttgtatcatgagaatccttaccttgtctgttgtaattaatttaattttatttatttattttgagatggggcctcactctgtcgcccagactggagtgcagtggtgcgatcacagctcactgcagccttgacctcccaggctgaagcgatcctcccacctcagcctcccgaatagctgggactacaggcgcatgccacacgggctaatttttgtatttttaatagagacagagtttcgccatgttagcccggctggtcttgaactctcaggctcaagcaatacacctaccttggcctcccaaaatgttggaattacaggtatgagccactgtgcccagcctgttgtaatttatataggaagaaaatctattgaattatgtagacattttctacttttaacttagtcaattaagacaagctatgtggccaggtacagtagctcacacctgtaatctcagcactttgggaggccaaagtgggagaatcatttgagctcaggagttcaagaccagcctgggcaacatagcaagaccctgtctctatttttaaaaaataaaatagaccagatgtggtggctcatgcctgtaatcccaacactttgggaggccgaggcaggtggatcacgaggtcaggagttaaagatcagcctggccaagatggtaaaaccccatctctactaaaaatacaaaaaaaaattgccaggcatggtggtaggcgcctgtaatcccagctactcgggagcctgtggcagagaattgcataaacccaggaggcaaaggatgcagtgagccgagatcccgccactgcattccagcctgggcgacagagcgaaactccatctcaaacaataaataaataaataaataaaataatacaccaggcatggtggctcacacctgtaatcccagcactttgggaggccgaggcaggcagatcatgaagtcaggagatcgagaccatccgggccaacacggtgaaaccccgtctctactaaaaacacagaaattggtgtggtggcgcgtgcctgtaatcccagctactcaggaggctgaggcaggagaatcgcttgaaccagggagttggaggttgcagtgagccaagatcgcaccattacactccagcctggccacatagggagactctgtctcaaaaaaataaaaaaaataaaaataaataataaataataaaaagacaaactatatgaggttgtcttttaaataataaaaagacaagttatatatccactttgccatttttctaagctttcaactttctttttttgagacggaatcttgctctgttgcccaggctggagtgcagtggcacgatctcgtctcactgcagcctctgcctcctgggttcaagcaattctcctgcctcagcttccctagtagctgggattacaggtacccaccaccacaccagctaatttttgtatttttagtagagactgcgtttctccatgttggcctggatgatcttgaactcctgatctcaagtgatccccgccccattacaggcgtgagccactgcacctggcctcaacattctttctaaaatgactcagaaatgttacaacctgagaaactcatattagaatgttttgaaccttgttacataataatctttaaagaaattattcttaattcatagttacttataagttgttttcatcttaaatgagaaaaacaaagataatgagtaacacttgagcatttagtatgtgcttggcattaagagcttaacatatattaacctcagccagacatggtggcccatgcctataatcccaccattttaggaggccaaggcaggaggattacttgagctcaggagtttgagaccaaccagcatagtgagaccccatctctacaaaaaatttaaaaattagaccagcagctgggcgcagtggcttacgcctctaatcccaacactttgggaggccgaggcaggcagaccacgaggtcaggagttcgagaccagcctggccaacatagtgaaaccccatctctactaaaaatgcaaaaaattagccgggcgtagtggcgtgtgcctgtaatcccagctactcaggagactgaggcaggagaattgcttgaacctgggaggtggaggttacagtgagccaagatcacgccactgcactccagcctgggcgacagtgcaagactctgtctcaaaaaaaaaaaaaaaaaaaaattggctgggcgcggtggctcacgcctgtaatcccagcactttgggaggccgaggtgggcggatcatgaggtcaggagatcaaaaccatcctggctaacacggtgaaaccctgtctctactaaaaatacaaaaaaattagccgggcgttgtggcggctgcctgtagtcccagctacttgggaggctgaggcaggagaatggcttgaacccgggaggtggagcttgcagtgagctgagattgcgccactgcacttcagcccgggcgacagagcaagactcggtctcaaaaaaaaaaaaagaaaaaatagatgagcatggtggtgcgtgcctatagtcccagtcctgctgaggcaggatcccttgagcccaggagttggaggctgcagtgagccaagattgtgccactgcactccagcctaggtgacagagtgagaccctatctcaaaaaaaagaaacccaagacatgtattaacctcatttaatcttcacaatgattccatgaagtggttctattaagatacatattttggccaggcacggtggctcacacctgtaatcccaacacttgtgagaggccgaagtaggtggatcacctgaggtgaggagttcaagaccagcctggccaacatggcaaaaccctatctctactaaaaaatataaaaattagctgggcgtggtggtgggcacctgtaatcccagctacttgggtggctgaggcagggagaattgcttgaaccaggaaggcggaagttgcagtgagtcgagatcgggccactgcactccagcatgggtgacacagtgagactcttgtctcaggggaaaaaagaaaaaaagatacatattttagagatgaggaaactaaagcacagaaaggttaagttacttggccaaatagtacacagccatgagttgcagagctaggattctaacccaggccaccaggctctggaaactcatgttcttttttttttttttttttttgagacaagagtctcgctctgttgcccaggctgaagtgcagtggtgcaatctcggctcactgcaacctccacctcctgggttccagcaattctcctgcctcagtctcctgagtagctggtattacaggcgtgtgtcaccgtgcccggctaatttttgtatttttagtagaaacgaggtttcacccagttggccaggctggtcttgaactccggacctcaggtgatccacccgcctcggcctcccaaagtgcttggattacaggagtgagcaactgtgcccagcctccatgttcttaacctccaggggcatctaggcaacaaacctgacctgggggattggggtgtcctgcctggagactatatcgagattactgtgtttgagccttaggttcccttactcttttcagttgctttgttgtgctgtggatggtagtcagaagttgtactgcccaaggttgactccttgccctaccacttattagccatgtaaccttagatatatcactaaatctctgtgagggtcaatttcctcttgtttgtttgttttttttttgagacaaagtttcgctcttgttgcccaggctggagtgcaatggcacaatcttggctcaccgcaacctctgcctcccagattcaagtgattctcctccctcagcctccttagtagctgggattacaggcatgcgccaccacccccagctaattttgtatttttagtagagacagggtttctccatgttggtcaggctggtctcaaactcccaacctcaggtgatccgcccgcctcagcctcccaaagtgctgggattaataggtgtgagccaccgcgcctggccaatttcctcatttatgaaaccagaataacaatggaattacctcagagggtggttaacattagttgactatactgttgaactcacttggtatggtgctcagtaaatattaacttactatcatcaggacctatattttcttcacctataaaatggaatggtgttcagaaagtccttgggatggacagttctttttaatagtcacgtgtgtgtaaggcacgtaagatcatatcatgcaggatatctctgccacaacactgatctctggtaaggcttgtgaatcagtagcatttctgacattcattttgaacaaataatcactacatatgatgccattaaacccagaaagtagatacttggcctatccctcaacattaatgatttttatttagcaactgtcctatttccatgtgagtattaattctatcttttcaaattgcttcattcaatatgtatttattggcaactatttttgcatcatgtcggtgtagtagcaatctcgaaaatactctgaggctggggacggtgcctcacgcctgtaatcctagcactttgggaggccaaagcaggaggattacttgcgtgcaggagttcaagaccagcctgggcaagatggtgaaaccccatctctaaaaaccaaaaacaaaaaaatttaactcggtgtggtggggcacacctgtagtcccacctactcaggaggccgagatgggaggatctcatgaacccaggagttcacagcagcagtgagttattattgggccactgcactccagcctgggcaaaagatcgagaccccagatcaaaaaattaaaaagtaaataaagtctgtggcagtatctcaaaaaaatgaagctaagctccaagtagtcctcagtatgttcgcattatctgttctctataaaataatttatcagcatgatggatgcatatacttataatgtcaagcatcattatgatggaaataaaatatcagaataaggtgagcagtttagagagttatgcctgagaagcagactgtcatgctttattcatattcaaaagtaagattggccaggcgcggtggctcactcctgtaatcccagcactttgggaggccgaggcgggcagatcatgaggtcaggagattgagaccatggtgaaaccccatctctactaaaaatacaaaaaattagctgggcgcggtggcaggcgcctgtagtcccagctactggggaggctgaggcaggagaatggcgtgaacccgggaggcggagcttgcagtgagccgagatcacgccactgcactccagcctgggtgacagagcgagactccatctcaaaaaaaaaaaaaaaagtaaaagtaagattaatttttatgcatccttttcaaaggttacatatgccatgtaacatactgtttatttttttagaatgctgatcctaagtcatccctcaaaggtgtaagcaaccagcttggagaagggcccagtgatggactgccactttcaagtagcctccagtttcttgaagatgaactcgagtcttctcctcttcctgatctcactgaggaccaacctttcgacattcttcagaaatccttgcaagaggccaatatcactgaacagacattggcagaagaggcatatttggatgccagtataggttcaagccaacagtttgcacaagctcagcttcatccttcttcatcagcatcctttactcaggcttctaatgtttctaattactcaggtcagacgctgcagcctataggggtgacgcatgtgcctgttggagcatcgtttgcaagcaatacagtgggtgtacaacatggctttatgcaacatgtggggatcagtgttcccagccagcatttgtctaatagcagtcagattagtggttctggtcaaatacagttaattgggtcatttggtaatcatccttccatgatgactattaataacctagatggatctcaaatcatattaaagggcagcgggcagcaagccccatcaaatgtgagtggagggctcctggttcatagacagactcctaatggcaactccttgtttgggaactctagttccagtccagtagcacagcctgttaccgttccatttaacagcacaaattttcaaacatctttacctgtgcataacatcatcatacaaaggggtcttgcaccaaattcaaataaagtcccaattaatatacagccaaagcctatccagatgggtcagcaaaatacatacaatgtgaacaatttgggaattcagcagcaccacgtacaacaagggatctcttttgcttctgcaagctcaccccagggctcagtagttggtccacacatgtctgtgaacattgtaaaccaacagaacacaagaaagccagtcacctcacaggcagtgagcagcactgggggcagtattgttattcattcccccatgggccaacctcacgcaccccaaagtcagttccttatacctacaagcctttctgtcagttccaactcggtacaccacgtccagactataaatgggcaacttcttcaaactcaaccctctcagctcatttctggccaagtggcctcagagcatgtcatgttgaacagaaactcttccaacatgctcaggaccaaccaaccatatactggaccgatgcttaacaaccagaatactgctgtccacttagtgtctgggcagacatttgctgcctctggaagtccagtgatagccaatcatgcctctcctcagcttgtgggtggacagatgcccttgcagcaggcatccccaactgtattacacctgtcacctgggcagagcagcgtttcccaaggaagacctggcttcgccaccatgccatcggtgacaagcatgtcaggacctagtcggttccctgctgtcagctcagccagcactgcccatcctagtcttgggtctgcagttcagtctggttcatcaggatcaaactttacaggagatcagctgacccagccaaacaggactccagtaccagtcagtgtgtctcatcgtcttccagtttcttcttccaagtctaccagcaccttcagtaacacacctggaacaggaacccagcaacaattcttctgccaggtaatgccctttcccaaataaatatttggctgattatagaatggaaaaatgagatgtgtatttactagaatataattttcatcctaggcatccaatttcttaaaaattttaggccaggtgtagtggctcatgcctgtaatcccaacactttgggaggccaaggctggaggatcacttgaacccaggagttcgaggccagcctgggcaacatagtgagaccctgactctaccaaaaattaaaaaattagctgagtgtggtggtgcacacctgtagtcccagctactctggaggctgaggcaggagaatagcttgagcatgggaggttgaggctgcagtgagccatgattgtaccactgcactgggtgatagagtgagaccctgtctcaaaaaaaaaaaatttttttttacacttatgactggttatcttttttcttgattttcttttttgccagggggcaggggtagggggtctcactttgtcgcctaggctggagggcagtggcgcaatcatagctcactgcaacctcaacctactgggctcagatgatcttcccacctcagcctcccaggtagctgtgactacaagcacataccagcacacctaactagttttttgtattttttgtagatttggggtttcgccgtgttgcccaggctggtcttgaactcctgggctcaagaaatcccctggccttggcctcccaaagtactgggattacaggccaccacacccgaccttttttcttaaaattttttatccagtgtagcattgtagagtggagactctggagttagactcttgagtttgaatctaagctttatgacatggaaaaagttaacttaccattctagacttaattgtcttcattagtgaaatggggataatgatactgccatcccatggagttatcaggagggtgaaatgagataatctatacaaagcacttagacatagaccctggcaaatagcaaatactccataggagcttgtatttatacttaattaaattcattatgggcatttaaaatgaaagcttattttaggttatgtatttacattgtatagcaggctattaggacatgtgactgtggacttgttgaagatgtggtagctgcttcttggttgccaacaggaaaggctcagggactcagtgtgactcagtagtgggtaactggcctgccccagagggaagcacataaagggagagatcgaggcactctcatttgaccaagtacctgacctgagcttgctcttactatactgttatgcagattaattactgtgggcacttggtaaaccacataaggattatgtttctgaaaagaatctcaaatggtcatgagctttagtccttcactgtcatctgctgatccttcgacggctccatcatttggttcccactcattctgagcatgctccatagttccagctcctcctcttctcatctgggaggacccatgccataccctactttcgacccctcagtcctgcgtttcccctgcctttctcctcctccacattcagaaggattcaaaaacttctgtttatatacgtcaacatatttcaaaatctttttttttttttgagacagtctcactctgttgcccaggctagcatgcagtggcgaaatctcagctcactgcagcctccgcctcccagcctcaagtgatccttccacctcagcctcccaagtagccgggaacacaggtgcaagccaccatgcccaactaatttttgtatttttttgataggcagggtttcaccatgtcgcccaggctggtctcgaactcctgggctccagtgatctgcccgcctcgacctcccaaagtgttgggattgtaggcattcgccactgtgctcagccaatatcaatcttttaaatatatatatcggccaggagctgtggttcatgcctgtaatcccagcactttgggaggccaaggtgggcagattgcttgaggccaggagttcaagaccagcctggctgacatggtgaaaccctgtctctactaaaaatacaaaaattagctgggtgtggtgacacacgcctgtagtcccagctacttaggaggctgaggcaggagaatcacttggacctgggaggcagaggttgcagtgagccaagatcatgccactgcactcctgcctgggcaacagacagagtgagactccatctcaaaaaagtatatatattatatatatatgtatgtatgtatatatatatacatatatatgtatatatataatatattatgtatttatatatatattaatgtatatatcaattttttaaaccatatacctttgacttactaatttcactaagaatcctagggaaacaaagattgcttatgattaaggatgttcagtttatttgttttggtttcaaagatatcaaaggggcgtgtgtgtgtgtgtgtgtgtgtgtgtgtgtttgaaataacatcagacttacagaaaagttaaagttacaagattactacaaagaattgtcatatacccttcaccaagattcccgaaatcttttctctccctttgtctctctctctcatatacaaacacacacacacaaacatacacacacacacttttcagagtaaattacagacctgatgcttatgcctcttgactcctaattacctcaatgtgtatttgtaacagcaggggcattctcctacataaccacagtacagtaatgaacattaagaaatcagcattattacaatactataactaatctgcagaccttactcagatttagtcagttctcccagaaatgtcactgaaagcacaagagaaaacaaattatttggttttggttttggtgttttggtgttttttctttagagatgggatcttgctatgttacccagggtagactgtctttttttttttttttgagatggagtctcgctctgttgcccaggctggagtgcagtagcccgatctcagctcactgcaagctccgcctcccgggttcacgccattctcctgcctcagcctcccgagtagctgggactacaggcacccgccaccatgcctggctagttttttgtatttttagtagagacggggtttcaccatgttagccaggtgacctcctgacctcgtgatccacctgcttcagcctcccaaagtgctgggattacaggcgtgagccaccgcgcccggcccaggctagactcttgagctcaagcaatcctcccacctcagcctcctgagtagctggaactacaggctcatgccccggcatgcagctttgttttgttttgtttttgtttgtttgtttttgagacagagtctcactctattgtccaggctagagtgcagtggtacgatctcggctcactgcaacctccacctcctgggttcaagcaattctcctgcctcagcctcccgagtagctaggattatagctgcctgccaccataccctgctaatttttgtatttttagtacagacagggtttctccgtgttggccaggctggtctcaaactcctgaactcaggtgatctgcccgcctcagcctcccaatttgttttggtttttatggtccaggatccacccaggatcactatctcatttcattgtcagattttaaaatctgcaacagttcctcagtcgttctttgtctttcatgctattaatatttttgaagagtgcaaaccaattattattattattgttattattatgagacggagtttcgctctttgttgcccaggctggagtgcaatggtgcaatctcagctcactgcaacctctgcctcgcaggttcaagccattctcctgcctcagcctcccaagtagctgggattacaggcatgtaccaccacgcccagctaattttgtatttttggtagagacgtggtttctccatgttggccaggctggtctcgaactcccgacctcaggtgatctgcctgattcggcctcccggagtgctggtataggcatgagccatggcgcccagcaaaaccaattattttctataatttgggtttctctgatgtttcctcatgattagattcagtacatttttaacaggattgccacagaagtgaggtgtcctcagtgctcaggatgtgaatttgtcccattgctggtgatctcaccttgaacacttgcataagatgttgtccttcaggtttctccactgtttttccttttgtcattaattagaatcttccagaagataatttgaaactctgtaggcatccagtttctcatcaaacttgcacatgataatttaagtttccattgatgattcctgattgaatcagttattacagagctattactatcatggcctcgaaatagagactttctaattccttcatttgtcctgtacttactagtagcattctaatttaaggaacagcttttccttttcttccctttacctttttctttatgtgtgaattcttagattatttgtagtcagtgggttataaactgactataattgtataaaatatattgtataaaataattatacaataatttattttaatgctcaagtctacccacatttggcaagtgggtgcccctccaaattggctgctcatccttctgacatgtttccatcatgctttgagcacttccttcaatttctggcaaaacaaatgttctgtgtttatcttttaatttccctgctcctgccctaccatcaactatttttttaagaaggcttgttccttctagtggagaacaatatttagaaaccaagatctaagcattatgtgtgttcattgctactaaggtcatttcagttggaaaatatgtatatttatacacccaacgcctataggtatttacatttctgtgaatctatattaaaagctgtgagttcatattgatagttccaattctaatccatgactacagaattcatccaagtctctctcttttccatatttgtatatttgtaactccctttccttcccctctacccttttttctttttttttttgagtcagagtctcactctactgcccaggctggagtgcaatggcacgatatctgctcactgcaacctctgcctcccgggttcaagctattcgcctgcctcagcctcccaagtagctgggattacaggcgtgcgccaccacaactggctaatttttatatttttagtagagacagggttttaccatgttggcaaggctggtctcaaactcctgacctctggtgatccacccacctcagcctcccaaagtgctgggatttcaggcatgagccaccatgcctggcctgtaactcccttttctaacagtgagaaagccagctccaccatgtttatttacttacttgttcaatcctagaatatacagaaaatagtcttagaatggctaatccatgttttaaaccattgtaaaaaaaaaaaaaactattaattagactttactattggtttacagttctgtgtttagcctaagtgtttacagtcaacatactgtgttcaaaagttacttggggctggttgcggtgtctcatgcctgtaatcccagtacttcccagcaagcgaagggggcagattgcttgagctcaggagctccagaccagcctaggtaacatggtgaaacactgtctctacaaaaaatacaaaaattaggtgagtgtggtagtgtgcacctgtagtcccagctacttgggaggctgagatggaccatctgagtccgggaacgtcaaggctgcactgagggtgatggcaccactgcgctatagcctgggtgacagagcgagaccctgtctcagaaaacaaagaaacataaagaaacaaaaaatgtgcagttaattagtaagaatgtaaaacagttccaaagtagtctagagtgaaaaacaagtctttccccaacctccagtttccttccagaagcctcactgtaagttctttgtattcccccagagctatcctctgcatagacaagcacgcacagtgcatacacatacttacctgcaacacgccatagacgttttcacttaatgatagaacttgaggatcattttatatatgtatgtattgatcagctttatgtttattataattaattaagcaatcatccatagcatggtcatttccttttcttctttgctatataataaataatgcttcaaagggaggggggagaaaaatacctttttctctctgactcccaaaagtttcagttattcaaaggtaaaaagaagcctacactagcagcttcaaagcagctgactttttatgccaaaaagcattgggaactaggtcagttgcattatttcaggtgttcaagtgtgtttccgctataagttttcaggaacaagtgaaaccccaggtttattaaaattaaggaacatacccttgggtacacaattagttgaaatagtagtatttaggtcagctaccatttaaattcccgggacacccagaaacacagaaattatttgctttctgtgtagtttcttttttttttttttttttttgagatggagtcttgctctgttgcccaggctggagtgcagtggcacaatctcagctcactgcaacctccgcctcctgggttcaagcaattatcttgcctcaggctcctgagtagctgagattacaggcgcctgccaccacacccagctaatttttgtatttttagtagagatgggatttcaccatgttggtcaggctggtctcaaactcctgacctagtgctccacctgcctcggcctcccagagtgctgggattacaggtgtgagacactgtgcctggtcctctgtgtagtttctatgtaatatttcttttctttttttttttgagatggagtctcactctaccgcccaggctggagtgcaatggcactatctcggctcactgcaagctccgcctcccaggttcaagcgattctcctgcctcagcctcccgagtagctgggactacaggcgtgtgccaccatgcctggctaatttttttgtatttttagtagagacagagttttgccattttggccaggctggtctcgaactcctgacctcaggtgatctgcctgcctcggcctcccaaagtgctggggttacaggtgtaagccactgcactcagtttttctgtgtaatatttctatataaattactttatagaatgttgtaacaaacacaaaaatataattaccgaaggcttttggcgtttgtatatttgtagaaatgtaattcagcaggttttgatactataaatggttaatgttagagataactatgtttttaaatataaatataatattgtttttaatatagataatacattaacttggttcaaaaaatcaaatggggccgggcatgttgactcacgcctgtaatcgcagcactttgggaggccgaggcaggtggatcacctgaggtcaggagttcaagaccagcctgaccaacaaggtgaaaccccatctctactaaatatccaaaaattagccggatgtggtggcaggcgcctgtagtcccaactactcgggaggctgagacaggagaattgcttgaacctgggaggtggaggttgcagtgagctgagattgcgccactgcaatccagcctgggtgacagagcaagactccatctcaaaaaaaaaaaaaagaaaaatcaaatggtacagaaagatgtgtactacaatgaagagtttccctcctcgtctcgttgcccacccacccagttgccatcaggcaaccagtgaaaccagcttttatggtgtgagcttaagttccttcctcacttttgtattgggaaaactttcaaacccatggacaaattggaagagtacagtgaatacattcacgtggtatcaccagtcatttctgttttgcagtatttgctttattggtgctaaatgtctatagtctctatgtgtatgtacacacacacatttatactttatttatatacttttttctcttaaccatttgaaagtactctgcaaacatcacaactttttatccctaaatacttcagcaggtgtctcctaggaacaaggaccttttaatataattatatcaaatttcttccatttggcctaataacgccctttacaaaaacagtttttcactttagaatccagagagcactgatttcatttagttgtcacatctctttagtctgtaacagcactgatcagttgtcttctagagtggccttgtctgactggacttgtctgactggaagtatgtttcctcatgactcggcttcatcaggctaaatggtttgggcaagacacatgttggtttgtcccattcgtggtgatgctgagtgtgggcacttggttaagtggcctctcccagatttctccgcaagggtctcaaaggtgtcttgttccctttgtaaagaagaaatgatctccaggatagaccatgtgactattctgtttctcagcctctcaccctttgatgcctctcacctgaatattatattgatagtcacaaaataatgattttataattgtagtatcctatctatatttattgcctgggatttttccagaaagaagagcttttttggccaggcacagtggctcacacctgtaatccctgcactttgggaggcagaggcgggcagatcacttgaggtcaggagtttgagaccagccaggccaacatggcaaaaccccatctctactaaaaatacaaaaattagccgggtgtggtggtgcatgcctgtaatcccagctacttgggaggctgaggcaggagaatcacttgaacctgggaggcagaggttgcagtgagctgagattgcgccactgcactccagcctgggtgacagagcgagactctgtctcaaaaaaataaataacggattacctaggtcaggagttcaagaccagcctggtcaacatggcgaaaccctgtctctactaaaaatacaaaaattagccaggtgtggtggcgtgtgcctatagtcccagctactcgggacgctgaggcaggagaatcacttgaacttgggaggcggaggttacagtgagctgagattgtgccattacactgcagcactccagcctgggcaacagagtgagactctgtctccaaaaaaaagagctttttcttcctctccttcccattttttttgagtagcactgtgaactcatagggatcattattgttgttgttaggatttttaaaattattattattattttaaaaaatagagctggggtcttgctatgttacccaggctggctctaactcctggggtcaagcgatcttcccacctcagcctcccaaagtgctaggattacagatgtgacctaccaggcccggcccaggattttttatgtttgttttttagaactttttattatgaggaattttaaacacaaagtagacaaagcactgtcatgagcccccatactccctcagcttgagtatttaccactcatagctgctcttgtttcatccacatccccaccccctttgcccctgcctggtatgattttgaagctcacccatcatatcagtttatctgtcatattttaacacatatctctaagagatcatgtattctttctgtatttaatgtattatttctgtatttaatatattgtaatttattgtgttcctcattctttttgatgcttaaattgtcccaaatttgatcaatggaagcctgtttgagctggctcctatacttttgacatgtcttcacctcctctgaacacttccttgctttgtgtcacaagacactgtaggactgccttagattaccttgcctcaaacctggaatcagccattcccgaaggagcctgtgaactaagtctttttgtgcagagagtgatttacaggatttacactttcttgtaagtggattaaaattcaaaagtcagttgctaaggagacaatttaaaataatctatcaaacaaaagtaaagaaattagtataggtccaaatttctctattatttatttattagagatggggtctcgctatgttgtccaagctgaactcctgggttcaagtgattctcccacctcagccttccaaataggattacaggcactagccataacactcagacaaatctctttatttttgttcttttttgtttgtttgtttgtttgtttgtttgtttgtttttgagacagagtctcgctctatcacccaggctggagtgcagtggtgcaatcttggcccactgcaacctctgcctcccgggttcaagctattctcctgcctcagcctcccaagtagctgagagtacaggcatgtgccaccacacccgctaattttttgtatttttagtagagacagggtttcaccgtgttagccaggatggtctcgatctcctgacctcgtgatccgcctgcctcggcctcccaaagtgctgagattacaggcatgagccaccgcaccctgcctgtttttgttttttgagatggagtcttgctttgtcacccaggctggagtgcagtggtgcaatctcagttcactccaacctccacctcccagttcaagcaattctcctgcctcagcaccccctagtagctgggattacaggcgcctgccaccatgcctggctaagttttgtatttttagtagagaccgcacctggccccaaatctctttggatcactaaaggatttcgtagattcaaattttattgagagcaggcagggcgcagtggctcacacctgtaatcccagcactttgggaggccgaagcgggtggatcacttgaggtcaggagttcaagactagcgtggctaacatggtgaaacctcgtctctactaaaaatacaaaaattaaccaggtgtggtggggcatgcctgtataataccacctactcaggaggctgaggcacaagatagctttaacccaggaggcagaagttgcagtgggccgagatcataccactgcactccagcctaggcgacagagcaagactcaatctttaaaaaaaaaaaaaaaaaaaaaaaaattgaaagcggctgagcccatatcacctatatagtacctatcatgctttggatgtgagagtgcctgaatgatcactcttgaatattttttttttttttttttttttttgagatggggtctcactttgtcgccaggctggagtgcagtggcacgatcttggctcactgcaacctccacctcccgggttcaagcgattctcctgcctcagcctcctgagtagctgggactacaggcgtgcaccaccacacctggctaattttgtattttttagtagagatggggtttcaccatattggccaggctggtctcgaactcctgaccttgtgatcctcccgtctcaccctcccaaagtgctgggattacaggcgtgagccacgctgccctgccaatcgctctgaatttttgctgaagtttctagtcccgctctgcccctccctacttccctatcccccttgtagctcagcctgccttccttatgtggaaccgttgtattttcagacgtctggacttaaaaatctagatgttcttgttttcttcttctccttctatgcctttaatgaattaccaaatccaataaatgatttgaaaatgtctcctatccattctctccaataacaatgaaaatactaatcatattactaacgaggacagtgctggggctccacacactatttctaattacgttggagctacatgtagcattattgttcccacgtcacagcagagaatatgggggttcagagcttggacaaattactcataaaggctaactttacctgttagttatctataccacactgcttcccatttttctccttttctacatccataccccaaggtaggctttaagagagactagaatataacagaaaaacaggaggtgaatcagcagttccagttcagtcataggtaccactctgccagcgagtggtttctgagctaagcttgtatcttaaactctctgagccctagttttgtcttttctaaaatgaggaactctagctgtgcaatagaattacctggggagctttttaaaactgtggatgcctgagcctcacccacataaattctgacttaaatagtctggagaaagggctttaggcatcagcatttttcaaaagctccccaagtgattttaaagtgcagccaggatacagaagtactgtgctacctgatttccaaagcccattgcaaccctaacgcctccgaattagacagctgcaacaattatctaggtgattaatctgctttcgtcctcttcctaaagaaggcagatttccacattaatcctcctaaaatatttgaaccaaatcatcagggagcttctcattcccacgggagaaagcacaaatctccgacctggcagtcagggttctctagtcagaaaccctccacttccaccaggctgatcccctgtttttcccacaaataggccagactcattgtgtgttcaggcctttgttgatgggtatacattgaatgtcctttccttccctgtttaaattcttcccctccttcaaggtcccacccaaagcccctagaaaaaatgaaggtttttcagtcccttcactgatctcttcctgcctattatactttttatttgtacaccccactaggtacataaccacttactttgttaaatgttttctacattgattcattcatcaaacagtatttgagtacctaccacatgccagccccagacatataacaatgtatcccagacagacagataagccaacagtcagaacacagtattttttttttttttttagatggagtcttgctctgtcacccaggctggagtgcagtggcacagtcttggctcactgcaagctccgcctcccaggttcatgccattctcctgcctcagcctcccgagtagctgggactacaggcgcccaccatcacacccatttaattttttgtatttttttagtagagacggggttttaccatgttagccaggctggtctcgaactcctgacctcgtgatctgcctgcctcggcctcccaaagtgctgggattacagacgtgagccactgcgcccaggcaacacagtattttaagcatgtgctaggagtagtccagagtgcgggctccgaaaaggagcctctaacccagttgggatggtcagggaaggtttcctgaggtggtggtctctgagagttacccaggcagagaggatctgggtgaagaatgttccatgaaatagaaacagcaagtgcagagcctggagagaaaagagaccatggtgctgtggggaaaggaaaacacgtttaggtgaggcgagtagggtgttaggtgggaaaggcgagcacaaaccatgtaggtcttggatgccatgataagagccagtgttgtaatctaagcatgaagtagacctacactagcagtataggaaagatgacgagacatgaatggatttgagacaactaggttagatagaacttgtgattgattgggcatagtggaaggataaggatgacttacaggtttctgacagtgacacacaggttcactgagttagaaaaatggggagagatttggatttgaagggaagttactgagtttagggtatgttcgtcaagtttgaggtacctgtaggacagccaaattatatgatacacggctatatatgctgaagctgaacactgaaatatgagctgaaatgggattgatcagcatataaatttcttcttttttttttttttttttgagacggagtctcactctgtcacccaggcgagtgcaatagcacgatctcggctcactgcaacctccttctccctggttgaagtgattctcctgcctcagcctcctgagtagctgggattacaggtgcgcgtcaccatgccggctaatttttttttttttttttttagtagagacggggtttcatcgtgttggtcaggctggtctcgaactcctgaccttgtgatccgcccgcctcggcctcctaaagtgctgggattacagacgtgagccaccgcgcctggccagcatataaatttcaactgaagcaatgggagtggaggaaatggaccaaggagagcatatagatagagtagaaaacagccagaggagaaccccacagcacctcaacatttaggctaagaaaagaggatgggcttggcacggtggctcacgcctgtaatcccagcactgggaggccgaggcaggcggatcacgaggtcaggagatgaagaccattctggctaacccggtgaaaccccatctctactaaacatacaaaaaattagccaggagtggtggcgggcacctgtagtcccagctactcgggaggctgaggcaggagaatggcgtgaacccgggaggcggagcttgcagtgagccgagatcgcgccactgcactccagcgtgggctacagagcaagactccatctcaaaaaaaaaaaaaaaaaaaaaaaaaaaaaaaaaagaggatgttgcaggcaggaaagaagatccacagagtgatgcacactgagaaggaaggtaaggagtgggcgttctgatagatttaacaactgggaggctgctggttggtatgacttgtttctgtggaatggtaggtgcagaagccagatggcaacagactgaggagagagcaggaggtgtgctcatgagcatagacagctgtcagataaatgaaagtaactgaagagcaatagctatgaggatgtgtgggattaagggaattatttttgtagtgaaagaagagcttttttcacagctgatgagaaggagaaagacattcattctagagcattgctaggattctttgtagacagaggagggacacctattgtagcaagagaaggtgggaaagggtaagattgtagctttcgtggtagaaagttatctagcttataggtttgcttataataaaatagcattcaaaagagctgactaaagggaaaaaaaggattactggacagctgtggggttggattccagttgaggctgggcaccataattataacacactgatctatcatgtttctgtgagcctgtgtgtttcttggatggtaaatttgagataaagactgtttggtatccttcggctgccttctctgttttttgttttttggggggttttttttttttttttttttttttttttttttttttttttagacagagtttcagtcgtcacccaggctggagtgcaatggtgcgatctcggctcactgtaacctccgactcccgggttcaagcgattctcctgtctcagcctccggagggattacaagcgtgagccacagcgcccagcctgccttctctgtgattaccacagtgctgtgtacacagtggttactcaaatggctcatcaagggactttggattgcagctatcagaaactccccgtaacatgtttgggagatgtgttttgtgaatgagcccaagtccaggaagtatagtgtagcaccttatgagggcaagaattcaggttctctgctgctctctgggcctcttcacgacagcatggccttttagctctccttcattgttctccctccttgttctcctggactaaaatgattgccccaggctatctttacattattccaaaccaagcatttaacagccactggcaggtgcgccggtttccaatacttaacaatacatcagaatcaactggaaagctttaaaaagttatagattcctggccgggcgcggtggctcacgcttataatcccagcactttgggaggccgaggtgggtggatcacgaggtcaggagatagagaccatcctggctaacacggtgaaaccccgtctctactaaaaatacaaaaaaaaaaaaaattagcttggcgtggtggcgggtgcctgtagtcccagctaatcgggaggctgaggcaggagaatggcgggaacccaggaggcggagcttgcagtgagccgagatacactcaagcctgggcaatagagtgagactccatctcaaaaaaaaaaaaaaaaaaagttatagattcctaggccaggcgtcatggctcacacctgtaatcccagcactttcagaggccgaggcaggcgcatcacgaggtcaggaggtcgagacgagcctgaccaacatggtgaaaccccatctctactaaaaatacaaaaattagccgggcgtggtggctgtaatcccaactactcaggaggctgaggcaagagaatcgcttgaacccgggaggcggaggtagcagtaagctgagatcgcgccattgcactccagcctcggcgacagagcaagactccggctcaaaaaaataaaataaacaataagttaaataaataaataaataaataaataaagagttatagattcctaaaccccacattagatttctgaattgatctttgtggatggaacccagaaattctccaggtgatcttgacgcaacctgaatttgagaaccactgcctcttgatatccatcccttacccccgcttcaaattctccagagagtctgattaggccacttgtggttgagtaaaccatgactggaggggtagtcttctgggcggcacaaggaagtagttttccagggcctctgctgctcaatctggagcctttgtacaaattaggaaaaagtgcccctcagggccaaagtataaaaaggcacccctctgggtagacaacctgctttactggtaggcttggcacttttagagggtgtgtagcggttgcttcttccctggactttagctcttatctgccctctggcaagtaataccatgttgtgtattttcttttctgtcttactgcattagctacatctttcaaaaacatgttgaaaagcagtgataagagggtcatccttgccttattattgatcttagcaggaaaacttcaagttttttgccattaaatatgagttaggcttggtggcttatgcctttaatctccgcacttagaggggctgaggtgagcagatcacttcagaccagactggccaacatggtgaaaatccatccctactgaaaatagaaacattagccaggtacagtggcgcatgcctatagtcccagctactcaggaggctgaggtgggagaatcacttgagcctgggaggcagaggttgcagtgagctaagatcgtgccactacactacagccagggcaacagataccctgtcttagggaaaacaaaaacaacaatgaataaacctctcaaaacctttttaaaaagcataaattagctgtagattttttatagatgtttatcaaattgagaaagatcccctctattcctagtttgctgagagtttttttcatgaatgggtgttgctttttgtcaaatactttttctgcatctgttgatacaatcatgggatttttcttctttagcttatcgatattgatgtgatacattaaaagtattgatttttggccaggcacggtggctcacgcctataatcccagcactttgggaggctgaggtaggaggatctcttgagcccaggagttcgagaccagcctgggcaacataggaagacctcgtctctacaaaaaaattaaaaaattagccaggcattggccaggcacggtgactcacacctgtaatcccagcactttgggaggccgaggcaggtggatcatgaagtcaggagttcgagaccatcctgaccaacatggtgaaaccctgtctctactaaaaatacaaaaattagccgggtgtggtgctgggcacctgtaatcctagctacttgggaggctgaggcagaaaattgcttgaatcttctctgggcgcggtggctcacgcctgtaatcccagcactttggaaggccgaggcgggcggatcatgaggtcaggaaatcgagaccatcctcgctcacacagtgaaacctcatctctactaaaaatacaaaaaattagcccggtatggtggcgggcgcctgtagtcccagctactcgggaggctgaggcaggagaacggcgtgaacccaggaggcggagcttgcagtgagccaagattgcgccactgcactccagcctgggcgacagagtgagactctgtctcaaaaagaaaaaaaaaacagaaaacagaaaaagaaaatcgcttgaacccgggaggcagaggttgcagtgagccaagatcacaccactgcactccagcctgggcgacagagtgagactccatctcaaaaaaaaaaaaattagccaggcatgatggtgcatacctgtagtccaagctactcctggaggctgaggtgggatgatggcttgagcctgggaggtcaaggctacggtgagctgtgattgcaccactgcactccagcctcagtgacagagcaagaccctatctccaaaaaaaataaaatcctcaagcgattgcaaattttcatgctctgacattagattattatttttgttttctttcaatcttttatattgtaaaatagaacacattcaggaaatgtataaaacataaatgtatcattgacaattaattatggccgggagcagtggctcacgcctataaccccgcactttaggtggccgaggcaggtggattgcttgagctcaggagtttgagatcagcctgggcaacatggtaaaagcccatctctacaaaaaatacaaaaactagccaggcttggtggcacacacctgtagtcccggctactcgggctgaggtgggaggatcccttgagcccaggatgcagaggttgcagtgacccaggattgccacagagtgagaccctgtctcaaaacaaacaaacaatgacaaaacaattaattataaagcaggtactcacggctgggcttggtggctcaagcctggccaggacacctgtccaggtgtccaccatatggggaacttcccatactacagtaggacatcatggggtcaccttgtaggggacatgctgtaaaactggaagattttcacgttgacccttccccttgtgggtttcttcctaataattcattgcctggaatagtttaggttcacccttccctgttagtggaagaatgaaaaaggtgaccatgtccacctctttaataaccttctgtcacctgggctggagtacagtggcttcatcactgcacttcagcctcaacctcctgggctcaagcagttgtcccacatcagcaccgccaagtagctgagaccacaggcatgtgccaccacatccagctaattttttaattttgtagagatgaggtctccctgtgttgcccagactgatctcaatttcctgggctcaagtgatcctcccacctcagcctcccaaagtgtcaggattacaggcatgagtcaccacatctggcctccttttcatttttatattacaaaagagaaccaaataattaattgtttagaacagatttttttttttttttttttgagacagtctcactctgtcggccaggctggagtgcagtggcaccatcttggctcactgcaagttccgcctcccaggttcacgccattctcctgcctcagcttctcaagtagctggggctataggtgcccaccaccacgcccagctaattttttgtatttttagtagagacagggtttcaccgagttagccaggattgtctctgtctcctgacctcgtgatccgcccacctcggcctcccaaagtgctgggattacaggcatgagccactgcgcccggcctagaacagaaatgttaacataagtttagtttggtcggatgcagtggctcacgcctataatcccagcactttgggaggccaaggcaggtggatcacttgaggtcaggagttcaagaccagcctgggcaacatggttaaatctcatctctaccaaaaaatacaaaaattagccaggcatggtcagacctacttgggaggctgaagcaagagaatcgcttgaacctgggaggcagaggttgcagtgagccaagatcacaccagtgcactccagcttgggtgacagagtgagaccctgtctcaataaataaataaaataaataaataaataaataagcttagtttgtcaatggtcaggcattgccagggtctatgtgagcacttacatgtgaatggttggtgggaacattttgctgaggccaaggtcatagttaagtccactgtgcagatggttagactaaactctaaatccatagatagtataaataatataaaaccaaagaggctgggtgtagtggctcacgcctgtaatcccaacactttgggagactgaggtgggcagatcacctgaggtcaggagttggagaccagcttggccaacacagtgaaaccccgtctctactaaaaatacaaaaattagccaggtgtggtggtgggcacctgtaatcccagctactcgagaggctgaggcaggagaatcgcttgaacctgggtggtggaggttgcagtgagctaagatcacgccactgcaggccagcctgggcaacggagcacgacttcatctttcaaaaaaaaaaacaagaaaaaaactctgaaaagttactgcactatgaagtagtaatggcacagaggattaaaaactgagggtaggtagggcacggtggctcacgtttgtaatcccagcattttgggaggctgaggcgggcggataacaaggtcaggagttcgagaccatcctgaccaacatggtgaaactccatttctactaaaaatacaaaagatagccaggcatggtggcacactatttgggtggctgaggcaggagaatcacttgaactcgggaggcggaggttgcagtgagccgagattgcaccactgcactccagcctggtgacggagtgagattccatctcaaaaggaaaaaaaactgagggtaatttaaaagccctttattggctgggtgtggtggctcatgcctgtaatcccagcactttgggaagccagggtggatggatcacttgaggtcaggagaccagcccagccaatatggtgaaaccctgtctctactaaaaatagaaaaattagccggacgtggtggcatgcacctgtaatcccagctactcaggaggctgaggcaggagaatccattgaacttgggagacggaggttgcagtgagtcgagatcgtgccactgcactccagcctgggcgacagagagagactccgtctcaaaaaaaataaataaataaaagccctttatctttttacttaaaatgtattatagaggctgggcatggtggtgcatgcatacaatcccagctacttgggagacttgggtggaaggatcacttgagcccaggagtttgagaccagccttggtaacataatgagaccctatggcaaaaaaataataataataaaatacgttatgagataacataagttttttttaagaactaaaaggaacttagttcttaaacattatccatttcatcttccccatttatagaaaagaaacacacaacaatttaaacattggattaatttttctaattatattttgctcaggctaatattaaattgattttcatttctcaattgcatgccacctgatgttgacacaacacaaactagagatataccagatggtagtgatgaaatatactttatatcatctacacagcaaaacaatgagtggtgacaaaaaatttggggttggcccttggtccctgaccaggtgcttggagtctgtgcagaccccacataggagctgatagtcaggatcataatcctagcaggcaggatataaggttactgggggtagaaattcccagctgcagctttttcatctgagcaccacaaacacagcagccccgggagcaagaaaatagcctggtatcaactcagcatccccgctgaatggcatcaggaaaattcagtgtgcctgcagattgttaaaggatgtactttgcagttcccctgaagtgataagaaaatacaattattaaatttttggtttgtttataatctaacctgaaggtaccagggaggcatgaagaggcttggttggtatttaaaataatctgttaaagctttagaaatgaaattaatgttttcatctttgtcatgtttcacaggctcagaaaaaatgtctgaatcagacttcccccatttctgctcccaagaccacagacggcctgaggcaagcacagatccctgggctcttgagcaccacactgccaggtcaggagcttcctcagtttgtccctgtcctcccaacaccacgggatgctcttctcacttttctccctcattctgcacgaaagctttctggcttaatctcgtctccactccgattattcctttctttctgtatcctttccgcaaataatatactgtgttgcatcaactctaagatagcattgggccgggcacggtggctcacgcctgtaatgccagcactttgggaggccaaggagagtggatcacctgagatcaggagttcaagaccagcccgaccaacatgatgaaaccccatctctactaaaaatacaaaaattagccaggcatggtggcacacgcccgtaatcccagctactcaggaggctgaggcaggagaatcgcttgaacccgggaggcagagcttgcagtgagctgagatcacaccactgcattccagtctgggtgacagggcgagactctgtctcaaaaaaaaaaaaaaaaaaccccactaagatagcatcaattgtaagatgtactatcattttttatactaccaaaaagaaaaacaagcacttctatctaaattatgacacattaaattatgtggaaaaaaaatacttcttagaaacaataaattgaggccgggcacggtggctcacacctgtaatcccagcactttgggaggccgaggcgggcagatcatgaggtcaggagatcaagaccagcctggccaacatggtgaaaccctgtctgtactagctgggcattgtcctagctacccaggaggctgaggcaggaggatcacctgagcctgggaggtcgaggctgcagtgagctatgattgcgccactgcactccagcctgggcgacagaacaagaccttgtctcaaaaaaaaaaaaaaaaaagaaaaggtattttacagtacttgtgactttgaaattatccccatgttgctctctacatgcatgtttggaattctccacccagactgaaaatattatggactatgtcttccgttttttctaaggctttgaacatctgcagtacccaattagtacttaaaaaaaaaaaggcaagaaagagaaaaagcttgaatattcccagtcaattgcctctttgggcctccctttccttaaattgtattttgggattctgtagtgctgacagattactggcttgaggcctgtttttcagactataaataatttgaaactatagcatttggagcttctatttattactatttacttatttattacttaaataggctttaataacctcttcctttagagcttgtaagtaaatgcactaccctgccctccttcttcacagcaagcagccatgataaagaaacccgtttcagaatgctcaacagtctgtacccattgggttctagggttatatgatggacccaatttactgtttcttttgaacactgtctcatgtattaattctaatagggcaggattctggaagcaaagttatatccgcatccttaggaaccgcacaaccacagcaggaaaaagtagttggatcatctcctggccatccagctgtgcaggtagaaaactattggcatagcctcttcctaatgttcggcataattgaatgaaaatgtagtcgtgctatctttgtggttgctggctagctttgtgtgcacagtccacccagtcccctgtgtgcccacaacagggtggtcattgaagaccttcctggtgggctgggccttgttatgtttatgtttctgagatgaatgtctattctatttctgacatgtttacagtgcttcattaatccatcatttcctcatgaattagtaatataccagcagctagtacatactaggcactcaaaaaatgtcatttactactaggtgatatcgttcactattatatcaaagcgaatctcttcttcttagttatactgagggatttttgtttttctgtagtagtaaccaggcgtataggaagtaggccatccctacggtcttttgacccaactttgacactttttaaagtccaactttttggtttttgtttgagacagggtctcactctgtcacccaggctggcatgcagtagtgcaatcacagcttactgcagccttgacctcccaggctcaggtgaccctcctgcctcagccttctgggtagctaggacaatgcccagctgtttttttgtattttttgtagagataggattttgccatgttgctcacacctgtctcaaactcctgggcccaagccatccacccacctcagcctcccaaagtacctggattacaggtgtgagccactgtgccctgtctagtccagctgggttttttgttttgtttttgtttttgtttttgttttgttttgagttggggtctcaccctgtcactcagactgtgctgcagtggtgtgatcacagctcactgaagcctcgatcacctgggctcatgcgatcctcccacctcagcttcctgagtagctgggactacaggcacgcaccaccacgcctggctaatatttttatattttttttaagagaaaacgttttgccatgttggccaggctggtctgaaactcctgggctcaagcaattctcccacctcagcctaccaaagtgctagaattacaggcttaagcaaccactcctggcctagttttttttgtttgtttgtttttttgatacatgatagatgtacgtattttcagggcacatttgataacttcaagtttggcttttaaacctaaaagatttcaaactactagtctaaaatggaaggaaacatttcttgttttcagcttactaagacagtttcgtttccatcagacctaccaattagtggttgaatgaaacttgctgcagtgtgggactgcctggaatacacagtgaaggatctgttcagttctaaggttctgagataaggcctatttgtttccttaacatgatgtaaaaaatgcctcgttagatcacacacctggactatatataacaggagcttaaaagtgtgtatcccatacttacactgagaagatggattagatagtatctactgacttttcagatgtctgtggaatttcaaaaatataacgatgggtcagtgctgtggctcacacctgtaatcccaacactttgggaggccaaggcaggcggatggcttgagtccaggagttcgagacaagcctggaaaatatggcaaaactccgtctctacaaaaaataccaaaaaattaacaggcgtggtggtgcatacctgtagtcccagctacctgggaggctgaggtgggaggatcacttgagcctgggaagcagaggttgcagtgagccgagattgtaccaccacactccagcctggacgacagagcacgaccctgtcaaaaaacatgatgatgatgatgatgatgatgatggtgcatttagagaggaggtaggcattcaggctttaaagtgcaaactgagtccctctcaggaaccgattatacacctttctgtaatcttaacacagtacaactttgtttcatggactctgtgtactggtttttttttttttatttttcagcagggcacattctgtagtcttagaatatgttcttgataggtagttgaaaatatgtgaactatagtgacctttatgtataactgtattcttttttctataaaagggaataataagaggtttgttttgtctttaggtggagagtcattcgggaggacaaaaaaggcctgctgcgaaacagctaacgaaaggagctttgtgagttactctcggaaatgacaaatcaattctgaacacttctttgggtccctagccttcaataaatataccacagaaaacaggttataataatgagtatattagcctttttaaaaatgtactttgaggcaaggcatggtgactcactcctgtaatctcagcactttgggagtcttaaggcaggaggatcacttgagcccaggagtttgagaccagcctgggcaacatggctctgcaaaaaatacaaaaattagccaggcgtggtggtacgggcctgtagtcccagctacttgggaggctgaggtgggaggatagcttgagttctgaggtggagcttgcagtgaattggagattgcgccactgcactccagcctgggtgacagagcaagaccctgtctcaaaatatatacatatatactttgaaaatctttttctatactttcttttccttttttttttttttttttttttttttgagacagagtcttgctctgtcgtccaggctggagtgcagtgggacgatctcggctcactacagcctccgccttctgggctcaagtgattctcccacctcagcctctggaatagctgggattataggcacccgccatcacgcctggctaatttttgtatttttgtagagacagagtttcaccatgttggccaggctggtcttgaactcctgacctcaggtgatccacccacctcagcctcccaaagtgctaggattacaggtagtgtatacatttcaaatatattgaatgtagtttcagcctactgtttgctcttttcttcttaaggagaatagttctttgtcttttcagagacaaagaatctctgaggaaaagcgtggtttggtaaactcccatgtttagaacagaaatgttagcatgaacttagttggccaatggtcaggcactgccaaggtttataggggtgccaacacataaatgattggtgggaacctgtgcttttgaggtcagggtcatagtttgagtcctctgtggggctagttaaactaagttataaacccactatggtataaaaaatataaaactaaaaaactgccgtattattcctatatatcttattttatttgcgtgcaaataaatatgactagatttaatttcctaacatgactttacattgacattgaccatttcccttgtaaagcattctccagcagttgcagagggaccaagcccacactgtgacaccagacaaaagtcacttccgatcactaagtgatgcggtacagagactgctctcctaccacgtgtgccagggctccatgcccactgaagaagacttgagaaaaggtaagcaggctgggaccctaaggcaccactctgataccaggaaaccctccatggacaccccccagaaaagcaagagccacatcacccccagatggtaggcaggttattgtttttaatcacagaccaaacttgttccctgtttactcaatttcccagtccatgtttaaggttgtgacttacacttctcagtattttttgaagggaagtcaagagtaggggcacacacctgtagtcccagctactcagaaggctaaagcaagaagatcatgtgagcccaggagtttgagactatagtgtgctatgatcacgcctgtaaatagccattgcactcctgcctgggcaacatagggagacactgtctcttaaaaaaaaaaaaaaatatatatatatatatatatatattttaggagggtaccctaatgtcagagtattttattgacaaattagggacagtaaatccaaagctttgtatggactgccggctccagatgggatggctttgcactagacactctacacagtggttttgcatagtccttgcctttaggccatatgcataccctgaatttttttttttttttttttttttttgagatggagtctcgctctgtcacccaggttggagtgcagtggcacgatcaactcactgcaacctctgcctcccaggttcaagtgactctccctgcctcagcctccccagtggctgagattataggcgcccaccaccacggctggctaatttttgtatttttttagtagagatggggtttcaccatgttggccaggctggtcttgaactcctgacctcaggtgattggcccgcctcagcctccggaagtgctgggattataggcatgagccaccactcctggccaaactgtttctaatagttttatgaattaggcacttgagctcccaaaagcattccctaagattccaaaatgagtccagagcattggccacacatcaagaaactgacaaaaatgtgagagataaaggctgagcacagtggctcacgtctgtaatcccagcactttgggaggctgaggcaggccgatcacctgaggtcaggagttcaagaccagcctggccaacatggtgaaaccccgtctctactaaaaatacaaaaattagctgggcgtggtggcacacgccttcagtcccagctacttgggaggctgaggcaggagaatcgtttgaacctggaaggcagaggttgcagtgagcggacatcgcaccactgcactccagcctggataacagagcaagactctgttttaaaaaaaaaaaaaaaaaaaaggctgggcgcagtgtctcacacctgtaatcccagcactttgggaagctgaggtgggtgggtcacctgaggtcaggagttcgagaccagcctgaccaacatggagaaaccctgtgtctactaaaaatacaaaattagccaggcgtggtggcacatgcctgtaattccagctactcgggaggctgaggcaggagaatcacttgaacccgggaggcagaggttcccatgagccgagatcgtgccattgcactccagcctgggcaacaagagcgaaactccatctaaaaaataaataaataaataaataataatttagagataagagccccttccccaaacctagaactccttctgtcctgatgcctggccatgctctttcccaccaccaccgctaaggcctggctgtatcagtgccctcctcttttctaatcccttcctcagctgctacaagtcttactcctcctggcagggacctctaatctcagggcacagtggtttctgtgagtccactgtgggcttccctaggacaccaaggaatagggtcaagatccagcgttaaacagggggtgtgaaagggctgggcatggttcttcacgcctataagcccagcattttggaaggccgaggtgggcagatcatgaggtcaggagttcgagaccatcctggccaacatggtgaaaccccatctctactaaaaatacaaaaaaattagcaagggcatggtggtgcacacctgtagtcccagctactcgggaggctgaggcaggagactcacttgaacccgggaggagaaggttgcagtgagctgagattgcgccactgcactccagcctgagcgacagagcaagactctgtctcaaaaaaaaaaaacccacagtgggtgtgaagactgagaagaagaatgaattagaaggtgttcaaatccttggagaccaacagacagaggacagagccacatgaccatgacagtttaatgtaaagctgtgtctttacattaaactggtttacctagtccagacagttggacttcattgtttcagctattttagtttttcataccattaggcttaggtcatctaaactagcagatcattctctactcattgatatatatatatatttttttgagacagagtctcattctgttgcccaggctggagtgcagtggcacgatcttggctcactgcaagctccgccttctgggttcacgccattctcctgcctcagcctctcgagtagctgggactagaggtgcccgccaccacgcccagctaattttttttttgtatttttagtagagatggggtttcaccatgttagccaggatggtctccatctcctgacctcgtgatccgcccacctcggcctcccaaagtgctgggattacaggcatgagccaccgtgcccggcctactcattgatatttattgcgagtctgttatatggttttattttataggtgatatcaaagtaattatgtttttggtttcctagttaaagttaaaagagttagtaataaaatgagtttccatgaccagtggacagtgagggaatgcagtgtagaaggatgatgcttagccggggaaaagctcatctaagaagagaaaattgccccagataagccatgtttgaataacagaagagtaatgtatttcagtcttaagaaacagaagacctagtcagtgatttacagtctctcactatttctttgtctctctctttttaaagtggacaatgaatttgagacagttgccactcagctcctaaaaaggacccaagctatgcttaacaaatacagatgcctgctcctagaagatgccatggtaaaagtcatgctactgatatttgttctttaaaactttacaggtcacagccactaaatcagagacagaaaggtcaaggaattatagaatataatgtaaaagtaacagatatttcacactgtagaaaaacttacgcttagctgctactacaaaaacagcagtgaacatttgctgtactttacttggtgggtcagtactattctcttgtttaacggataaggaaaccagggctttggttaagtaacttgctcgagaacagatggctaagaagtttgcagagtaattagcagagctcggatacgagccaggatcatctgacccctggtccacactctgatgccatctaccgcctttcaccaacccagagatgtgggagaaggactggaggcacatctgaacagataagctggtgacaaatgtcaaaattagttttgtttttgagagatcattgacattccataaaatttacatttaaagtgtacaactgaggccaggcatggtggcttatgcctgtaatcccagcactttgggaggccaaggcgggtggatcacctgaggtcgggagttcaagaccagcctgaccaacatggagaaaccccttctctactaaaaatacaaaaagagctaggcgtggtggcgcatgcctgtaatcccagctactcgggaggctgaggcggaagaatcacttgaagctggaaggcagaggttgcagttagccaagatcatgccattgcactccagtctgggcaacaagagcgaaactctgtctcaataaaataataataataataatgaaaaataatggatcacctgaggtcaggagtttgagaccagcctggccaacatggtgaaactcgtctctactaaaatacaaacatttcagtgttcagagttgcagtgagccgagatcgcaccactgtactccagcctgggtgacagagtgagactccgtctcaaaaataaataaataaatgaagtgtacaacttgatggtttttaatacatttacaaggtcatattgtcatcaccactgtctaattgcagaacattttgatcatcccagatagaaactgcaattcatttgaagtgccagttaaatagagaaaggagtgagaataagatacctcagaaaatgatagaaagaccgaacctgagatttgagaagcagttctaaaatcatataggctttaacctatcaattggtctcttataactcattttcaatttgatatcaactttgaaaatgtaccttgggagattggttgagctatattatacacatatacaacatagagtaaatgtgtatccgtgtgtctgtatttacttaaatatatctatatttacttaaaattatgccaccaggccaggcacagtggctcacgcctgtaatcccagcactttgggaggccgaggtgggtggatcacctgaggtcaggagtttgagaccagcctggccaacatggcaaaaccctgtctcttgtaaaaataaaaaaattgtctgggtgtggtggtgcgtgcctgtaatgccatctactccagaggctgagacaggagaattgcttgaatctgggaggtgaaggttgcagagagccaagattgtgccactgcactccaggctgggcgacagagcgagactctgtctaaaaataaataaatacaataaaaaataatgccaccaaagtctgtaataattgttctcaggcaggtgcggaggctcatgcctgtaatcccagcacttgaggaggccaaggcggatggatcacctgaggtcaagagttcaaaaagatttctaagatacattattaagtagaggagaaaaaaatacagaacagtatatatagttgctactatttgggtacaaaataaagaagtatatttctttatatataaatatatttatagtacatatatattcttatgtgtgtcagaaatatctccagaagagtactgaaaactactaggcaggcagatgcctccagggagaggcactgggtgatagtgggtgcacaccagggagaggcaaagaaaggaggctcacttttcacatgccctgtagtatcttttgaattttgtaccaatgtgtaaattattttttccaaaagcaaccattttttaaaaattgtctatgaaatgactggcctctctctttttcagcgaatcaatccctctgctgagatggtgatgatcgataggatgttcaaccaggaggaaagagcttccctgtcccgagacaagcgtttggcacttgtagaccctggtaagaaacatcgcagtgaaagtagtggatagctcctgccatggttcagggaccatggggcctttggcagtctgtctgaactttgggtaagaaacttgaaggtagaacgtgaattctggggagagctgggcacggtggctcacacctgtaatcccatctacttccttctcctctttggcctgcacagccaatgtttgttggatggaatcatctttttagatttcaaggctatattccctagaactcacattttagaatttggtgaacaaattcatgttcacactatacatacatactcttcgttgttttgtagatgtcatcaaagctctatttcacttcgattatttccagcattaacactttttccactcttgtgtaacagcagtctgcctgcctccatctgtaccctcaatgttctaaatcctcatggacatttcttttttttttttttttttgagacggagtatcgctctgtcgcccaggctggagttcagtggcggatcttggctcactgcaagctctacctcccgagttcacgccattctcctgcctcagcctcccaagtagctgggactacaggcgcctgcaaccacacctggttaattttttgtatttttagtagagacggggtttcaccgtgttagccaggatggtctccatctcctgacctcatgatccgcctgccttggcctcccaaagtgctgggattacaggcgtgagccaccgtgcccagccacggacatttcttttgccatcctctgcctcctcaagcctggtgcagttcagtgctcactcacagacgcagctcctacatacccattgtccttccatatcattttggatgagtgttggctattcattttgtggtcttgggaaagtgatgccaggtttctcctgtgtgtctaaagggattgaagtgctttcacccaaagacaagtagctatcttcacccggaaagtatgtaagacagataggttttctgtttcctggtgtctatcacccttccctgcaaagccccattccaggcccttctgctctaaggaagaaaccaggctgacaccaggaactaatttctgttttcagactgtttcaaggaggtcattagctgaaaactaatttaaaataatacttagaggctgggtgaggtgctcacacctgtaaccccagcactttgggaggccaaggcgggtggatcacctgaggtcaggagttcaagaccagcctgaccaacatggtgaaaccccgtctttactaaaagtaccaaaattaggccaggcgtggtgggtcacgcctgtaatctcagcactttcggaggccgaggtgggcggatcatctgaggtcaggagttcgagaccatcctgaccaacatggcgaaaccctgcctctactaaaaatacaaaaaaaattagtccgttgtggtggcagatgcctgtaatcccagctactcgggaagctaaggcaggagaatcgcttgaaccgaggaggcagaggttgcagtgagccgagatcacgccactacactccagcctgggcaacaagagcaaaactccgtctcaaaaaaaaaaaaaaataccacaattaaatgggcatggtggcgggcgcctgtaatcccagctactcgagaggctgaggcaggagaattgcttgaacccgggaggcaaagtttgcggtgagccaagatcgtaccactgcactccagtctgggcaacagagcaagactccatctcaaaaaaaataaaatgatacttagagatcaggactgagtgatgctttttgcccatcacattttcccatttgtcatcaagcatctaccttttcaaaaggtttaagctccccatcttgaagctggggctccacagccttggctgcctttacaggatgccctctcaggatcagggtcctgcttctgcatgttcctgtatgtgaagcagatggattctgtgagtggggctggctttgccctcagcacctgacccactgaagttctgctgtatagtctgtcctctcccaatcactcactaatgttctttttgttcccatttccagagggttttcaggctgatttctgttgttccttcaaacttgataaagctgctcatgagacacagtttggccggagtgaccagcatggcagtaaagcaagcagctctctgcaaccgccagccaaggcccaaggcagagaccgagccaaaaccggtgtgacggaacccatgaatcatgaccagtttcatctagtgcctaatcacatcgtggtctctgcagaaggaaacatttctaaaaaaacagaatgccttggcagagcactgaaatttgacaaagtgggcttagtgcagtaccagagcacgtctgaagagaaggccagccggagagagcctctgaaggccagtcagtgctctcccggccctgaggggcaccggaaaacctcatccagatcggatcatggtactgagagcaaactgtcaagcatcctagcagattcgcacttggagatgacgtgtaacaattccttccaggacaaaagtctgaggaattctccaaagaatgaagttttacacacagacatcatgaaagggtcaggcgaaccccagccagatctccagctgacaaagagcttggaaaccacatttaagaacatcttggaactcaaaaaggcgggacggcagccccagagtgaccccacggttagcggctctgttgagttagatttccccaacttttctcctatggcttcacaggaaaactgcctggaaaagttcatcccggaccacagtgaaggtgttgtagaaactgactccattttagaagcagctgtaaatagtatcctagagtgttaatagcagcagtcctccccctaccccgccccgagaccccaccccgagaccccaccccggaccagttacattcgttcctggcaaaagcaaatggaaatggtctcctgtctccagcctgcttgatctttcatcacaggttattctttctaatctcaatcctgttctttgtttaagagcaatacttgtcgtgattacagggagatcctttagtaaaattaatccttggcagaaagcagtctgataggccccactcatttcaagtgttatgaaagtgcttataggcattttgtttatttgttttgttttttaaaaacactgtaactcaatgagaccacagtatacttggcccttggtaaaattttgacaatcataagtcatttgaaaagaacagacttactaaaatcaaacgagacggatagaagctactttttaaagaatatcccactgcatctgcaaatttagttttgggtttttttattattattattttgagtttttttgtgtgtgttttgttgttattgttgaggggaagaccacatggttcttccccctcagccatctttgagcagtaaattgctggctgtgctgccagggacccgcagccctggtggaaaagccagtagcacatacgcagggcattgcagggcttccctattgatggttcaagtgcttttctgatgcttccggagcaaaacctcatgcttttaggcatatctatgttgaatttcacctagggaatgttctgttcttagttacagcagcaaaatttgaaataatttcaccaggctaaataaaggaaaatggaaaccagttaagaggcacagtgtacagaggaggccgggatagagccatgagggttataatattaatatgtatatatgtaaaagcatatatatgttaactattgagaaaaaacaagttttgcattttataattggatatagtcaacatataatgtatgtttttgtttgttgctggattttgtttcatttaacctctctttgcaccctctcccacaacaaataccaagcatcaaaagcactttcatttgaaaattattatgttgtaatttttcagtttaaactttaaggagactctggccttgtttatgcttcttgtctgagaacagtagtgacccctggcagcaattcattaccaaaacacagacaaaccaaaggtaaccagctagcccaccactgaaaggaaagatctgagacatgggattcccatttgagagccaaaggatatgccctgtcatggtttctgtttggcctgtgttcatattagtgagcatggcttactgctttatttatttttatttcttgtcagggagtattctccgttttcctttctcgtatacctgccccaggttatcccatttctgttgttacctttattcttaatgtcattgtaaccatcacttatctcctctcattgggaaagctacatgatagtatttttatgcactcttctcccacacatacacacacgtgcatgtatctgagctgctcggatccagaggtcatttttgttacagtgtgtgcacactcactctccttcttagtgtgcatactctctcatttattctgtttatctccctggctctggaggtgcagccactggtcttcactttaatgtgttgccagaatctgcttctggctgtcgccaacatggggatgacccccattgtcatcatgttgggcatttcttttccagattggcctgtgatggaaaggaaggcttctaattagaaaacacagcaacagaagacctataccccggtgcccctgtgtcccactacacacagaaaaccctgtgagatggccagtcttcataatagcaacgtaccttcaccccagccacatgccccagccaatacaaattggaaaatctggcccattttagggttaccattttttccttatttgtgccaatgtccaagttgcagatttcccctttttcctgtattgtaacatattagataagttggtgtcgccagttggtactttctgtttgggtagtcctagggtaacaccctgccctaaactccatgatttcataggcttttcttcccttggggctcatgctcccctaattcctagcaagatgatccttcctaatcaaattcttctcattgcagaactttatccctggaagccttcatgtgggctgctagtgagttacattaattactgcaaatcagtggaattctcaagagacaagataagcttcatgtacatttgtcacctctctttcttccctatcctgccctgctgtcccaatcctagcttttctatataccatcctaaagggtttttaagccctaacacttgtctagcaaatggagagcctaatttaccaaaatgaaacttgtaaatttttgtgtcattgtatgtaagtttactttttatggaggaaggattctagataatgacaaatgaagattatgacatgtatttcactcctgtgattaggttctacgcacatgggtcataactcgcatgtcgagccccctctagtgaagggtaggagagctcagcctcggatggccaacattcagttgttcaggttcattcgtcaaagttaagttttagaactatttgtactcagtaacaaaaatcattttctttttttttttttttttctgttgtggaaaagcgtgaatttgttattaagcatttgattttctgtgtccttaagtacttcctgaagatgaagcaaaattttaatctggcaattatgaaaaagaaatattttagctctgaaggatttagtagattctgttagattagggaggccttacagactgactttacttaaagaggacgcgtcactcgctgtcagtgtggtgtgggctttatttgcttaaataccttcatttgtatagtacgtctcacttgaaattgctttgtatacattttgtaaaaatatttataaaatgttttgtaaaaaaaaaaaaactataacaaattgcagtttattttgttatgttggataaatactgttaaaagaaaccagtcagtaactatattgttaatccatggttaggaaatgtttagttggagattacaaattgaaacaaccattgcaatacagccaaagatttggg

SEQ ID NO: 250 - DNA, 6391 bp, Homo sapiens
cgcagaaaccccgttgacaaggcactgctttttcatgacgttgtcatggatgatgatgatgactcgtgtctccttgatcttattggagacccacaagcattgaactattttctacatggacctagtaataaatctagcaatgatgacttgactaatgcaggatattctgcagccaattcaaattcaattttcgccaactctagtaatgctgatcctaagtcatccctcaaaggtgtaagcaaccagcttggagaagggcccagtgatggactgccactttcaagtagcctccagtttcttgaagatgaactcgagtcttctcctcttcctgatctcactgaggaccaacctttcgacattcttcagaaatccttgcaagaggccaatatcactgaacagacattggcagaagaggcatatttggatgccagtataggttcaagccaacagtttgcacaagctcagcttcatccttcttcatcagcatcctttactcaggcttctaatgtttctaattactcaggtcagacgctgcagcctataggggtgacgcatgtgcctgttggagcatcgtttgcaagcaatacagtgggtgtacaacatggctttatgcaacatgtggggatcagtgttcccagccagcatttgtctaatagcagtcagattagtggttctggtcaaatacagttaattgggtcatttggtaatcatccttccatgatgactattaataacctagatggatctcaaatcatattaaagggcagcgggcagcaagccccatcaaatgtgagtggagggctcctggttcatagacagactcctaatggcaactccttgtttgggaactctagttccagtccagtagcacagcctgttaccgttccatttaacagcacaaattttcaaacatctttacctgtgcataacatcatcatacaaaggggtcttgcaccaaattcaaataaagtcccaattaatatacagccaaagcctatccagatgggtcagcaaaatacatacaatgtgaacaatttgggaattcagcagcaccacgtacaacaagggatctcttttgcttctgcaagctcaccccagggctcagtagttggtccacacatgtctgtgaacattgtaaaccaacagaacacaagaaagccagtcacctcacaggcagtgagcagcactgggggcagtattgttattcattcccccatgggccaacctcacgcaccccaaagtcagttccttatacctacaagcctttctgtcagttccaactcggtacaccacgtccagactataaatgggcaacttcttcaaactcaaccctctcagctcatttctggccaagtggcctcagagcatgtcatgttgaacagaaactcttccaacatgctcaggaccaaccaaccatatactggaccgatgcttaacaaccagaatactgctgtccacttagtgtctgggcagacatttgctgcctctggaagtccagtgatagccaatcatgcctctcctcagcttgtgggtggacagatgcccttgcagcaggcatccccaactgtattacacctgtcacctgggcagagcagcgtttcccaaggaagacctggcttcgccaccatgccatcggtgacaagcatgtcaggacctagtcggttccctgctgtcagctcagccagcactgcccatcctagtcttgggtctgcagttcagtctggttcatcaggatcaaactttacaggagatcagctgacccagccaaacaggactccagtaccagtcagtgtgtctcatcgtcttccagtttcttcttccaagtctaccagcaccttcagtaacacacctggaacaggaacccagcaacaattcttctgccaggctcagaaaaaatgtctgaatcagacttcccccatttctgctcccaagaccacagacggcctgaggcaagcacagatccctgggctcttgagcaccacactgccagggcaggattctggaagcaaagttatatccgcatccttaggaaccgcacaaccacagcaggaaaaagtagttggatcatctcctggccatccagctgtgcaggtggagagtcattcgggaggacaaaaaaggcctgctgcgaaacagctaacgaaaggagctttcattctccagcagttgcagagggaccaagcccacactgtgacaccagacaaaagtcacttccgatcactaagtgatgcggtacagagactgctctcctaccacgtgtgccagggctccatgcccactgaagaagacttgagaaaagtggacaatgaatttgagacagttgccactcagctcctaaaaaggacccaagctatgcttaacaaatacagatgcctgctcctagaagatgccatgcgaatcaatccctctgctgagatggtgatgatcgataggatgttcaaccaggaggaaagagcttccctgtcccgagacaagcgtttggcacttgtagaccctgagggttttcaggctgatttctgttgttccttcaaacttgataaagctgctcatgagacacagtttggccggagtgaccagcatggcagtaaagcaagcagctctctgcaaccgccagccaaggcccaaggcagagaccgagccaaaaccggtgtgacggaacccatgaatcatgaccagtttcatctagtgcctaatcacatcgtggtctctgcagaaggaaacatttctaaaaaaacagaatgccttggcagagcactgaaatttgacaaagtgggcttagtgcagtaccagagcacgtctgaagagaaggccagccggagagagcctctgaaggccagtcagtgctctcccggccctgaggggcaccggaaaacctcatccagatcggatcatggtactgagagcaaactgtcaagcatcctagcagattcgcacttggagatgacgtgtaacaattccttccaggacaaaagtctgaggaattctccaaagaatgaagttttacacacagacatcatgaaagggtcaggcgaaccccagccagatctccagctgacaaagagcttggaaaccacatttaagaacatcttggaactcaaaaaggcgggacggcagccccagagtgaccccacggttagcggctctgttgagttagatttccccaacttttctcctatggcttcacaggaaaactgcctggaaaagttcatcccggaccacagtgaaggtgttgtagaaactgactccattttagaagcagctgtaaatagtatcctagagtgttaatagcagcagtcctccccctaccccgccccgagaccccaccccgagaccccaccccggaccagttacattcgttcctggcaaaagcaaatggaaatggtctcctgtctccagcctgcttgatctttcatcacaggttattctttctaatctcaatcctgttctttgtttaagagcaatacttgtcgtgattacagggagatcctttagtaaaattaatccttggcagaaagcagtctgataggccccactcatttcaagtgttatgaaagtgcttataggcattttgtttatttgttttgttttttaaaaacactgtaactcaatgagaccacagtatacttggcccttggtaaaattttgacaatcataagtcatttgaaaagaacagacttactaaaatcaaacgagacggatagaagctactttttaaagaatatcccactgcatctgcaaatttagttttgggtttttttattattattattttgagtttttttgtgtgtgttttgttgttattgttgaggggaagaccacatggttcttccccctcagccatctttgagcagtaaattgctggctgtgctgccagggacccgcagccctggtggaaaagccagtagcacatacgcagggcattgcagggcttccctattgatggttcaagtgcttttctgatgcttccggagcaaaacctcatgcttttaggcatatctatgttgaatttcacctagggaatgttctgttcttagttacagcagcaaaatttgaaataatttcaccaggctaaataaaggaaaatggaaaccagttaagaggcacagtgtacagaggaggccgggatagagccatgagggttataatattaatatgtatatatgtaaaagcatatatatgttaactattgagaaaaaacaagttttgcattttataattggatatagtcaacatataatgtatgtttttgtttgttgctggattttgtttcatttaacctctctttgcaccctctcccacaacaaataccaagcatcaaaagcactttcatttgaaaattattatgttgtaatttttcagtttaaactttaaggagactctggccttgtttatgcttcttgtctgagaacagtagtgacccctggcagcaattcattaccaaaacacagacaaaccaaaggtaaccagctagcccaccactgaaaggaaagatctgagacatgggattcccatttgagagccaaaggatatgccctgtcatggtttctgtttggcctgtgttcatattagtgagcatggcttactgctttatttatttttatttcttgtcagggagtattctccgttttcctttctcgtatacctgccccaggttatcccatttctgttgttacctttattcttaatgtcattgtaaccatcacttatctcctctcattgggaaagctacatgatagtatttttatgcactcttctcccacacatacacacacgtgcatgtatctgagctgctcggatccagaggtcatttttgttacagtgtgtgcacactcactctccttcttagtgtgcatactctctcatttattctgtttatctccctggctctggaggtgcagccactggtcttcactttaatgtgttgccagaatctgcttctggctgtcgccaacatggggatgacccccattgtcatcatgttgggcatttcttttccagattggcctgtgatggaaaggaaggcttctaattagaaaacacagcaacagaagacctataccccggtgcccctgtgtcccactacacacagaaaaccctgtgagatggccagtcttcataatagcaacgtaccttcaccccagccacatgccccagccaatacaaattggaaaatctggcccattttagggttaccattttttccttatttgtgccaatgtccaagttgcagatttcccctttttcctgtattgtaacatattagataagttggtgtcgccagttggtactttctgtttgggtagtcctagggtaacaccctgccctaaactccatgatttcataggcttttcttcccttggggctcatgctcccctaattcctagcaagatgatccttcctaatcaaattcttctcattgcagaactttatccctggaagccttcatgtgggctgctagtgagttacattaattactgcaaatcagtggaattctcaagagacaagataagcttcatgtacatttgtcacctctctttcttccctatcctgccctgctgtcccaatcctagcttttctatataccatcctaaagggtttttaagccctaacacttgtctagcaaatggagagcctaatttaccaaaatgaaacttgtaaatttttgtgtcattgtatgtaagtttactttttatggaggaaggattctagataatgacaaatgaagattatgacatgtatttcactcctgtgattaggttctacgcacatgggtcataactcgcatgtcgagccccctctagtgaagggtaggagagctcagcctcggatggccaacattcagttgttcaggttcattcgtcaaagttaagttttagaactatttgtactcagtaacaaaaatcattttctttttttttttttttttctgttgtggaaaagcgtgaatttgttattaagcatttgattttctgtgtccttaagtacttcctgaagatgaagcaaaattttaatctggcaattatgaaaaagaaatattttagctctgaaggatttagtagattctgttagattagggaggccttacagactgactttacttaaagaggacgcgtcactcgctgtcagtgtggtgtgggctttatttgcttaaataccttcatttgtatagtacgtctcacttgaaattgctttgtatacattttgtaaaaatatttataaaatgttttgtaaaaaaaaaaaaactataacaaattgcagtttattttgttatgttggataaatactgttaaaagaaaccagtcagtaactatattgttaatccatggttaggaaatgtttagttggagattacaaattgaaacaaccattgcaatacagccaaagatttggg

SEQ ID NO: 251 - protein, 1065 aa, Homo sapiens
MDDDDDSCLLDLIGDPQALNYFLHGPSNKSSNDDLTNAGYSAANSNSIFANSSNADPKSSLKGVSNQLGEGPSDGLPLSSSLQFLEDELESSPLPDLTEDQPFDILQKSLQEANITEQTLAEEAYLDASIGSSQQFAQAQLHPSSSASFTQNVSNYSGQTLQPIGVTHVPVGASFNTVGVQHGFMQHVGISVPSQHLSNSSQISGSGQIQLIGSFGNHPSMMTINNLDGSQIILKGSGQQAPSNVSGGLLVHRQTPNGNSLFGNSSSSPVAQPVTVPFNSTNFQTSLPVHNIIIQRGLAPNSNKVPINIQPKPIQMGQQNTYNVNNLGIQQHHVQQGISFASASSPQGSVVGPHMSVNIVNQQNTRKPVTSQAVSSTGGSIVIHSPMGQPHAPQSQFLIPTSLSVSSNSVHHVQTINGQLLQTQPSQLISGQVASEHVMLNRNSSNMLRTNQPYTGPMLNNQNTAVHLVSGQTFAASGSPVIANHDQLVGGQMPLQQDTVLHLSPGQSSVSQGRPGFATMPSVTSMSGPSRFPAVSSASTAHPSLGSAVQSGSSGSNFTGDQLTQPNRTPVPVSVSHRLPVSSSKSTSTFSNTPGTGTQQQFFCQAQKKCLNQTSPISAPKTTDGLRQAQIPGLLSTTLPGQDSGSKVISASLGTAQPQQEKVVGSSPGHPAVQVESHSGGQKRPAAKQLTKGAFILQQLQRDQAHTVTPDKSHFRSLSDAVQRLLSYHVCQGSMPTEEDLRKVDNEFETVATQLLKRTQAMLNKYRCLLLEDAMRINPSAEMVMIDRMFNQEERASLSRDKRLALVDPEGFQADFCCSFKLDKAAHETQFGRSDQHGSKASSSLQPPAKAQGRDRAKTGVTEPMNHDQFHLVPNHIVVSAEGNISKKTECLGRALKFDKVGLVQYQSTSEEKASRREPLKASQCSPGPEGHRKTSSRSDHGTESKLSSILADSHLEMTCNNSFQDKSLRNSPKNEVLHTDIMKGSGEPQPDLQLTKSLETTFKNILKKAGRQPQSDPTVSGSVELDFPNFSPMASQENCLEKFIPDHSEGVVETDSIAAVNSIC

SEQ ID NO: 252 - DNA, 96088 bp, Mus musculus
  misc_feature (1)...(96088): n = A,T,C or G
tcaagttgccattaacttccgcggcggccgccagctcggcggcggggaggtggcagcagctgcagccgccgcccgggaagtccgccgcccggcgcgcccgcgcggggagccgacccggcctcggcccgcaccgctggcccgcgctgtcccggttccacgcctgagtgagtcccgcttctttgctccctgccagtgctgctcccgctctgggtctcttgcccggctcgcctccgttttctgcggatgcggaaccgatccaaacttctcagtggccccggctggggcgactctgcgcccctcgcgtgccggggtcttgctggcccttctctcgagcgcgctcagacattcgggaggactgggctggtgaagtgagggtcatggccgggatgcggacttacttggcgtctttgcctctcccgcacacctgcccggcaggagtccctcgttagacactttagtccaggtcgtgggcatggcccgctttagaggacgaaggcggcgtggggggaagccctcggcgggcgagtggggaaaagggagccgctcagtgagccccggtgcggggaaggaggcgaggtgcggggtggagttggaaaggtcgcgcgccagatctggagttcacttagcatcctctcccatctcatctccccctgttctttcccggccagccctactttgctggtggcgagcggaggtggagaggggcctgggaagtttgtggcaacttctctatcccgagagccactcgggcgctgggcgctcaagttggagcccagagtttgagagccgaagaacagcgctcgtgcagcccacgccggcgatcgcgggtcggtcctggagggtgattcgggtttgggcttgggcgggaagccgagggaggtacatggtgtcttagctgggactgtggccccacaggtgcagcccagggggcaactcctcatttccctgcgacagtacacacccgagagcggcggccttctacagtgttcctccattgcagagctcccagggtggccgaactggggttgggcagctcgaatgcaagggactgagggggcaagcggcaggtccagatggtgacacgtgcgtgtgcttggcccagcaaaaggcgctaaacaggtcccttctgggatgatcccagaagaccaagaggacagcagcttagagctcagggtagaggttttgaccctggcctccaccagggccaggttttacttaacaagatgtcaaccacaggctcatctcttaaaatgtccggttgacaactttgacctctgcaccctttctgggagaactttctctgaggcatgtaggattcccagggttaagacgtggatttcacttgtccatagggaccggaagacacccaattccctggagagaaccttttctgctcccgattgattggctggggttccatgtttgtatccttggaggccagagaacccaactttcccaagacagaagaggggaatgagcaagagtctggtctctttctgccagaagtcaggttctgtccttaagcagtacctggattttttacagtgtttgtgcctggtgacagaagctcagccttccaaaaactttacttaattttacaccttgtccagagtggattttctgaaagagtgaaattttattttgtagtcagattctccagataggtaggtaggtaggtaggtaggtaggtaggatagatagatagatagatagatagatagatagatagatagatgagtaagttatgccatactttaaatccaaagaaagcaagggttgcggtgctggctctataaccctttatgaatctcccatgtggaactcgggctatgacttagcagcggttctttatttctatggcatattatttttgtagaacagtagtaagcgcatacactgcctgctccagtctgctggcaaacattagcattcaagcttacatttttgacaaatgtgcagacaggaatagcatgaataggcatcttaaatattaacaacccaagcatctgttgtgaaacaaatttaatatatttactcagtctttctcacattgttaggaaaggttataataagtgcttaatttcaacttaacttagcagaagtaactggcggcatcattcactacctcccaagctctaacacagttaccacgcagaaatactttaattaacttggttaagggcattgttaaataaatacattttaagcaatgtgcatactatataacatgcaacagtagcgaaatagtcatcccgtttgtatgcattttaaatgacctcatcttataaatataccaagtatgtttagtcttcatctctatttgacacttattagttcatttttttctaatggaaacaatattttaaatgtagagttgttcagtcatatgtaatacataatatgtaaacagtagcaataaaatacagagcattgttaaatttgaatatggctacatgtaacaaggttatgcaagagaaataaaatcactgctcaattttgttttcctttctgaataatgaatacagatgatggatgaaaaaggaacaaatagggatttcctccctgaagtaatagcttcttaaaatgtatgcgaggtaggggagggagaacaatgataaagacctaaagaacttcccaaatccacatagctatttccagaatcaatgcattccttactttcccacaagctgaaatatgtaataaataatagttctttgtatgtaaaagtattcaaaaggaatgccttttgttcccttgtaataaattaatatattcttctttggttgataatctacaaaagtagttccttgtctctttggcattttcaacaaaagcaacaacaaaatgaatattggtttattcttcaaagaagtctgttgccagctatatgaacctgtgactgagtaagatatgatgctgttgagtgatagctgagaaacaccacagtaaactagcagggtctgaaaaatctaggagggaatctcaatgctttttttttttcatgtgacaggttgtgggttgtaaattaggcctaaaaggtcaggtgacaggcacctgttcctcattattgtagaaagcttttggttacaaacagtgttaagctaaacataacatgggtatgtaacagggattctctaaagcactccagtagtttttacctactctgtaaatgtctaaacaggacatacatagataagccctgtgtacaaacactccatttcttccctacatgttatcttgtatgattgcaattaatattatgttagtacttgttactgatgaagtacataaatgaatatggctacatcaatcttctaattatgtctagatcattgtagttgaatgcaaaaaattttttttcttaaaaacaaccctctttttcctttgcaaattattgattatgttcatgttttacctggaaaaccttgccaagtggccttttatacattttagatgaattctcatttaaaatgataccacagaatattttttctcagcacccatatatgaggggaaaatcagctgctacatattgcagtagctttgtgccatacataaaccagaaagaaaaccacactgtacaggaatgtagggaggctcttcagacctggctgttctcttgggagtattcagagttcttcatattgaaaaaagagagcagagcttaatccctataagtggtttccttttacatgttccagagagcaaactgtgcgtgtatatggaaaagaccacactagcagaaggtgacagaatattagaggtgccaattgcttttaattagcagaggaggaggattttgagtaaagtaaataactcaggttattcagttctgttattaaaatatgttctttatcctttttgcctttaaatagtttgtgctttttatatgaagcgctcctttttagtatttgctcttgaaattgattcggttctcatattccaaaactctgtgatgattctttattttataaattgatttacattttgacagaatagagttaagttaattaatagatcaggcacaaaaaaaaaataacccacagtagggtatattttctggtaaaatgaaagttatgtttcagcacgatgagcatgaggcttcagtaatctgctcctcgtgtgcaatgagcacttcctacttccagctagcaggcacctactgtttatttacgctgcattaaactgacagctcagcaatcagaggaaaaatattacttaccttcctgaagtaaataccagtttataggttagtgcacgtatttatattcctgtcaccactaaataacggctctgtctctgttttaatatctacctgggctgtaacccagggattcacactcttcctggctgggaagaaggggtcgacaggagttttttcttcccagtccctagtggcaaaactctaaaacagaatcatttcacattctcgtttctgtcatgcgaaaacgagttgggagagatgttggacactgttcctgtgcacccccactgcagcaccaaccccctagctcattggcatgccactgaacgcagtcatcctgaggcctcccctggacagatgtgttcaagcacagtcaagtattcatttgctaaattaactttctacaaagttccaaacagatcaaactacctgattccttagattatgtctgtgataagggctcttcccttcccattccgggatggaaggcttcagtttttaaggtggttctgcaaacatgcctataaagtagggctttctctttggatggttgcttcttagctttgctctaaacaggctgtcttccttgcccttccttccttctttctttccttccttgttgctaatctgtcatcctcaaaataaggctaggtgctacttagccttctattttataatactggatatatttgtttcttcttcagttcaaggtccctctctttcagggtccccttgaaacctcaaaatcctgctgaagttgaatgctcaaactcatggttaacgggagaggatgcttttcgttgtttaaattgtctacggagctgtggaacttactgcctgtacacagttgtcaatccctagccacatacttcacaaacatcagagcagactatggtcttaatacagctagcatgtaaatcaaatctgttacacaaggttccttccctccactctccccaagaaaactatttcccatggtaatttatatagcattgctaactgctgttctcaatggtgagtctatttaaacttgatgtcttcataaagtgtgatcaatacattaacacacattattttgtacttttgatcttatgccaacggtaccttttgctgtttattttttttaaaggcttttttaagatcagatatttcattttagagtaaatagatacagattgtgtgtatacatattctgggtgagatttcgtcgtagagcatttctctagcatattggcctatttttattccttcaagtcattctgtaccacttgcacagttgttgctgtctgaaggtttgtaatagtaattctaaccacctcccccttcaatggactttcaaggatgcgtgcgattcagtcagtcggggatctagttcagttgtgagagatgaaaagcagctagctgctttctgctgggatttatttggtccagttatgtgacatttagtggagaagtagcttgtaatcaaacattctgagtctgctctgattccaggggagggaagatattgctggataaaacattcacatgtatattattttactttacctatcacgcatttgggagtccacttgttgtagaacacatttctgagtacttaggggtgcaggtcccagtaatgagggggaacccatgcagaggagggagctgtctgactccacctgcttgtgactttacaagaatgcctggggatctaagccagcctccctcggctgttcccttcactccccccacctaggtgtgcaggaagtggagggcgttctacccagctgaagggggtggactctactcagagctatgacctgatttgtggcgcaccctcagatctgcagacatggtccagctgcttcccaggcaactggtaaccacctcatttgggatgagcttgccttgctaacctgccagagagaacttcgcactgtcaccccatcaaagacctttcttctagggctagattcggaaaccagcctctggtatttgagagggtaagtgtcagaaaagttactacaggcactcggttccatgtggagaatcaggctgcagctacagtgactgacaggcatattgctctagtgatgtagttgggcatttgtctctgggctattgctttttttttttttttttttcccctcagctgtgaatgatttgggaccaggtacctaggacaggttttcagtgcacattcagcattcattgttaagtggtgagatgtgctagtagtctccaggaggggaattcttagaccttctttcctttaggtatttaaagaaaagacagcgtgtcatctgtgtggtggggaaatcttcaaatgcagttttcctggaagccagagctgatggctacaggattcttctgtaatcttactcaggattttctgatgtgctgttgaaagggtggaaatgacagtgtagccttttaatgtttttagtatattaaagaatttagggtaaaagaaattttatgttctaaatattccattgcaataattttataagtaaaataacactcactgtatgcagatattttcgaattgaaggtatccttgagtagattgtagccataattagctgtctgatgttgaatgcaattgggttttcctgttccagtgaaccagacaatgagaatcattggagatcaacaattaattctatgcgattcttgatatttagcaagccgttcctttgccaagaaaatattgtactagtgaatgaagcacaaaatacaaatgcttacagctttacattttcaaagattctgtagaatccacaaaataatcgaagggaaacaacagatgccttgcttaatggtagaccagttctttagtctgtgggtggcaggaaccccattttaataactatgcttccaaaaactcttagaggtgacctactcttctgatggtttaagaggactaagaaacaatttagaacattatcttaaaagtttaaaaatgacagccttagtgtgtatggagtcattgtattttaatcatactgtatgcttattagtgttattagagcagtagacagttaattacagcccttttctgagacatgttaactgtatattaacaaccatgttaagaaagaatgatgtatgcttttggatacaagctgctgcttgctagattcttgaaaaataccttttcaaatgtatggagtcacatttttggtcaagaatcatcaagggttttcactaagataatttaattttaaaacttctacaagttatggaatgccttcttcgttttcccgtcttccattagctttggctctctggcatttgctcctggcatttgatgccgccattgctctgcagcagtagctttcccaccctgtagtttgagatggccacattttcttgattcttactttggccaacgtggaccatgagaagcatattgagttgatttagcccgataaatattcctttttgtggaatcatcgtagtcaatgttctttagtcaaattgtattattctcaactccatataacccaacacatgaaatatatttgatcagccaactacagcgatgattttatttattgcctgaatctcaaacctaggttccagctatggcttctgtcacagcaaaacaataagtgagtgcaaccactgggttttaatacctaaacacgtcccgtggattgcttgactgaattccctcgatggagtggaagatcttgtaacctcataatatagcatttaaaaacacaggcccgtttctattttgggaaacctgtagcgactgctcttatgtattatcatacaaggaattaaagtaaaaaaaggaattaagtatatgctacatttctgcaccagataaaataggagagtctgaatgagcaggtcacattctctgcctggcttatagtaagcactcatttaaggagagcgaaattaataattgggtaatattgaatatagcttgtgctgataaagatttattgaaaaaagaggcttttctttgaagcttttcattttttgctgacacatgagcatctaatcctcccgtgaaccagtttattattatttaatgtagacgatttaatattttccttccttaagtgtgtcctccgtcctttgctatgctctggacaacagtgctagctagagcttccgtcttagccacaccagcttcccttcaggatcatgtcaagtctctgtttggcttcatggtgctttgatgttgggctgtggcaacaaacttgagcagaatcaacccaaagcactgccctgcctttgtggttgggcacataggggtctgggtggtattccagagcccagccagcatcaggctggtaggtggtgcaagtctccttgcctctgtccctttcccaactacagtgatgttttctcaggaccatgaagaatgcataaagacaaaacaaatccctgtagttatgcctcatgtaccaataggagaggatggggtatgagaggtgttcccttgactccttaaagctcacaggccggagtcaacaataggcctccttggctgggtgggaacttttgcaaaggttacaggcattctttgaaagttatctaaaaaagagacttcttttaaaatttttattatctttttaaagcatgcgtgggactatttgcaagacattcctatttagttacacagcaaagaaatacgctctaagtggtgcactgctgtgtgacctattgcgttaccacacacattctgtctctttaaaaacacactctcctctgtctgccctattaattgttgatatgttgccatccacgagacaaaaattagagctgtaattaaatagtcatgtgatgctccttagtgccagtgagagcaaactcatttgtccaggccctgatggtcactgattattgtattaccactggcttgcttgatttttttttttttttccaattctctctgtagcttccctaaccactgtccttttcaaaattaaagaaagtagcagacatcgagccagttaattggctggagggaggtcctgagggatgtaaggtagggttacttttttttttttttttttttttttttgcctttgcctttggtcacctggtaggttctttgggaaggctacatcagtagtgtggttggctgccatttaatttacactggtgttttggctgggatggaggcatatggggaatgccaggagaattacaaaaggagctgggtattaaaattcagaaatgattaaaattgaaataaaaggatgctgcttctttgccagtactctggcagtcataatgacacatagagattagcctctaccttcatcctctccttctttctcatttcctcttgtttattattgacacattttccttatgtctgtctctcatctctgtatcttttgtactattatgtgtttctccttctctcgctttccttaagcatggagacgcctacttaaccttattataacaataacagaataggttattaatatttaatatgcacatgattaaaatttctctcccttaaacataggtcagctgtattattattaaccagcatgtaatttttcatttaaaatattcctattctgccttgctgtttctgaaatgccttctactttagtagtgatttaatacataatgtttagaaaactgtggacggctactgagaaaagaacttaccagtcatggataatcaattatgcatgaattcaaatgtaacagatggaatctggtgagttaaagtttctctatgccttagtgttttttatttttttaatttgtttgtttgacacctgtctcttatatatagataaacatctaatatagcatgtgcgacatttccttgtgtctttatttcccttttaaagtgaacatagtttttacatcaaatgtaaaggcagagacaccttgatctgtccctaaacatctgcttctgtccctttgttttatttctgtggaaccatgtttagctaatggccactcagctggatagtcgggtgggaaggaagacccacacctagttgctcttctactgtatcagatactctttctgtggggagttgcttaataatagggtattacaataactgttgtttttaaagggtttctgatgaaaacagtggtgctccactttttaattgagtaatccattcttgcatgttatgcaagtgttaactgtacatttatcatgttataccatatgcccaatatattcacttgtgtgtatatatgtatacacacacacacacgcgcacacacacaaatatgcacatacacatacatgcatgatgtttatatatacttggatataggccaagccattgagcttttcaaattcattatgaataccacaagagttagttttatatcctaagctgtggcccttcccagcctcagagatacatttgtttaaagctttgtgaatctttagtgataaattcccttcatacaaagtgaactcaaggcttggtttcaagggcctaatttacccaaggagagatgagaaggctcatccttatccagtgtgccgtgactaccaagcttcgcttctactgtagaagtcactggagaagagttggtactgaccatccgacaagcagcttaatctccagacagttacaagctggtccccatcagaggtgtttacaaataagctgtttgtctcccacatgtgtttatatataaaaaatacaaatgaaaaaagtgttttgcaaagtaaaaataaatgattaaaaaatagcctcaaggctctctagttcttttttaaaaagttatagtgtagtattatttataaactttttgcttcttaccagccagaaatttacatgtaaatttatagtccatgttacttatctaatgaattaagcttcacaataaacatgttaataaagaggcatcttcaagacaggtaactaggcctgtagctatactgtaaagctatttataataattaatgcttttatctataaatatatctttaggtttacaacatattaatattccttagtcatgcacatcagaaaaacacacctatataaatatgaacttgagtaaaatataatgtataagataatttccagttcattaaaaattccaccattaatataaaaatctataatgtaagatcaccagaaatagatgatatgacactctatctaggatagcatagcacaggaaagaatgttcgtaattgttggattagaagttaactaccttgatccagatccctaccagagaagtaactgcctacagttgaagttaattaaattcagatttaagaactttgttttttttttaaacaatagagtctaaactcatcacatgcagacaatttatagattattattacattcatgccaacctctcagatgcttttctacttgagcggttgaaggaagatgtactattttgtgaatgtaatcattatgcttttcaaaaggatacacaaagattatttggactgactgttctcatttgtttcagtctctctcctctcttcctcctttgctaaggctttgtgttgagttaatgttaaagagaacaaactatcttcttgcatttggaagaccttcagaaagggtgagagagattggttggtgattaccaactcaagctaattatcttttgggttcgacactcatcctatgaatcaattgtctgtaactgactggactgtggctgttggcaggtaaggacaaaaccctaggaagttggtacagggatggcttgtccagtgtcttggagctcgctgtctctctgaggcttggcatgatatgttaatgacaatatatttcttctgtacttagaaacagctgatagctctgctattttgtttaaattttgtttcctgtggtaaatatctaacctaaaacatgccattttgatgatatggagggtacaattctgtggcattgattgtatttacaccgatataaacagctgtcaccacccgctcttctgaattctttcatcaacccctttgaactaacctctacttttgcttcatcaaatttcaagcattaaaatgaggttgaatcattttctagctgagaagaatttgtcccaggttgtggctttcctttgcttaagtgttctgtgatgtttgctcatggcagtacagtaccagatactgcttttggcagatgtctccacagacattatttggactagttatttgggtctttatccttgcaactaaactctttacctttgcaactaaaccagaaaacactaataataataatattcataataataataatattcatatctctaaggaagtctgattggtatatcttggtgaaaggctgggaagggctgtcggaattcataagagttagaatccttccagcttcccaagagtcctgccctcctaatcaaggttgaagtgtccctcagttattgtcaaggcatccagggcatgtacagtttgagcactttggttctgctcaaatgcagtgacaggatggaaaagaaaaagaaaaagatacgttttcaagtattagaaaagctcactcaaggttaaatagtggttaagaggggagggaaaataaaaatcatattcaactgtgttggaaaaaaagggggtgggtgtagaggaaacttggatagttctggctccagtaaataatagactggttgcagaactgagcttccatgtgtaattttgtggttagtcgcttatgtctgcgatgataaatcacatacctgcataggatttttggcaccccagtaaatctcaaacaagtgcccaaatgctaatttatcatggttccttggacagcatacccctttttaccaactcagggatctaataccctgttcctacccccttatctgtctgtttcaaacaaatgcctacacaactactccttgagttttggaacactcacttctggtccctgcaacaaacctgccttgctatgtgtccctgggattaggttaaaaacttcagttcaggggtatcctagtgggtctgttcgagtccctgtctcccaaatactgcctacactagagtgtatcagacctgatcacttagcagagacatcctgtgaaccttaaaaacactgcctagctcacacatcttcaactattcaattgcagtaagctgggtatccatacttgtctttccttcctaagattcttaagccctaagtccttcctgcaaacagttctgggatttcctcctgtggtgtcagggatatacaaacatgtgatacattttaggatgttctaaaccttgcaatttggaggtaccagtacagaacaagaatggcacaaagatggtagaatgcatagtgtgatagaacaggggaagggaaaaaagtcgtagccgtatgtgttggctagttttgtgtcaacttgacacagctggagttattacagagaaaggagcttcagttggggaaatgcctccatgagatccagctgtaaggcattttctcaattagtgctctgggctggtcatcttgggttctataagagagcaggctgagcaagccatggaaagcaagccagtaagaaacattccctccatggcctctgcatcagtgcctgcttcctgacctgtttgagtttcagtcctgacttccttcatgatgaacagcaatgtggaagtgtaagctgaataaaccctttcctccccaacttgcttcttggtcgtgatgtttgtgcaggaatagaaaccctaagacaccttagccttagccttagacatagttgtagccatagccacagcctaagccatagccttagccttagacatagctgtagccatagccacagcctaagccatagccatagccttagacatagctgtagccatagccacagcctaagccatagccatagccttagacatagctatagccgtagccacagctaggccttagcattagccatagccatacccatagtcatagtaattttttttttctatgcagttaccaggttttggacagtaaggctaaactaagctgtttattaaagggggtagctgaagggtccgaagagaaaaggagcctgaagttcattccaagagccataaaatcaaaccaggcatctggaaacaaaagcagaatggtggtcctatacttggtaggctcagtggcaactgcaggaatctttactgatcttagttttagatacgggcctagatagaaatactaattttgatgaagttatttccactatgctttataaaagacttatattaatgtctataaaaggaaaggtagctctgaaaaaaaaatctgttcaatagatccttggtagtgaaattcctttttgttggatgtaaaggccttgctgacttgccagccatgatcgctagctagtactgctgtgatactgacttgctgagaacatatcacaagttacctttgagaatttacatccaactggggggaggggggcatcttttgatcactatccgtctggctataactgaaacccagcttccttgggtagagaaaatcccaagatgattgaaatcttgggcttgatcattattatattttgctctctcctgcaaacttttccagcctttaacatttttttttttttctggagcatactgtaccaggtttcagtagctagatactctctcagtttaagtagctacattacaaaactccatggctaagggggtttgtgttagcatcacaggaagctggagtaagggtggaatggctgtgtgtctatggtattaaagtactcacagcaaaccgcatatgtagtcattgcatattgttccaaatgtattacaggaccctcccaagtacagacatgtctggaaagccatcttaaatttgtattcagtggtacactagtgtcatcccatgtaacattacagatctttgggttaattttaaaatggaaaatgatttccattcagacatcattagaacgtctgaaagccacctttcagcacctctgagcctccttctgatgggatcctggcctcagtcatcttttacaggcgttctttaagtaaatgctctccagaaggactttctgtaatggggaagtgttatatataatctccactgtgccattatgtgagatgctagccacatggggaccatgggacacttgaagtgggatgaaggaacgaacttgtaaattttatgtaatgttaattcattgaaaattaagtgatgtaaccatcttctgcactattcctgcttcctagctcctgcagtacttagaaagtcctgtcagtgcagttaatggtgaagactggctgcaaaggacacggaggactccttgctcctctctatgcagtcataatgcagatattgcaagaatactgcaaccagttcttgatcaatggtaactagtggagacttctgcactcaaaggacttgcagtctgataagggatatgtttacttcactaataatcactcaggtggttaggtgatgactgttacaaatactaattttgagaaatactaggacccataacttgttgtaggattagtcaaggactttagtaagggaaattatgaggcagtgcacttgaatttcatgttcaagactgggtcaagttggctacagaagccacagatagcagagtaagtcagtatatgctctgccgtgacctccaaaggcaggtaccttattaagctacatttaagacatagacttcaaacttacgaacttgagcaagtagctgctttcttaaactgtaagcagttgccatgatgttggtcatagataatatgagataagatgctgcaaatatttacaggatattgcatttcctcatgaaaatatgttttgatgaagttgtttgggctgcagccccaccctttcccacctggcactagcaaagtggtgtttggtccattcaagaaacatgtagaaatcagtactgacatcccagacagacaaaatgagacgcataacagcaaaacatatggcctggaatagacatccttatatgcccaacacagaccatgtccccaaaaactcatacatagaagacaccatgtgcagccaaagccaaaaaacaaagagttgacatgacagaaagcaacgcgttgcatagatggaactgctttgagtggagacagccaactgtatttgaatttaaaaagataaaccaaggcaaaccatgtccgtagaaagcattatgctggtgagtggctgcttcattaacagtcaccaggggaactgcagtatctgaaagcattcagggtctaaatgccttctctgtttattaagactatatacaccattcacaactctaaatgtgtcttaacaccttcggagaacatctgaggcatgcagcagtcctttcatgaagtttttaaaaatcttgtgtatttgttatgctacttcatgctcctttcctttgtgtatgaggttcgtctgcctttttgcatgggagagactattgacacactgttttgatggtatccacgtgctgaatagtacatgcactggggctgcaggtcttaggctgctgctgaaattctccagttggatagcaagatttataaaccttattttaacttttcttcaacaattgcttgaatctttttggctaaagataagctgtccctgtagaattaggtagtatttttgcctccaacaggaccaattataattgcatagatcttggaaggtgatataatttccttttttttcttattattttgattgaattttaccaattattacttagtacctatagtgagtttactaaagaggaagattacacacacacacacacacacacacacacacactcctgagcatatatagtagtacagcccatcactaggtctcagcctgtatgccattctccccaggccattttttaagacatatactttattctttaagaaaataattgctttaggaaaaagatgatatgtctatgactaataggttgatgactttcctatactgttactctttataataaagtcattattatatgccattatgctcattcattctaccattcccccaaggccatgttagttagtctttattccatactttcatgatttttgtttatgaataggttgtggttcctgagtaaaaggtgctgttaagattaaaatttcccaggttacgtcagctcagcatggatcaggtccttgggagactgaggcaatcaggaggcattttgtcatatttatttgtgtaaaattattggagaaacatagtattttcattcccttgtaatacgacatctcagaaaccttttttttttgtttgtttttagtgttgttttttagctcagaatttgtcttgaccaacagctagctagtctgctccttcttttttttttctaagaattcaattgaagttgagttgcattagtaagtgacatattgctgtctttataggcctgtataatttttttttctctctctctttttattattgtttcttaatgcatccagcatgacactagaacacactgttcctactaagaaaggtcaggtttcagggaaacatgtcaggcattaccaatttgaaggactattcagttatccacactggagactgaaagtttaatgtatcctattgaaaaacatcattgttcttatcaagataatcatgtttgttcttttaaatatcaaatatctttcaaaataagtttagccctctagtcacaatacagactcccacgcaagtgctatatttggctgtatttgtattttccttattgattattatactgtaaatagcctccacatttcccacacatttcaactttaaaaaaatgtactcttagtctttgtggcgaaggtggtttaaacttcctctgttttggatggtatgtttctgccttgctatcacatgctgtttttttttttttttttcatttctcaaggctttggtgccaagattcactgttgccttcctcaattttgactaacctttccggtttgtggtcgaacctgggtactcttggagcaatctattttctttgtgctcctcctaaacttgcaccccctaccccaccccaggaggcagtaatttctcctactttaccttctgcttttttttagatttctagtgtaaacagtgtgcctgagagtgtattggtcgctttaaagagcttcatttgcatatctcgtccttatctctgcggttgtcctaacttgttgctttaaaaaaaaaaagtgtatcacagtgtttttcagttctacacatctttcccctactactgtattcttcaaaaacagttcttcaaaatataacacttggctcttgcttgatgaactgctttcgggtgggacaaaccttagtgattaaaagatgcatttttattttagatgagatgtcacggtgttcatttttatgtggactgtatttagaaaattacctaaagaaggtcatactgtgtaataatgaccaataatgtaactggagatctttttctgacgacaaaagtacttattgccacagcagatgaactcactaacccaaactttcctatattcgcccggtgtgaagtattttaagagtgatgacatcttttcctttgtaatagcaagtcaggtgtgtgtttccagtgacccaaatttagtttaactccagctctacgggccgcgtgtttcagaagtccagagtatctctgtttctgacttgttcccaaagcccttactcagttgttactgcatgtcactcttggcagtttaagagaccacattcctttgagaataagtaccagggcgagcgtcaccaggcttttcgcctgtcttgccctactacccaggcactacacggggctctttcatccagcctcgacttgctgcttgtccacctcaagtgacacctgcatgcccccgcccccgtctcgccggggtggctcagggtccccctcctccgcgctgcccgcacgcacctgcccggggcgcctccatatcctccccgcgcccccggccgccgggcattgtgtacactcggccggccgcccgcctctcgctcgcggctcattacggatgctcgcgcgcccggccgccagcgcgcgccccactcagctcttcccgggccgccgccgccgcccccgcccctcccccgatcccggccctccagcccgggttttgagcccggtccctcccggccctcccgcaccctgcccccgccgcccgcgctccccctcccgcgcccgggacgcggcggccccgccggggtagcaggctgcgggcggccgggaggaggctgcgctgccagccggtgcctcgcattaaaatgaggaggaggaagaagcggcagccacagcggcggcggcggcagcagcggcggcggcgagggctgcagcccgggaggacgcgcggagcccagcgcggcacggcagcggccaccgcggccgggatgagtcaactcttggtttaatgggggcagagcggccgcgaggggacacgagcgagcgagcgagcgagcgacgggcagccgtccggggagctacgctcacacgagcgcgcagacccccgcgcgcctctcccgggccgccggcgactccggcctcgccgcccgcgtggggaccccgcctgcagccgggcacccgccgccctccgcgcaactctgcatcagttttggggggcctccgggcggcggctgcgcccccaagtctcactgccattgtcgacctccttgtttacctccgactcgggctgagtgagagcttggcgacttttggggnnnnnnnnnnnnnnnnnnnnnnnnnnnnnnnnnnnnnnnnnnnnnnnnnnnnnnnnnnnnnnnnnnnnnnnnnnnnnnnnnnnnnnnnnnnnnnnnnnnnnnnnnnnnnnnnnnnnnnnnnnnnnnnnnnnnnnnnnnnnnnnnnnnnnnnnnnnnnnnnnnnnnnnnnnnnnnnnnnnnnnnnnnnnnnnnnnnnnnnnnnnnnnnnnnnnnnnnnnnnnnnnnnnnnnnnnnnnnnnnnnnnnnnnnnnnnnnnnnnnnnnnnnnnnnnnnnnnnnnnnnnnnnnnnnnnnnnnnnnnnnnnnnnnnnnnnnnnnnnnnnnnnnnnnnnnnnnnnnnnnnncgaggtggcctttccacgaggctccagggtctcggacgagtctggtgagggtgacaccaagccgactttacgcgctctcccagaagctcagcgggaggagggggcgagggtacctttttttttttttaattcctctccccaccctttctggggttcttgtccgcagtgatttttttccttctttttaagagattcctctcaccacctccccagtaccaccagtgtacagctcctaacgggttccgctttgtttttacgactcccccctcccaccccccacgaatcacttgtcagatcaattttaccttctccctcctccctacttcccactctcccctcctcccctcccaaaccccttctccgaggttagacattttacaagctagctatgctgttattcgaattgtgactttttcttttaccccctcctcccatatctactcttctagacgtttatttttgcccttcccccgcctagcggggcggggggtaagggaagagaaaataatacaatttcaggggaagtcgccttcaggtctgctgcttttttttttttaaataataataataataataaaaaggacatagaaaacaccagtcttgaacttcacttcaagaatcccggctgcaaaggaaatctcctttgttttgttatttatatgctgtcaagttttgaagtggtgagtttcaggtcggttttgctaatttcactcagtaaaactgcagctttgctgttgctagatagtagtttgtttctttgtctctttaaaaggtcacagtgaaagcttggcctggattgtgccggccatatggaatggataagggcacaggctcttcaaatgtgctactggggttctgtcgggcaaggaaaggaccctaagaggaactcttgaaaaggatctcacgacgaaaagaaaagagaaaaaagataaaaaaaaattaaaatcagaattgcgtgcgtttatttcctgctttttaaaggaaataattactgagatggagttcatcagctctgtccaggaaagatcttctgtggtcttattttatggacagggaaatggggtttgggacaagtagcctgctttctgggtgccatccatacactgctctaaaatggcttttaaaagatgtaactcagactcctgagctgagctgagctttggttgagaccacagttagacccagctgttgtccagggaggcctgttggcaatggctggattcagctcaaacctcaggtttggtgaacttttgccttggcatagagtttaaaggagtattaaattgagtgttttatgtgcatgtaattttgctttataatgcaaaccttttagaggatgacttagtgtctagtagatgctttagatgtgtattcaaaaaacagtttttccctatgtgatgctttgacagtcaatactttaagttggagtccatcctttccttgtgcagctcatggtgctgctgagcctcgtgattacctaatatgttctgtagtattaactttgatgctgttatgaattcccgcccccttttttctcataagttgcctctcaagggttaatttttttttttttttctgttcaattcctatgtttcaaaatttgtcttctgctctagggcaaggcaaccagttttagaaaaatcagctttgcattgtgatccacatgcaacataaagaatgttttaaataagttcatagtcgtcactctgattttggctttagactgcagcttaatacaatgggaaagagtgatcttgataaaaagtagttttaaaaagatgcgtttattgttaatgaacctcaaaaccaaaaacagatgggccctcgaccaagggtaaaccttcagttgttagcttgtcaccctggagtacaaggataagtaactattattatttctcaaactttggaattcttggattggcattcttaaggttgccttaagcccccagatcgcatgcctgttcccatgacttgatcatatagggcaaagtaggatggacttagcaagagaaaaatgtatacaggaaagccatgctaatacaaactggatctcagctgatccagatccaaagagtttgcgtatggcaattatttttaaaaagtatataagatacttcaaaatactagccggttggaaaaagtgatgtcatagtctctgtggcttccccaaatattaccaatacttcaaggctgatgaaagtttatgacatagccctatttaaaactataatttagaagtaacttcagtttattgtaccaattgctttattatgaacagtattcagaattgaactctaatatttaatacaactgaaaattaacatttttctgaaattattagatgccaactcccttgcatactaattactttttattactagagactgtgttttgtcaatactaatactgttagtatttttttgtgagcttcatatattcaggttttttccctatttaaattactggcagcatccagttagcagtggacacctaaataaaatgttaactccaaaagacaagttgtcttgctaaaagtcctcagccatttgaagaagcccttcacaccattaggggtgtgcttagggggtgtcatgatccagtcacatgtttgaccaggggcttgatctttaacagcacagaactcttgaaacttagatagtagaaaactttttgctgtcttagctcataagccaagtggcaagctaaaaagcatttgggtgtgtgtggggctctgctgaggtttccgtccataacatagattgaaatgtatgttagaatgtaagcctctaatgagcttcgtcttttcactggtaatccttctgtcctttattaaatgtattataatcagtttgtcatggatttttaattttaaaactgagagtacatgagtgtaattttttattttctttttatcttgtgattacccttgttctgaaagtaagcccattttcctcctagttttagatgagaaatcactttttaattcatgtacattggtacagattccataatcttctgttgatttatatagaagcacagccttttagatcattacatagttgcacagatgtgtttgtggagggaaatgtctagggatgagacgtgtatggggcaggcataactatagacctccacccactgataacgtcttcttttccagttctggcaggtgatctgtaagacagtgactgagtatggatcatttgaacgaggcaactcaggggaaagaacattcagaaatgtctaacaatgtgagtgatccgaagggtccacccgccaagattgcccgcctggagcagaacgggagccctctaggaagaggaaggcttgggagcacaggtggaaagatgcagggagtgcctttaaaacactcgggccatctcatgaaaaccaaccttaggaaaggtaaatactcgccaatcaaatcctgcaaagctgcttgatgtctgcccaaggccaccctgtgtggaggtgtagggctggaacatgctgggcatattctctttctaggtgtctttctgatgggaaattaaatggcattgtgggctgtggtgtcagtcaggttctgaaagcatgtgtgctggttttgagtggtgcctctctcttcctaagactggaggccctggtatatttggagagtaaaaagtctgagttcagtgtcatggtcttcgtctagacaaggtccatttggcgacactgctgcagttatgggtgtgcaggtagctgctgtttgagctgatcctgggtaagagactgagcttgtctgagaatcaccataggtttttcctgagattactaactgtaaggggattttcaggacatggacctgacatgagaacaaagatttctgatgtaatttactgtgctttttatttttctgaagagcaaagttattatttaacagtttgttttttaaaaacaatttgctgattctggtttttaattttgagtatttttggtaaagggaaaggaagatttaggcaagtttgtaaaggggaaaaatacaaacaagtgatttttctaccaatattaaatggatgaagtttttacaactttgcctgtgttagacattgctgtccctacaagtcaggtcctgtgtggaataccctgtatgcctcacaggggtctttattttgtcattgaataacatgtaggactcagattttttctgcatttgctaagcaaagaataataatgccatcttttactcagcacgaatactaagcagagaaagttaggaggccgaggaatttcattgtgtttgatgcataacatttatcatatttatcatacaatcatttatttttttccttggtttggcgaaaacaaagaatatattgatcctgaaataaacagacacagcactccgtattgttagatctttatctattaaaaatggaaaaacagcccttcagcaaattctttggcctctactcatgattaccctatttattgattgtttgccaagaatgtatgcatctttaagccagggtaagagcattaaaaatataatttattatggcttttcaaacagagtgcattaatattgtactgtgtagtgctgaggctctataaaaaaagactttctgacgcctgcaaacacacaagttccataaattcctaaataggagatttcagctgtctctggtattatgtgatatttgcacagcaaactttaatgccaggacagttttagacaaggattctacagacttccctgctccttatggctgccgtgctgtttacacaggctcatgaacctccagcaaaagcctctaagactgccttcaggtttaaatcatgtggtatttttagcttgcagcagtgaccagtgctccctgtctaatgcaggaaggctatgaagttgcagtagttggaagtctggccaaacaccagcttgaataatcaggcagtccagcgaaggctcctgtttaacattactcctagtaacaggagggcaaccgtgacagttctcaagacgatctagcaccggatttgtaattagatgatcctgttgctaccgtatcgcagccacctttattatctataaggcacctttaaattcgatcaattaaacacagagtcaatccaggctgtttcagtggtttgaaaaggtttcacttatttcatagagcagaggtctgaaaagctatttgacacctctgattccatgagaggaaaatgcagtatacgtgattttggcttgcaaaccccaactcctcagacatcagtagtgaggagaaggagctaagagctagagtgtggtcatctcactcctcaaatgctttaagaaatgcattgcattcaaaattacatatctaagaaatacattttaattctaggagggtctgcgctcaaaacaaacagcaaaaaaaaaaaaaaatcagaagtcttttgggaggttttgtttttttattattttttttaatcttatttttcatgtgcttggtttctgtttgacaggtgctagataaaaattgtggctaagctgagaaagcactaagaaaaaggggttgggtgtttttatttgtttaagagattttgccaaaataccttcaagccaaggaagaaatcaccagtttgcatattgctatttttgctgcggtctccccaagttctcttctgatccctgacgggttctctctctggtataaaacagctgaatgaatgacaagaatattggcaagctctgcggcttgtgtttcatgcctagcctgctggtacttcccaacgagtttgtgagcttttctaagtaaacctaaaggggttggtttaattgtcagagctggagtctcctgtgaatggtttcgcagagcttaggtgaagacacacatgtggaaagatggagctgttttatggccggcttttgttcagcagaaaccagcaaatagaggatttgtaaagggcctctcaggcagtagggaaatgtcatgccgatcctcagagcaggggatgggcagctgacaccctcagaagttagggttctgccagtccagtacaagtccagagtatagagccgacgcaggcagggatactgtggaactaattggggatcctgggtgccctgttaaagtaacccttgtcatcatttatgctaaagatgatactctcctggcagtgtgccacagtactgctcagatgcatctgtttttaacccttttctggaactgttggaagtctgacagcgtactgcattaataccttgagtgccactgcaggtggactccggcttctgggccaaatctccttcccaacagtcctgtggcctgtgtcactgagctcttggactgggtgccaacagagaagcagcagaccccacgcagagcctgcctctcctggatcgcaggaaggccagctttcctttcacactctgtcatttttaccatatttaactgcagcagaaattgttaacgttaaagacttatggctgctgtcaatggctttttcctggatagatgaaatgggtagtcatagatagaagtattctgttttgtttgttctgtacattcaaacagtgcctatgagcaccgatgtggttacgttttgtgtttcttttgtggaaccagttagaggaaatgctgaaaaccaggcagaaaaatcattgtctagtcagataatttgggcgcaagcaggtaaagcttgttattaacagaagtgtgtatgcaggaagaaggtgggctcttcgaagacaactgcagtgggttctgtttgcgtagcagttaaagcaaatcagaccagacacttatctgtctctcgtcagcattactgttcgatcagaaaagtaattctgcgttcactgattttggaagatgcactattaaaatgaatggcgaggccacgttaccttatgagcaggtacaccgtaaaggaagttaaagtctttcctgtgcaacttttaaacagtaaatgactgcatgtttgtctgtgtgcctgtgtctccccccagactgcctgggaagctctgtggctcctctcactgtggtgaagatttagtttcatagcttaggtcttcctccctccagactgtttctgaagattgttggttttctatattttcctctgtctctttgataggaaccatgttaccagttttctgcgtggtggaacattatgaaaacgccattgagtatgattgcaaggaggagcacgcggaatttgtattggtgagaaaggatatgcttttcaaccagctgatagagatggcgttgctgtctctaggctattcacacagctctgctgcccaagccaaaggtaaaggatgcatttgtggggctgggaagttgctggtcctcctgtttgcctctcagacaaagcagggaacattttattcagagagctacagcctgtgttttatgttggttccttataggctgtggctttaaaaattggcttaattcagtttggtttagttaacacacattttgctcatgtggaatgtcgaggtaaatttttttttttaaattacttcagctgaatcattaggatgcttattgaccttaataatctgctccactgaggacccacaaggaagtgaggagcctatctgagcagatggactgttgagagtcaatttgcatttatgactgaatatctagttctgtttcttttattctgtttctgatggttttataggctgtaaagtatttttcaatgctgattcccactgcaatagggaatcttatctaaatcataaagccatttagaaccggttcagctatgtcttattagaacttcctgtaagttaggacaatgtggcctgatgcatgggttttattgattggtatttatttccaaaataataaacaaccctatagtcatttacataatttcacaatttggaaagctaggctgtgaatatcttcattgacctgcctttttgagggaaagagaagcattcgaacagaagtaacactattggctgtggtgggggcagtgcacaagagcgcagcagtcttttgctggacctgagagccagcactaagcatgtcccctctctatctggactagggctcatccaggttgggaagtggaatccagttccactgtcgtatgtgacagatgcccctgatgccacggtggcagacatgcttcaagatgtgtatcatgtggtcaccctcaaaattcagttacacaggtgagtccaggcagggacatagtctccctccctacagtgtggacggaaagctgctttggccagcttgcattttttatttactcatcgtttgagacatgctaatccaaattaatttggtaactttaccccttctgttattttctccaacttcaatatatgactttaaaatttacttcctccccccgaaatttatgttttttttttccctgcgtgctatcaaaagataggactttttacttttagtcaattaaatgatgcattacaagaaggcattttacataaagtttacttaagaaaaaaatatttttgcatatcatgaacagtgccatctgtgtacattttgtgaaagaatgccttattcgcttttgccacgatcttatttatttatatatgtattttttgtcattttaattcgtatgaacagagtcatgggaggaaatcagttaatacgttaacgcttttcaccgtggcttgtgagaaagcagcacaccttaaattgtcttcccaagtgcatcagagcaggaaggtagaagtaacatgaaaaaatagccaccacaggcagctgatgtataattcatgcatcgatacagcagatgtgttgtataaagtaattaactaatcggaacaatcaggagaccgagagcaatctccagatgcatctgtttgatgcgcaaaatgaaatctgtctgtcttaaaggaatgttctgcagcgggatgcaatcctgtaataatcccctttctaatctctgtctcaaatagttgccctaaactagaagacttgcctcctgaacaatggtcgcacaccacagtaaggaatgctctgaaggacttactgaaagatatgaaccagagttcgttggccaaggagtgccccctttcacaggtactcagcagagcgtgtcataaataataagacatcatgggcgagctaccacttgaggtctgatggggatccctggtttcaagcaactggtatctgaagcaagaatttgctaaaaatgctaagtgattgaccactggtgacctttgaaaatctgcctggcttattctgaagcagaggttttggtgtccttcctcccttggtggggtagggactgtacctaggaaaagcagtctggcagaagacagtgtactctgccagctcatccttagatttacttctgaatactctgagccctctctgaggcggactcagtggcaggcccttctcacttgggttatggggtgctagtatcagtgttcctgtgcagagcttccgaacgctggctgcggaagatcatgctactgttgtagggtgcttgctcgagtaccacaaaatgagaaagtgtttgctgaaaataactgtaaattatgtatgtatgttaattataaatataagaaatctctttcctggaacaaaaggtccataattattgcccattaggagtttacaaccaattttgaagaattagttcactttttaaaaatggactcctattcttttcttcttgaaatgagacagatttattattgttgaatttcattttctggaatgagtttttggtaaaggactggaaactctaggtttttgccaagtttaaagccaaacattctttctgatgacacagctgatagtcaccatagagtatggtacagcatcatcactcctcggcaccctcacctctgctgaggacattaaaggttacagtaaaaaaattggagtgctcgtttaaagttttctttgaattcaagtttaaaatgtaattttgaatattagtccgccagtcctttgaacttgcattactctgcataagcatttctggagtgactagtttttcctagcttgtctttatgatgctgaagagcaagtattcattccatgtatgtttttgtgcaaggctcctgagcattcctgggtaccttaagaggaagcctttggactttacactgctgttgcccagtagttcatgtgttcagccttgctgcattggaggcctgcagttctgctttgatctcagttagcaattctaagacaggagcaattctggatcaagctaaagccacagactacacagacactctgtattattgaatgttcattttcttgagacaaaactttttttttttaaataaattcatttatcccatcagcagctatcttttcctcattgttgaaatagagaggatgtgaatctataaccagaaaataaaagtaatttgaatgaatctacaatagctaagtcagtctgatggcacagtgaagcagagcaacttacttctgggaccatgtggtgaagacaactccagagagcatgttgcctggttattagcatttgaaaattggaaggctgacctagaatgaaccatggtgttgttactaagaattccaaataccccatgcagcaataccctgtaccttcatgtgatctactgtcctactgattttggaagtcagctcaggcaaagactagaggtctattcaatgagctggacaagaggacctgtataagtagttattgtgtagtcacattcagccagtgaggcaatgaactccatattcttgtagcttgtacattaattatggatttgcttaatgctaccatgagaaatgagttgagcctaggcagttatcacagtaagccaaatgacaaaagggaatcgaaggcttagtcttggagctagtggtacgctggtgaatttctaaagaaacatggccttgcatagccagaggacccatcaccatagctaagtgactgacctaggctggaattgcaaccccagctacaatggcagtcttccttttcccaaaactatctctagaaataatcatgcatatgttagcagaagcagcaggtacctgacattagtattttgaaaagactgggctccaaatgaagttatttcatattctgcaacatcatcattatttctctagaatgagtccatgaatttgatattcagaatgtttgcattattagcgacttcccatttggttttgtggtaaagttaggaaagatgaatgataaaggcttcctaagacctatatacccagaatatacatggagtttgcaaaactctcctttctcttgtacttgatatttgatgatagaaatagtatgttgaaaatccctagcaaataaataccgttcatgttcaaagtgcagccaagatatccagagatgctttaaagttcacacctcggatacaatttttgattgattacgtgagaacatatagcataatatttaataggtatatctcactgtatggaccttacatgtttgcctaatgtgttaaaacattccagtaagaagcatggctgcaggatctctaaatagtatgttgagttgaacatctattaccaggagagggaaggagggaatgggagtgagtcttaccaggacccagtccttgcctggggtgctcagcaattgcctccagcacttggaggattgactgatatgtgctaagccaatgtccagttgaacttggaatcttagatgtagaagggatctttcccctggttcctcctttagcagtgtgggaactggtgcccctctagattaaagtcaaggtgccggttaattactgctctgggtactgatttgctctgtgttctcgcccagtggtacattaaaaataggtgttgattctttacaacgggtgcttaggttttgatgcaaccctgtttactctgatatttctaagggtttctccagctgcagagagattccataagtgggaatgtggcttgatttacagctcaggcttttatttctgttagttctttcctgccataaatctgcccaagcagagtgacatgtgtttattaagttctccgcatcacgtgcttgtttatttttgtgaaatgttctaggatgttaaaaatgcttagctcattatagatctgagattggatgctttgttgttgcctttgcgtttttcagtggatgtggttagataggtcggttgttgcatgctgaatggcagctacggagaagaaaacagtctgattccggaacaaaaaagcctgttgtcatgaaacttttgagggttatggatttaggatgtaaattgggacttataaaagtaaatattttgatttacaataaaacattagatttgatgcttgttttccctagaggtttagatacggaattcaatcaaacattagataaaaacatgcattggtaaaagaacagattatttcattaaaggttccataagtaaaaggtcaattgttacttctgcctaattaatgtttctttgtagaaacgctgaggtcagataatcctgagagattttatttcagtctgctttgtgcgtgattgttaagctcccctcctccatcacacttgctggtgtgcaagtgcgcacacacatcacagtttccatagtttaaaggaattgggaacatttcctatttcattttgtttttctttaaacctggagaaaagatagccctaagccaagtcctatgtaaagtgaatgtgaattgtcatgtttattttcaattcatagagacatagaaataggcttgaacattccgtttatgaaagccacacctgagaagtggtgtttcagctctccttctcctgacagcatctcaagaaatttgggattttaaaattattatatcagatgcttgcaaaacacatagtgagatacactcttctcctgacacgtagcctgaaagtaggctggttccttgagccttgagagttatctccacaggcatttgataaacttagagttcactgggttttctctgttaaaacctagggtatgaatataaaaatgttttttttttaaacctgtacttttttttatagttagtatggactgaaatgacatatttcttaaattttaaaatattaatagtcatatcctttcctaagaatatcatcagtattcatatatcacatttcacataagactatgaaatgtattcacatattaatacattcgttcattccaaaatatatattaaacttttaaaacatattgacaggctgctggtgtgtcaggcttccttcttagtagctgaaatgtagtgtgtagttaactcttggggtacttttgatgtacccggcatttctctcattctaagtagcagaaaattctagccctgtgttcagatgagaaaccttgggcacagaatgtttgaatgggtgccatgacaacaataaattgtatagaaaatttccactcagagttcacagctaaacctagggtctcttttggtcacacacacagataaaggtggttccagatgtcccgacacacttcctttcttggagtgttgataaacttcaaggtgtccactgtgtttattctgatttgggattattttctctcacatgtgttttgtgctttgttttttgtgtgttgacttgctttaaaaggactgttgtctcatgcccctaatttagggcatatttagggcacagtttagatcatagagttggaagttgggggtaggattatttgctggataagactatatttgagaggctccagagtcactcagctctggtcacttcccttcagcctctcacacctgcagagttggtatgtgtgattaagctcacgatggccatttgatttgaagaccagagttcaagtttagaattttttttttggggggggtctagtgggcagttaaatttctcagatttgcttcaaagtgtaagccttttcatcaatggatgggtctaccctgagggatcaggatgtcactggcagttacctgaagaacagttttgtgtttgatgtctttgccccttcctagtgcattgctataaatgtgtagccgaacaccatatacctttgaggggagattcctagaggattttttttctccattttttataattacaaagcttttcctcgatcctatcaaccatggactctggctcatccatccatccatccatccacttacgtgttttggaggtagggttttcctctgtagtcctgctattctggagctctctgtgagaccatgctggccttgaactcacaggtgggggatttgcttattaatatttgctattagtatttgctttgtcagatactgaaatccttgattaactaattagctgttattttattgttaattggtgaccaccattgtcagtggtgggctgcattatgtaattggtaagccagccctacatggtagttatatgaattggcacaactttaataatttaacttccatccctttaagccactcaggacatcacttaaccttccctatctagaaatattccagtgtgtctaaactataagaaaacatcctcttaaactgtgagttttcatttcataagactaaaagcagggtcatttttagctgaattagatatgtaggatttaaacagtaacctggctagctttttctgaccttcgtatctgctaatcctaaaagctaactttaacaaagcaactggataacttgaatgaattgatctcaaatattttataggctctttcttcacagtagttaaatttgaagagttcaagctatgccagttttaagtgtttaataatgtgtaagtatgtcattttcacataataatcttttttgacccaggccttgttttagatctgaatagcttacctttgaccttaagatcactaatacaaggaaaattaccatctcacaagagcatggtccttctccttctgatgtatggactaagaatatttccaaggcttaggagagggcctaatctgagagaatagctattaaacactactttataaatgttaaaaaaaaggactgacaaccaaatcatgctaatcatactgattttcttgttaaacagaactagttttagactgcttttgaacattttctgtctcaattagtactgaaattcaagttgggtgttatctggatttcttgttaaattcactttagtttaatggcagagttggactcctaacaaattcacaattccctccttccaattcagaataatcaaacaaacacacacacactcagtttctccctctttcatggaaaactgcatgattacagcaagctctgagtatagagaaacacaagcacgcctttaacgtaacaggagagattagcagccggctgtgcagctcatggccagttgaggcaaggaccactggctgttgggactttttgatctagacttaaaagttatttgttctgttttcgcattttaaaaaatagttcgattaggaattgcacgtgcttctttggttttagttttaactcagggctagagatcataaaacaccctgggatgcgtgcaagaagggcgtgagagacatacaaatgtgcagtgttattttggggtgctggaatgtcatcgtggccgggtcacaaggttgcagaatccctccttggatgtacaggaggaggcccattgctttttgtgcttgcttgcgctcattcatactctctttctctctctcattcttcgagattttgttctctctaatctttttcattagaaaatattctatcattttgtattttttttttccttatagaaatgctgatctaatttactagtttactcccggggttaaagacgcaaagcaaatgataccttagccgtcactgctgaaagacttcaccgcctctgctggttgagatctcatccttatctgtgcactatggcttggcaccattgactgtcccacacttgtcacattatctgctgattgttctaaaactgtcaaaaatgtggggccagactgaaagttaagggctctgtgacacacagggacctgcctgtgtatcaatgcccgggtttcatttgctttttaattgtgctcatatttttctttttttttttttcttattttttagaatcatgctttcatcagctacttttttcccctgtctttttacatacgtgtttctgtgtcactgcctgtccccatcactttagggagctagctcaagcatcatgactgtcagaattgtgagcagctgactctccaggctctgatttcctcctctgtacaaggaccagtggtactaatgagttagtgcctctcagcccctaaaaccattaagagtaattaattctcagtttctcagttcaaaagtggacagtaactcgagttgtttgtctaaatgagaggcttgaaatcacattcatgtgtgctatatggtgcttgtaggcgggcggtggcagccgcctttaatctcagcacctgggaggcagagccagcctgatctctgagttcgaggccagcctggtctacagagctagttccaggacagtcagggttacacagagaaaccctgtcagaaagaaagaaagaaagaaagaaagaaagaaagaaagaaagaaagaaggaaggaaggaaggaaggaaggaaggaaggaaggaaggaaggaaggaaggaaggaaaggaaggaagggaaggaaggaaggaaggaagggaaggaaggaaggaaggaaggaagaagaaaagaaagacagaccaaaccaaaaagaaaagagaaaagaaaaattggtaggaaggaaggaaggaaggaaggaaggaagggaaggaaggaaggaaggaagggaaggaaggaaggaaggaagaagaaaagaaagacagaccaaaccaaaaagaaaagagaaaagaaaaattggttcctagatatattttgattcaggctttttctttttctttttctttttctttttcttttcctttttctttttcttttccttttccttttctgtattagtgtaaacaactcaaaacttgtgaaatgtaaaagaccatatatatacatacatacacaaacacacacacacacacacacgcaactcatctaatagatacctttaacatcaccttttaaagtcattataaaattatgacacttttaatgaaagtgaggggtgattgaaacttgtgtttcaatatataaatctattttcaatttatgtcccttaaatagattggatctcttagacaatgcagtgtctaagaggatgttaactcattaaatgctttcacccctttctccagcaccccagctctctacccttcatgcacccaacactatgttgttctgaaaagtcctataaaggaagaagactattgtaattgaccgtgttaggaggtcagaaaacagtgttctgaagttggttctcatttcctacccatgggtctggggttggactcaggtcatcagcaagtgcccttacctgctgagcaagtacaagccctagggctaagttttacttgttccaacaattagcacacagcaagaattcaggaatttttgctaaactgagaaggtatcatatgattgctccacactgatttcatgggtgatcttagcagtgttattgatagagctttgtagacattgtcacctacaatatcccactttgcaaactgtttccagattgtatttagttagcgtgcatgtgatgtttacctaactaaggacaaatgacttctgagtttctgcttaggaaaacttactgtgaccccaggttatcttgtgtttttgtgtatatataatgttctcgataggttgcagaacttagttgtttttaagcagaacaatagtcttgggagtacagtggcccagcagtataaaaatgctaaaaatgagcaaatcctctgtcacagttaagtgtgaacttcgttgacgtatttgtagcattattattacacacacttaccttttttagaggggtcttaaactaatacttcagtttgtccattctcttctcaaatttaaggaagagattaaagggggtctgtcaggttttagtaacagctcagtgggtgacagacaggtgctggccctgccaacctgaaggcctcaccccatgttggctcatgtctcctccttggctgctcaaaagccgggctctggcatggcagacttcctttaggcctctaaacgtaggatcaaaaatctggctgtgtaaaggtccggcatcccccgcattcagagagaactgcaaacgtaggtaactgttcagccattctgtggagcccgggagacttgagtggtcagccgtctgtggtgagcacctatggctccaatgtgggtggcgctctttattttgtgccaggccgtgcatcccaatgagggagcgccgtttccttacagaggtgatgacctgaagcattttccctgaaccgttctaacatcgatggaggaagccagatcagtgcaattattttcctttgtgttgaatgcagaggtcatactggtctatatctatgttagtagccatggggattgttgagtgagagctaacagtgttaactaaatccctgacatcaagggccagcttgctctgtgaggcaataatcctaggagaatatgatgtctagatctcatagtagacatctgagagcctgtgcacactcaaagtcatgatccactctgctggtgaacggggaggacaagcttctcaaaggcttactgaggtcctgtggccccacacttggtatacattgggaataccaacccccccctccccaaacacacacacacacacatacacacacacacacacacacacacactcaatatgacctcaattcgaactgctcatataaagaaacaattcaaagagagttgagattcttgtggatagcttcagagtctagcacaagtatttgtgcttggaaagtgaattattcaaagtcctggagttcttgtttctactttgcactataaagcattttgaaagtgctctgtacaagagctaaggaaatagtgagtctggtatttattcccttctaagttcagatactagaaattatttcttctgtaaagatgggccattcatccatccacacaagggcattagagaaggaataaacaagcatcccttccccccccccccccccccgtgtgtaaatgtctcagatttagccaaatcagatctaatcagatttactcaaactcaggcatatctaaagaaagtgctcctatgaagtctacttagattactgtaatgtttaacccaataacatttacatttttaataattatatcacaagcaagatgctaagagactttaagcttcctgcaaacacagctctagttggagacatgtgtacagggtgtgcttgaggagtgctgtgtatatagcacaattgattcttccctagggtctttggaaagacaatcctctcacagactcttgcccctgtcggaagacacagtggggattcaggtttctctgtgttatgcccacttgctttgaaatatcatatacctttactaatactactagtgatagatcttttgtaacaaatgctttactgtttcagctctgcatatttaagtggtttgaaggtttgattgtagaagaaaggaggacagggtggagaatttggtcaaatgatattatctggtgtttgtgtaaaattactttaactgcatggaagaagcatagaaactgcaccaacgttttctatagaagctatgacttgtgctattagatatttaagatgtctacacttggcaaaatgatgatgtcttcaaccttttgaagatacatttgggtgagatgagagctgcggtggttgtgttgccttccacttccttcaggattccttcggaactttatatagtatgaactttatatagtatgttcattttggctggtgtgtgctgactgctttgggtgcaaatgccatttccaagcatcaggattgctcaggaatggcaagagccctccctccctctgaccactggagtttgagatttaccaataatctctcttttcctaacaaattgagatttcaaaggtgtatctctcaagagaataacttaaaatgtaatagaagctgcatagtgaaaaatgtgggggacatcagctaacaaggacattagagggcatgacatttagtaaccctgtcacttactctcataaatggaagcacagttccccttttcccacccccaaataccagatggggactacctgctaatttctaacacattcaggccctgccactgtctcataggatatgccttttaaaaaaaggaaagatcctatatgtggtcttttatgtcctctgggattcaaacaagaccccattaacaaaggatctctatcagaatagtgtttgcgtaaggtgggttcagctgtgtttcatggcaagttcaagtttgacttttgatttttccacagacatataaagaactgttaagaaaattcatctatgggtagtcaagtcttgtctaaggagtaaggacacaaacctgggaaataaattgtgcttctcaaaaaaaaaaaaaaaggaaggaaggaaggaaggaaggaaggaaggaaggaaggagaaaatagcaaagatctggtagttcagcagttcagaaaaaacattcattttattgaaaaattactaaaagatatttactccctccttaccattaataaaaagagtatgtcaaaattcatgttctagctctgaaaataactcttgagtttaccacagcattcatactagaggagagtcaagagtcatgtttttggttttgcttttgtatatcttccatgtgtaggtatttctttcagaaaacaattattttcaactttatgacaaagacattagccagcagaacaaataccctgcaggtgagatatagccatgagattggcctcacagaatctaacctatgtgagattattccccttgttatctctctggagttttccaattgaaaacatatattccttcctacacgaaaaaaatactctgattccttagttgaaattaattagcattcagaaaccagatcgcatgtttttgggtattcatgagatctctgtttgaaaaaaaaaatgtttttaacttgtagaaatgtgttgcaacacacagatgggaagaaaaagaaaaaaaaaaaacctctttagcaagcactgtgtgtaaaaggaatattacattttacacgctcctgattgctctgtgtaaacagtttttgacatctgtctttatagtttcgaggggaggaagactttgttaaaagaatcatttttatacagcagccaccatttcagtcttgctttacctgtattatgaaagcagatggtccgcatgtcttttgaatatttataactatcaaaaacaatctcttgctattcacccttaggcttatgagatgtcaggactgttctggttggaaaaaaaaaatcatcttgggtgtttacagaaagaggattacattaagctgaaatgactatacattttccagtttaatatttgtccatcagctgtttaatcgtatttagataattgtgtaaataagatgtggtagcccttgccctctctgctgaaggagcctgtaagctttcaacatgggcgagccaccattttgtagatgctgtctctctctctctcctccacctcagttagcccagacctaagtcccaagcaagttaggacccagacagctcagtccctgtttgaaaagccccagaagcagaaggccaacatggagagctcagaaacaccagggagctgctggctgcctggcgtctaggagtgtattgtcgtatgcaaatgcggagctgagcagccgcttacccctttaaaaggggcctggcctcctcctcctcctcctcctgccctgctcgccttgcttctgcggattttggaaaacttttggaatagtgggggttaactggtttttttgactggaagctgagcaatcagagataacagattttgctgtggttggttgatttggcagaaaagcatgaacagttttggtttaaatgattgaataacctgattagcattgttttggggtggtttttttttttttttttttttttttccttcttcttcttcttctttttttgaggggggttgttaaaggcacaacaaagcaatttgaacagtaatcaaatcactggcccttcccgggttgacaaccttgttcttgagtaaggctgcactttctcccaaaccattcatgttggccactaaagtgaccaagagagaatcataaatccaccttccttcatttttccagtgcattatacatatacactactgcctgtgtcatttcctagcaggggcttggaagaagccagcatttggggaaattacgtaacctcaaccagttccttgctttttttttttttttttttttaatgttttccacattgagagacctgcagattttcgagcaaaggtttagaatgttccaacaatatgtaagtcaggctttagaaaaattccacccttaccttttcacaattagaaaggttataaataatgtatttggctgaaaaggaggctcagcctgtggcagatggtacccttctagagggctggggtttctgggaagacggcattctcgcagatcggaactttagcagactcagaaagagccaagctcctcatagggagtagacatgtgctttatggatcttagaaaagcttacaacttggctcctaggaggagaatattgtgtcacactggggttaggagacccacggccaatttctgccaacttttaaattgtatctcccaacaccgggatcagaggcctgggattaggttagtgtgccctgtggcagcgtttgaactcgggaatttctagcacaggagtttagtcacttggattaattgactcccagaatgttaatgttcttacacctactggccaccaactgattagaaaacttgccacacaagtcgagtctttcaaagtgctcatataaatagacaccaagggagcaaagcaggaacgaccagcagcctctttggagacatctgcagggttgattttgaaaaacctggagagggatctcttgctaattaatgaacaaaggctctcaaagctaggaaattgggatttaaaagttcacttgacagtgatgctgttgcctttgaccctgaagggcaaagggaagaaggatgccccagtgactcaaaggagttcttcctttctgtggtccttctaactctctataggtgtgttcaaccttgtggcgagatcagtttagaagaaatgctcagtgtaggaagtgctagccacagtggctttggctgcttggatgtgggaaggaaggaaggcaggcctggcagaaactaagccacagaagagcctgaaggatgagcagctcccagacagagatgcaagagcctggaactacctccaggtctgaggagttgagcgagtcttccagttcttgtgagatcatcccagcttcactgagctgagatgtcggaaacaaaggggaagtcggctctttgctatttgccccttgtcggcccttgaccacacctgccactccatttaattagagcatccttcagttttcctaaagagatatttctgtggagacaaggagatgtcgcagttggtcatgagctggtggcacatgcgtgaagacttaaaatggatccccagcacatacataaagagccttgcatagctgcttggaattccagtagtgacaacgtgggacagggggatccttgtggctaagagttagtgagagactgtttctgaaaatatggtggagtgtgactaaggaacagatctgatattaacctctggtttacacatacacacatatacatgtactcacacagacatcattttgaaaattatatatactactcttcttatttgaagcatcctgatttttttttttgggtgttgcatgagtacgtgtgtgtgtgtgtgtgtgtgtgtgtgtgtgtgtgtgtgtgtgtgtgtgtatgtgtgtgtcgacatgtttgtgtgctagagggtgtgtgagaagctcagaggatgatgtatggaagtcagttttctacttctaattcctgaggattgagctcagtgaatcaagtttagcaggcgctttttcctgctctgccatctcagtgaccctattgaaagcatttttggcggatctgtgttacaaaagtccaaggaggaagtagtgaagtacaggaagagggtactctagcaaacggtaagatcactttaggcaaagatcacatagcctacagatttagggttaagcaggggcaggggaagccatggtgactggacacatatggatatgtgtctgtatatggataataaactgcacagcacttttatatatgagctgtaattttaatgaaggacttcagaatgtgttcactcattgtgcaagctctccttcctccacaccattggctcagagagtcacaggatagtgagatgatgtaggacatcctagtaggtagcagacttctcgggcagagattctgtcctccataccagccagtgcgtcaactagcaaatggaatctgtagaaccaaggaaggcaaaccagactggctacttattgaaaacctctgcacaattgaggaagtctgtatgtttctaaaagtatgaactcctatgctgtgttatattaacacaggaaaggattagaatgtctaggtaaagggtgataatagttctttgtttttttagaaatttggcctaagtggagggccatcaactgtcctccatctgtggaaccaccgttctccctcagtgacctcaatagttgtgctagagtctcacattgatccattattacagtagagtaactctgatggaagctgtggattgctaactggatcaggtagtcctggctctggttttggcaacttgctaagtgtctttttgcgccatggaccgtgggaggctcttagtgaaattgcaagcgattggattaatggcagggcttcgagagcacattaagaatgtctttttagagaaataaagtgtaatgactataaagtaggaagtgtgggggacaaacgctatcccagggcctcagtggagagatcgctgtgttttgcataaataatgcaactctagcttacccatcactcccaggtcttgagaggatccccaaacttacacatttcaggaatgtgtgtgtgtgctacagaattaacaccgatgatggatgtcagagttaataatagcccaaagagctttacatttgaagtagcttaaagaagataatgatataaaaatattcttgtccccaaactggcttttctggttgttcactgcctcctgacaatggagtcttctgtaagctgtttccctgtagatcagccagtctgaaatttaagctcttaagtttctactcacaggaccaggaggcttggtgcttcagtcttctaagactcaatagggagttaatttagctactagagactgtgggtgaaccaagaattaagtaacagcaattactataaccaaaattatctgggaaaaatggtgttatttattgaaagtgtggttgtgtttttttttttttttttttattttaaaccttctcttaacattattgtcttcatttgtacttatcaaatggctagctgttttcaatgcctttttgtttgtttgagtctcataacataaatgaggtgctctagacctcagagatctgtctgcctctccctccctagtgctggaattataggcgagctccatatgtgtagctcttcatggcttgcttgggttttttgttgtttttatttttgtttttgttttaatattttttattattatgtattttcttcaattacatttagaatgctatcccaaaagtcccccataccctcccccccacttccctacctacccattcctattttttggccctggcattcccctgtactggggcatataaagtttgtgtgtccgatgggcctctctttccagtgatggccgactaggccatcttttgatacatacgcagctagagtccagagctccggggtactggttagttcataatgttgttgcacctacagggttgcagatccctttagctccttggatactttctctagctcctccattgggggccctgtgctccatccaatagctgactgtgagcatctacttatgtttttgttttttttaagcaagagaaaaataacacatagacattttcttgttttcttttttctttcttttcttttgggggaatggaactcttaaaatgttaattagtacaaaatgtgtatagttagatattttctggtaacttgaaagtctcaattcaagctttactagataaaggccacaatcaaccctgaagatctgatgcaacctcttgtaacagttgcttcctaagtgtgacccctgaggcctcctaactcaccagcagctgtaatctatacattgagcatgaaaatataaaaaattggttttcctacttgactgtgcctggctgccctgaggagtgttagtgaggtgcaggtgctgacgggggaggtcagagatagggctcggaactggatatctcgaaagcttccaggcaatgtccatggctccggggcctggcctgtgctttgaagagcaaacatgtggagtccagccaccgtgctgcaatggtagaaacttgtatacatttcaatcatgacatcaccttcttggacttggactgattcagattggtgcacatttgtgagcactaggaggcgtggacggagattgtcagagggtgcaagagcagatagtgtgtgggggctgctgcttgtgacttaaataagcatttgatggtggacttaatgaattctaagaagcttaagctttgctcccagttgacttagaaacctaaaaggcaggcaggcactgtttccacggctgaagttgcgggctccccacgtgtgccatggtgtgttatcacacatattctcccctttccacacagagcatgatctcctccattgtgaacagcacgtactatgcaaatgtctcagcagcaaaatgtcaagaatttggaaggtggtacaaacatttcaagaagacaaaggatatgatgggtaagcaaaaaaaaaaaaaaaaaaaaaaaaaaaaagaaagaaagaaagaaagaaagaaaaaaagaaagaagagagagaaaagaaaaaaaaagcccatccttttgcagtggcaacataccattgcatgtcatttgggggtttatcaaagtcacatcgaaagccagatcttttgattgcccaattagagatcaatttagaatgtttctttgggggtgggggagtgggtatgagtataatgagataattaaattcaataaatgtttgtgtttaaatcagctacaccgactcggttgtcagacatgcaggaaatcgaggcgtgaggagagctgtcatttcgtaacatctcagtgaagacctaaccaggccttgaataactaataccggctgtgacttctcacagagataatcatgcttagggacttttgcttttgtttgcaaaaaagaggaagagcccgttttcacagcagctttcaaacaatatttaactgcctttgactcgctagagacagtttggttccaccattgagatggagtggtttttatagctccagctcccgtaggtaggagcttgcttgccttcctacctggaatagaaccagcacttttcatttctgaacttccaattctagtctagcaccctctctgcacacacagcattaggtcaacattgttaggcagcatcaagatgagccgaggtataaaacgatgggtcacagttgtgtgctatggcggagcatttggagtctggcatgttctctgttgtggatctgttagagctcacaggagcacacactatggttaagggtaatataccttcctctttcatacacttctagatactacatcttaaaatcaaacaggaatggggtgcctcatatacaaagtgttatgccctattgtaaatctttatcactgttacattcacttaatagtagcaataataacttttcctgaagacttagagataagaattttgagcatgttttagcttttaatatttgaagaaaagccatccatctaccaaaacggattctttgccttttatagcttagggccgtaatgaagacaatacatcaatttttggaataattgcttgaattactgttccatgcgaatggcccacttgggctgatgtcactggtagaaactaagggtttctttccattcttagttatattttgcatataacattgagtatagcagtatgaccagttcctctgattataaaatctgcatctttaatgagaagagaaacgatgattaaaagccaaatagagcttatctatggaaagtgtggacatctgaaaaggtttacctatttatattacactctggtctcagcctccctctagtctattctgtgtagcagcaaaagcgtttgacacacttagagctgactctcagccaatccacacaagtgttctagccaggggagaagcattcatcccgggtaggtgagaataaattgcagaatcgtgacagtgccaccattgtaccagaacagctctttgcccttcctaagcatctgcgagagatgctaagaaccacagcttctatgaaaagcactcaagcttcagccacactgggtgtgctggcttgctctactcgagtatgtgtttgcttggtccctacaagtatttgctgatatccttagtgcctgtgattgccttaaatgagcaggccacctataatgccaagcacggcagccagctcttccgcccatctcattacaccctatcagatagcctgcttcctccttttgtctggattgctagagttaacataataaggaagaacttgtaattttctcactagtttttttttttgtaatcatagtttatttgcttttagtttagctcatggtttctagttgccattcagcaagcagtatatttaaggccagcttaaaagaagcaaccattgcttttgagccctctcttgcttagaactgaaaaccagtaatagtttgaccctaaagcaaacataaaaaaacaaaaagtgtgtagacagtagcttttatgccttaaatcagtggttttcaaccttcctaatggtgagaccctttaacacagttactcaggacatggtgaccccaaccataaaattattcctgttgctacttcataactgtaaatttacagtgttatgaattccaatgtaagtatttttggagacagaggtttgccggaggagtctcgacccacaggttgagaaccgctgccttaactctaagccacatttcaaaacaagatctggaaggttgtcctgcacgcagagtgtgttcagttgtctgttgagaaaaccagccatgaccttactgtaagtgagacgctggaccttggcatcttacccttcagtatgccctttgcccgctgtcttctttataggtttgtaaattagaaatgatcagaaattttcttcatcgctgtctgaccttgtttcttctttttgtctactttagttgagatggatagtctgtctgaactatcccagcaaggtgccaaccacgtcaattttggccagcagcctgtcccaggaaacacagctgagcagcctccatcccctgcgcagctctctcacggcagtcagccctctgtccggacccctcttccgaacctgcaccctgggcttgtgtcaacaccgatcagtcctcagctggtcaaccaacagctggtgatggctcagttgctgaaccagcagtatgcagtgaacagactcttagcccagcagtccttaaaccaacagtacttgaaccaccctccccctgtcagtaggtctatgaacaagcctttggagcagcaagtttccacaaacacggaggtctcttctgaaatctaccagtgggtgcgggatgaactgaaacgagccggaatctcacaggcagtatttgcacgcgtggcttttaaccgaactcaggtcagttgtgttccttgttctgcctctctcttccctcccttgcttcgttcctgaaccctgtccatgctggtgtttgtgtttattccctggcttaacttcccttaacatgggatcacgttgcctgttgctgtggtgcccaaatccagtctgttctttccctatgccgctccactttcaggggcagacgactggcattgtctgtcctcatcctgtagaacagtaagccctactgatggatggtaaagacgtgtctagtgtccggtgtccttttccatgtttctgttcgtatcaacttaaatacaataatgtgctttgttgacgttcttcaacttctgttttgaaactatacggcttgcttactagtgactcccagcatttagttctctgcagccatttcttggcttgtcttccttcacccatgatttattcacgttcttccatacctcactcctttgttttcccccatttttgtagtagagttatatgcattgtacaaagtgcggtttctcacggcatgttgtgtggatcgatcacactcctcacatcctctcctgctggtgccccctttttccagagtcccaggatttttttctttcttttcttccttctttctccctttcttctttccttccttttttattaaatctacatagtaaatatttgaaagccataaactctcttatcacactgtagacctctaagcactggacagtggatgggtgggtgtggcttcgtggtattccactcctatctatcctacagaccttgcctggttggcctataggcatgaggatgaatattcaatttagatttttcccagaggcctacaaatgcccctccctgtttataccttttctctcctgggccaaattcctgtgagacataatctctgtaagagtagtatcttttatctttagtgtttataattttgtatatgtttagatgctaatagaatgtagatggtgtttatttttagccaagccacaggacaataagaacatttaacttggaggacataatgtcctttcagttttcttgttcttattttctttctttcgttttgttttttgtttgttctttgcttaactcattgtcatctttaaagttattttgcttattacacaattataagaataattcttggtacaaaaataatgcagtattaattccttgttagccgagttcctgaaccttggtgagtgccagctgtggctcttgtttggctggtcccgactggctctaggttccaaaggcctggtgaggccttcccagtccttccttcctccaggttcccccagctgcttgtctgttcctcattgttctgattttagaaggatggcttttatacccggttatggcttaggttaaaactttgtatcatttttaccaagacccatgtttttacagctttaaacctgtatttattattagctagtaaggttaatatgaccctttaattcccttgtggggagggcaataattctaaaaaatcagcgaatcaaaagtcactgtctagaaattctgatttgctgtagcgttctttattttgcaaatacagtaattactactaatgcttagtactggggcccaaactgggattctacaataaagtcagataatgtttgttgaattcaattaaaagccttcagacaaagacagccttgacacagacacagattatagatttactgataagcccttgaacaattgagcaaatacttgtatactgaagcacaaagggtatggcccgtgtgtgtcttgtaggggtggggtcagcacagtttctagctgtgacagtgaaatgctgactgtcttgggttcttacatagaacatttgtggctttctgtaggatttattatagtaagtggcctcttttcatatgaattagcacctttaaaaaggtggctctctgtggtttatatgaagagcagagagtttattcttctgagcattgacaacatggtataatttcatccagataacactttttaaatgggcaattttgaaaacaaaacagaattatttggaaccctgggcttatcaataaataggtttaattttaaatctttatgtattgatgattggtatttttcagtggaaagagccttgtttggatttttttttaatatgaattgtttcctgtggatatttaaatgtttatcgagagccagcttttgcacacacaagcatgtatgtatctttcagtggtcatacttaaaaaaaaaaaatcacacgcacgcgcccacacgcagctgcatttagttcagtgattatacattcatatgaatgcatgtagtgtgtttatttcagagtgtatgcatttcaataaaagcaggtgcagagtgagagtagggtgtgagcgtgcagtacgaaaatacacatgctgatgcatatgtagcgagagagctctgcagttggactgcacatctcaagttggtgtgtgctcactgcagctcccttgcaacccggctgggttcaaacagtactgttaaaagctgtgggtaaaaaaggcaaagttccgatacgggtagggagaggccctacaccctgcccagggttcggtaaaacattggtgtagtaggcggcacggttaggaatggagaattggtttagtcattgacaactttaaaaatcctggatttcctgttttagcgcttgagcctctcctcatcatgttaatagggcttcccagactaaaccttaatccccccaagactgtcacatacaatgttgaacaggaagcctaccatttctgaaaagttaaggtgaaatttatataatgacttgtttaaaggaatcctccctttctgaatgataggcatatgttatttaatcgctactgaagatagtagcttttagcatatgccatccattcagttctgtctacgtgatatctttttaatggaaatctatggccagaagtgaacgccagtgcttcaaaacttaacagttttaaattcacctctctctgatactgtcatttaaaggctgtgatacaagaagatgtatttctttaaaattttaaataaaacccagagattaactctgatcctgcacagtggcttcccccacctcttttctctcctttctgcctttggcacactttattttccagtaaaataaagaattaagatggattattcaaaactgataacagtaatggaccatcctgtaatgttttattgaatttgagttctgtgaattatgtggtggagagaaagaaattcacctgctttaagtataacagaaatcactactgtcttcctatcattcttcagggtaatttaagaaaagtccactctccatatcacagttggataataggtagaaaggtgccattatctggtgtgacagctcttgatgagcctaccaaggaacacagatgaatgcatctccttacagcttgcttggcgtgaggccatgagcaggtggagcttgaaaatagtctttcacctggacacatgaccaagaactcaccaaacaggccagtagcctggagaatattctgtctttctcttaggagggagggcgggttcctgaaatctttttttttttttttccctaagagctttgaagttccacagagctgataaaatctattttaatcagtgattatgttcaaagaggagacaaactggaggccagacaggctttttgttcagattggccgtccctttaacttatctgctgttttaaagaatttataatgagcctttggaaggactgataatatttattggaggttttctttcttttgcaatcagtaatgaattttacttgtaataacttgtgtaactctttgtcggaatgtaaaatagaaaggtttaggaatttatcagtaaatgtattctttaattgaaaaacatcagggctctccgttagccactaagtaatgacagagtagaataattttatgttttcatacatacaacacaaatctaattatttgtacgatctgaccacccagtgaacgccagattcttatttctagtgagaataatatttgtgacgtgttgggaacccccttcataacatgcacgtcttttgtttcacttctttttagaaacaagattactgattttacctaatttagttcagtgactttattgaagcacctatgggacacagattggctgtactttaattgggtacctcagctggtactgtaatgtgacagggtgtgtggtctttccgtactgtttctttagtatgctagattgttggtaatgatgtctggatcagtcagtcatgagaaattaatactaatgaccttaaccttccctggcaagactgcactatatctgacctatatcacctgggaaaagggaccacatagacactgaattcatcagccattcgaactacaactggaacaggacccagactttcactctagtgcctgcatcctaacagctgccatttgcatccagattattctacattgctcttaagtcatttttaaaaattaacactaaatcatatgatttctaacaatatttttcaggcatttccaccagggggcactcccctcattgaaagctctgggccaaaaagaaaaaaaaaaagtttgtgaaacagtagattgtctgaaacagtagattgtctgaaacagtagattttctgtctccactggctgctatggagctccttgaatgtctggggttgggaacactgtcttggcacactccaggcaggacacctgccttcactcaaagctatggttacatttggggaaagggcccctcagaggcaacgcttctctgcttaaatgggaaggtttgctgacttcagattctcacccaagtggtgatgtcttctggctgagccacacccctggtgagtcttctgttaacaagacttgaaggaaaatgtttctgtgttctgttttgttttttctgacaggtttggcttactcactatacttctgctgtggaatattcttaatagacatatataaaatattactttgtcattttgagattgttagatgtctaatatcaagtgctctgatgtacaaaaaaaattaaatattataccctaaatatttatagggtatcttttgccctgatttgttttctaatttactgactagttagtaacactgtgcagattggcatttcacagagcaaagccactactgagtgccttggctgaaagagcccatggccttggttctttagtaacagtagtcttagctgataatgaccatttcaatatattctagtgttccctttttcatctctgcagtctatatacacataattactttagtacttatcaacaacttttaagcataaggcattgagttagacagacaaaattaactatactattatccttgaggatttcatgacattttctatattatatgtattcctatgcaattgctatatattgctttaccagccatgtttttgtctgttccatgtatgtatgtatgtttttgagacgaggtcttactgtgtagtctgactggcctcaaaagcatgatcttacagttttagccttcttggtgctggaactacaggcatggtatcatgccttgttttcaagtagtttttgtttgtccgttttttaagtatgtaacattttgtgggaacagtggcatagactttcagtgtgatgtgtcttgtttctttttataagacacatcagaaatagtctaatcagttgtcctagtgcaggttaaagagtgggatggctgactgcctgtttgaatctgaggtcagttgacaggatgtttggttgtcagtagacagagttgcagttactagttagtctcatggccaaaaggacaaatgcctcaattcttaaggaacatttcttatgaaagtccagacataaatccaggctttggttgcagtagaccaactgtgagatttatttgtgactaactcagttccccagagcttggtggacatttcttccctccttaagaagctgcttataaatcaaatgatgtattttaaagggacagtgttcttatctgtaataagtactgtatcagtatatcaggcagcatgatgcactgatgagaaattgaaaggatctccaagagttaaaattttggggagtctattttaccttctctcactcaaatatacattttttgaccatttctttagggtttgggtagaggtagatttcaaattgtgcaaaaatctggatgtaattctactactatcacgataactgatgtaactatactatgataatatgtctaagtaaagaaagcaggctacagattgacgatgacttctaagtcttattatcctggagacagcgcagcctttgctgttcttggacttcatactcttcagatacatcagaaggaaatcacccatttaaataataaattcccccccaaagaaaaacaaacatattgtaatactgagttattgagggaagaaaaacaccttaagagaagattctagaagtttgtaagtttctgctgttgctaatagtgacttttagtttgatgatactcttttcaatatgtcaaattctgggatagatttttacagtgtggaagagtagttaattatttcaggtgtgatctgtggtttctgacgtgcgaagtttccaacctgttacctatcggtatagcatagaaagttttacagtttcccatggcagtccatttccctttaaacagcaacttaatgactacctgtgacactttgtaaattgaaaattaaggaacgacaaaatatcatctatatagacaaaagtttgagtggtcttcattgtgctgcagcttgttttctggtatctgcctcaaatgcttggctcaccccccctagaaatggccttgtgcattaacatggtgagctgctggttgccccgtgcctttgtctggaagcttgagaactatacagttcgatgttgttgtactacgtacggggatttttacttactcttaacttctctcgaccatctctcagtgaaagatttcacggcaagttaagctactcaaaggaatgagaccaattaggccggttcagtttctgctatatgtaaagcagatgctaagtaaaagcaaggatacaattgaggctctcttctccgctacttcagttgtagctaatatattcctatacagactcaaagcctctgactgctcactttctaaagggtgaggcgaaggcaggggctatgcagaacctcaccccatgtctttcttcccctacagggattgctttctgaaatcctccgaaaggaagaggaccccaagactgcatcccagtctctgctggtaaaccttcgggctatgcagaatttcttacagttgccggaagccgaaagagaccggatataccaggatgagagggaaaggagcttgaacgcagcctcagccatgggtcctgccccgctgctgagcacaccacccagccgccctccccaggtgcagccacctcttccttagagttctttcttctgccctaaaaaacaaacaaacaaacaaacaaaaaaaccgtaatgatgactctcagcaagaaattggataaatagatacagatgtttaaaacttctgtaggtttccttgagaatttcatcccagatcactaattctgatggaacacagtccactcctaattagatcgagaaaagaatactgactgtgttgctctaagtctttaggttcttgagggttgaagaagcagggtacgtacctccactgctgttattacagaggtacccagacactgcagaacagaaataataaggcctggttagtgtcactcgtttgaagactgccatttgaatagtaaataaaaaataaataagtaatttcatttatatttatgctttccaatacggactgcagctggtaccaattacatatcatctcgcttgtaatctttcataattaagtttaatacaatccttgaaggcagctttaaatgggaccgataaagaattctatccatattcccagaaatgggcacattttctatttcttcaaattcttctattttctagggaggataaaagaatctacctgtagggaactttgttgtgtattattattttaaagcaaaatttaaaaatatccttataactactatgaaaagtcaagaaataaattttcagtgcaaactggtaggtgaaagtttgataaattacacctaaagtccaccagcaaatatattttcttccatatttagttttttggcaagtacaaccaacctataaagctaaaataacttttagagttctttaaaaagttgaatacagaacacaaaatcagagtattcgtgtaatataatgccataattcaaccatttgattattatttcatttcatcaataataaacaaaaagtccatgtattctgagtacagaagtataggaaaagcccattcaatggtaagaaatgaagcagtcacaggagcttcctaactcaggaccagacacacttttcagctatttgtcgaaggtcttgaactgttgacataatattctaaagtaattatttttaaaatccattttttaatgaaaatcaatctgtcttaaagtctataggagcaggctgtgataagataatgctgttctgcaagagagaagggtcactgtgttcacacatcgcctgcctgcctacacatagctactggattagattggtaaccttgtctataaaagagttcctaaatacagagttaggaactctatatatgtatatgacttgtataggaaatataaagaaatataaagttctcagggttagcatacccttacttctcatagctgccattcggaaggtgtttctatacccaggtccattagcttggccttactctttcttgttctgagttgtttaaattctgttccaaataacaatatgaatttaagtatggaatctgccccaatgacttaatttagtgcctatacaggtttcattttctaggatttgggagattttatcggatttctaaatacgatccttaatcattgagggttgtcttagccaaggttgtattagttcttaagtaataattttcctatactcttaagatactcttcaacagctgccctgggtgtatatttataaagacgctctacgtcagaatttgtgagccggaagacttcatcctaagttacagatttcttggttgagacacccttttgctgtatttgttctcaaaggggattaagaccaaccaagcttgtagttggggtgttcagccaatgatgaacataaaacacagtagacactgtagctcctttgtgagatgcattcagatttcacttagcatggttttattggctgtctaaccacagccaggggtgattgttcgatacatgcgggtctatgtgtcttatttgttcctcagagaatccatttgcattactcaatattataacagcgctcactgccaatcagttacattctaccctctaaagagcacattaaattttaagaaattctcgatctattatctcactgtaaaatgaagaaagttggggaaagtatgcctcaagtaagttgagttagaactgttttgaattcaaagttgaagttaaactagaacccctcagagatgctgtcatatgcttactacaggtaactaaactggcaagaaagggtgggaagcaccacaaatcagccagcctacaaaactgtctttcgttttgtacattaccagagaaaaatctttgtaagatcactatgcatgtcctataaaataaagaaatctgaaacccgttttgagacaaattttgggtttagacttgaactcttgattctttctgatgaaaaacacagataaaagcatcagcagtgagagacatccttagggacaccccagacacttgtaagcatgggagactggcatctcttcggcatcaacgtgtgttgtgcaatgttcctggggcattctagaccaagaagctaaactgctgagggacttagatttgaagtcatctttatcatgagacttccttagagagtcttgagaaagatgtcctacaagaaagtaccttcctgggagccagcctagcttcggataccacaaaacttatgctgactgatcactgattagccatgctgccgtggacccagggcagacccgtctgaggtgatatagcagagactggtcaataaccatgaacggtcattgtactcagcctggggtgggaagctctatgctaaactgaattgtcaagagcatattttcataaattccatgctgtagtttagaaaggaaaaatcaccttcagttgataatggcttacagttttctaagcaccttcccagacattaattcactggatcccaataccaacctttttctaggagaaaaatgaaaaacccaaatgaaatgttttatttaaagttttcgaatcctaattagatttgttgcattttttcctttacctcaagacatctcaaaacacagtttttaggaaaagggtgaaagtcagagaaaaatgggaagctgtgtgttggactaggaggaatgttaggaatatttattgcctagatacactaaattaaatatttgacaaatgatctatttggaatgactttgcacaatggaatttctggtatgatgatgaaaactcaaccttcaaaactttcatcgtaagaacatatcttggtttgtcttccggatttgttttctgactgcaccgcacacagttgcctaatgaaaacatgaatgatttgtcctgcagcacagatgggcttaagctaatggcttctgctggaagtgttctcctgttgttatttgtgtagttttatacacgttgacttctggagtcaatcgcccaatgttaacttctatgagagctgtttcacaagttgtgattttttaaatgaattttatagttcttttaaacttttatgtcttctctgtctcttcctgggattacttagcttctgtctgagtgaggtgtgatggttcctagaaatgtattagaaaaagtaccgagtccatagaaggactacggagttcgtgtggccctgtgctattctatctcttcacaatggatccctccatgattcagtgaagtgccggttcacctcggctcaggttcagtcccaggcacgcacttagcacttgaggaagtgttacttgttggggatttcttgggaaaccttaacttttacatacttatggaaggcttcccgttaacagttgtctcttatagagtatggctatttcaggtcttcatttggcaagtaatattgttcctgtgagggagagtccagtctaaaaagttcaagccacgatgctaaaggcattgttacatagaactatttttcatcacccctaaataggcccaaaaatttattaagaagaggtaattgttataccttggaaaataaatttagattagattttttttaatgttaattataaaaccattagcttctgaaactttgaatttaatgggtaggtttagcaaagggcttatgcaaggcaggcccacttcttggtcactaagaatttttctaaccagaccccacagaaggacatataattccctggcctttgagaaaagcacagactttaggaaactgaaatctcgagctcagcctggagcaggaggcaaagtagagtagttagttgttgtagcacctactagttcaataagttaatgcactctcacacaaaccagccagttactagcagcctctagtctcaaaattagttgaagagcataaaactttaattttgtgtatggaaaagccatatgcttgtaggcagctttttctgtatcaggtagagggtgttcaccacccataacaaaggggcgtcagcctcgtaagcctgaatggatgatctgaggcacttagcaatcggtgaagaagcaaagtagaattttcatataaaacgtgtgttctcttgcacaatgttagtgccatgaaaagtagaccccagcacacggggagtcgggggaggggggctaaataggagctcccattcctaactacttccctggcgccaccgtaatgatggagtagtatgccctaccttgataaaagctattccagttgcaactgcatttatttcacctcctatgctatttgtggagagtgaagagtagtttgttttgcctgggatgaactactttatgaattttaatggatgatataatattaaaagctaaaccaggattaaagaagatttttttttttgtactaagcaaaaatagtacttagtagagtgaaggagaaaagatttttgtttccattttttacctggggaaaaattcagctttcatatttttgaaaagctgcccaagtcggtctcccttaagcaatcgcttgtgtttaggaaaaaatgtggttctagaattctaatggcttatctgtgataagatgcatatctgggccagcaagaggagctttgctacatacttttaaactgagtagtgcagccaggtactaactgtatatttttaaagactttctccacatgcttttcctttaatgcctcttttttccttttatctccacctcccctccacccctccttcctggcccccaacagaccaggaagcgactatctgcttggtttttttgtgatttaggattcttgcttcttggttcaagttgtaactgctttatagaaaacttaacgaaatttttagaaacagaatcccagcaacttaagctccccgatttaatttttacaaaagaatgagaattgttaagaccaggcaaaatcccaactttcttaaaaccagagccatcgctacaaagattgtaccaagaaaccgttttcttccagtgtgctggactttggggcccccatttccataacattcaattttcaaagcaattgaaatggcttttctctttcattaaagcagtgagaaaaataggtattagaagggaccccatggggtgatcaaatctacccctctccctcagagcaagaccaccccagagcaaagtttcaaatctcaccaaagcaactttgtaggcaatttatggtaatgtgttaactcttctggctccttaagtgctgtttagcagattatggcttcaaagccctgtgggtttctagtggcctccagtctttacctctttgctagatatacccagagctggaaaaggagccccgagatctcttgctgctcccactgagaccaggtgatagttttacttacccctcttatagtatttgcagccagccatttcacaacctgatggagttggggtagaaggtactttgctgggtacctgcctcctggagataagtcagggaaaagtgactttacttcttacaggttagaagttagaaggattcatcaaaaggtacatttcacgggggacttaaatttacatttgagaacttaatccccttctggggtaacctctacttactttcatggaaagtgttttggggtcatgaaacactacagtttgacatttagtttctgtgcatttatactggcatgagcttcatttttctgttgctcaaagtgtatttgcaagatggtatgtttctagagaacccttgatggctaaaggacgcgaacagtgggctcccttttccttttgctatgagaggcatgctgcagttttgtcagttaacctaggaaaactttagcttatagattacatgaagggtgtcaagacagctccatgtaatcgtttgataaaaatgaaaattggaattaacaataataatagtatcaaatttgaaggttgtgatttggttttcaaccccctaatctttgttggtaagggacacgtttctttagccatccctgctgatctctgttatcaaaggcttggcacaaatttttgagtgattatacattttgaatgtatttgtgggattcaccgatgggttattttgtgtaacttacagaaatgttcaatcacattttaagaaacgtcttattgtctgattctctaagtcagaaggaaggcatcgtatgccagaatgccaggaaacagtgagctaatcggcagagcagcttagacatcatgtgtgtaccaccaccagcctttatgataattgagcaaggctttctacctgtttcatggatggatagaagatttaaatatgcagttccataaatggctttattatggaagattttaaaatgaaacataagagggaaaggcatttaaaaaaagagagtctgaaattaaaaaggccatagtatataacagctatcagtaagttaactgtctattaggcaccgggcacccggcgaagatgcagtgccgtgcattatggttttaattgtgaatttcctttgttagggctgaaatgggagataattgtgagacaattagtttagtgttttcaagtccttgaagctcctgtctgtttccagaaaacttactttatggcgttatttttcctggttgtcagctggcagttgctgtcacattacagatgcaatcacctgtgacagtgtgacttccttaacttaagctatctgatctcagggcaataactaatgttgaatgaccgcactgttgatcaccttgatcataaaaggagtaacgctgcccagcttggatgctgagcctgagaagctctgaatcaatttggctaatgaaaaatgacagccacgctcaaaatgttttgtaggtgaaaacagctacccttgccactgagagaaatgggaagccagagaacaatactatgaacattaatgcctccatttatgacgagattcagcaggaaatgaagcgtgctaaagtgtcccaagcactgtttgcaaaggttgccgccacaaaaagccaggtaagagcctctgacaggcgttagaatgttcatctgtgacgcctgtggcatggtcgatgaaagccatgtctgtgttcagtgcgagttggcatcacagagaggttgaagcctccaggactatgtagagaactctcttaagtagtaatgttgagatgtaggttgtagacattccgtttcctggtccctcagctcctggacgaaggatatcttgggtattctctgggtcagttaatagtgactttcagaagtggactgtcacatatatggtttactaggctagtatatgatagaacatgtaacataatagaagtcacctactgttgctttgtcaatcgtcagatgaccttcaattttcatcctgaaatccccatacaactttttttttttttttgcaactagtctacctgcagctattccacagttcctgaaacaaatcacataccccgttgcatattagtgattttagtttttctgtagttgtacacaaggcgagttgaattacactcggaacacctgaccaattctgatgactgcatagagttaaactggcagtcaaagaccacttcattacagttcagaaacaacagctagttcatccagcttattaccagtaggactctcatatgttggtaattgttcacgaaaatcatctggtagaacaagctcattactgtctactagcccttcctcagagccatgaatactttttaaagacacaaaattcaaattccctttccttccacagaaggacttggtaacactgaggcgggacttagaggcatacaggggcttgggtgagatttgaataacttgaaatgttatgcaattctatcttcataattgctaaatgctcttttgtagaacaccctagccgtcagtgtgtgagtacttactgcatggcaaatttataacacaatactttttggcgtttccaaagatttttcctctgtctgaattaataacaggacttaatgggagctttcctttagaaacatgttgctcctgtttaagttgtaggccggatgaatacttaagggatatcttggaaatgttatataaaaatgattgaactcaagctgtggactgtaaaaaattatagctttataggccgcatgcctgcctacccttcaatcactgtcaaagtgataatttctacaataatatgtttcttttattgtgagattctaaacatcaagtactgtttaaacattaaactgaattgtttatgttagtgctgtactcagcgtgtcatacatcgggccaccgtaatctctcatggaatgtaaaattctgtcatgaatcatggcttgcatatcggaaattactgtaattttgattggaaattacagggctcttgaaatgtttctaattatgatagaatgttagaaccgcttcaaacctgtgtgcttcttcagatgtcttcatttacatgccaagactaggagttaaggagaaatgtcctgttctgactctaacccccccaaccccgcacatccttgttttgactacttagtctaattatgataaggatctcttatttaaatatatattattttgcctttccttctggtcctacattcccccaccccaccctaccccaccccagcctgttcaattgcataatagactgccttcctgcaagggctaggcactttctccaaatcttcaaaatggaggagctagatatatgttattattataatcaggtcagccaggaaacaaaacaaacaaaaattcatatgaaagcttttcagtatgtattacttagttgcttgtctgccacccatccttgcgccccttcctgttacctttctgaccagtgctagccaccgtggcctggctcctaagtgatggcagagacttctctcacctttgggttgagtgatttaggaaccacgcagggagcaacagttggctaattcaggtctgtttggtgttctgtagggtttttaaacattgtcacttttgctgagcctcaggtctacatttccacagtgttgatgggcagcttctaagtatctcccatctctctctatcctaagaacaccccagacgtctactctcccctattagtgattgaagaaactccaaggagctcattagaagctgtaggccaagtggacatgtatgtcttatcctcgtgaatattgctaatgtattctacttcttgtagcatttctgtagtttctgtcttgcatatttagttaggtgttatcctgcccttcatgtgaaaacacatgcaaatattgagagggattacctgagagtgagtccagagcctgtatcaggacaggaaatctgaccaacaaaggtagccgatgagtttcattgttctactgtcctcatgtctcctataggaaacagaaaagctagtgaaaagtctttaaactgactttcacatagtaaaactgtgtaacttctaagacatcagaggggaatagcattcctccaggtggggtgtgtataaaatataacatatacatatgaccctttaagttatggagcactatacataaatggactgcatttcctaatgtgctcaataagtgattcagtcctctccatgcagagcagcgatttatttatcatgtatttatgtatcagaataccttccattttaaaaggtaaagggtgtgcctgccacaagtgactgatgcgtggagtattttctgtacaaagagcctgcccatgttgagtctgccttttagcctgttctacatcatctcgtccttttgatgaataatagaaatgagattgttttaactctaaaggaaatgtccaaatgaaatatgcaaggggaagccgaaggtaggctacttttgtgcttggttacaaaagcaggctaatgcaaacttgcaaaagatgatgggctttgaacataaagcgagtagctaccagtaaatacattttctgtttcaaataagcggtggtttctccaggtgagtcagattggaattttatcaaacgtttagtctcataacattcaagttattatgggagcaggatttgctaatttcactgttttaaaaaaaatgagttgatttgggtaataaccattcctgtgtcaaggctctgttaccgttcatcggcttcagtgttttcatctgggagatggaagtggggtttgtccttaatagtggcagatgttggaatctaattttattccacagcaaacccctcgagagctttgagacttcaggtgtgtgtccagcaaggggacattaactgcaccgcaggccttgccttgtacatgcaatttttacattgatttttgtgtttgtggagtggagtctgtagacccagctgcatgggcagagtcgagggcgttcaccgtgtctccattcatgttagcaaatgactgccctcacttgcttctcagagcagggtatttcttctaggtgcagtagaaggctgctgcaattgcatccgattggacagactttcagtgtaatccttcttaggtccttcaagggagatgactctgcctaccatggtgtggacctgggttaataagtagagtttatttctattttttaaacacagtttttaaaaagaacatttttttttttactttaacgtagcatgacttgtagaatagagcagacaatttaaagccatttttgtgtctcctatcaatttcagacacttctgtctgtgaggtacaaggctgtaatgggaatgagagagggagtcagggagaggaggaacagatcttcagccttcctttggtcctaggcttaaaaaattgtagcattgctcatatttgtaagttgggttagttgagatgtcttaaatacaattaaactgtcacaaatcggagaggggggggcagggcagctagcaatagagctaaaaatgtagcatataaaagaatttatagtggcagcacctagagataaaccagggagctcgtgacaccatatcccagccagttagtgaaggcaccattggttttattcaagcagagttgcactcggtagaaactgggtgctaattcattctttttgaatgtgcacgtcacagatactgctgtggcacgatttcacctgtgcagacttttatttaaggcactcaggaggccccgcagacgtgtgagtcacagtttctcttctttctggtgctacaactctcagcagcagtctgtgagaagatccctgtgccgtgtcctcagagcctgtctcctagatgtgcacatgttccttggtgtgggggaggctgttcctttgcaacctggacctacccagtcctcccatcctgttgggtagagccagaccttggtcataggtagctcaggtctctccatgtctgcttgcccgaaggaggaagggcaggaggaactctgatgagaacaaagaggaggaaagagctggaagcctacacaactcctgcagctctcatctcacccctgcgaggtcaagtttagctcaggcttgacaaaacctctgtactagattcttgaataagggggtgggggtgttcactggcttcctccttagggtgtccgtaatcatttgctgaaaatagcatatatgttagaactagggagaatattgatctgtctatttctagttgaatactaaaccagcctattggagttgatggctttaagtaccagccactcttgacaacatggccatcctcactgcatgccagagtatgtttttcaggactagctaaatttgtggatctaaatagaattagatttctgtgctctgaaacaagtacatcttttggtaagtctaaggtttggtctctcaggtccagcattattaaataaagtgtgtacttgcccacttttggctaaaaagctatgtaaagggatatcttgccccttaaatactgttcctaagtccaacagagatctttggctatcctttgactatttttaaatgatttaagaatttcacttttctacctctataaagctagctgaaagccacgtgcactttttgcttccagctcaataggtttaactgttacaaagacagtcagaattcagtgagctcagtttttccatttttaggaactttaggtaggatttagagaaaaggagttttgtgacttattggagcagctctgtaaaggtcttcaagagaggaaatgacggaggccacggtgtgtgtggccatgccacagcaggaagcactagtagctatagcacctcctttacccacggaccgactgagagccagcctacctcagagaggcccctgattcaatccgaagctctctggtattcatgcttcagtcaggttagctcttcctagacaacatcagtaaaagaagggaaatgagcagactgaagggcattcgctcataaggggggttcatcagagagcttgatgccttcccgttaaaccccacgccgaatgcaatacaggtgagatctttcagcagactgcctgactgtagaggcgagcgtcttcttgggagtctctgtagtcttttatattttagataatgaaggtaggttttatttaaagtttagctttttttttccccctcacctgggaactgaaaataaaggccccatgaaatgaatgagcggtgaaagtaagtttatggagagtgatgatagaaaaataactctgaaagggactacagattttcacaccaagcagaggtgcgggaggtctgaggtcctgggtaaggactatgaatctcacccactcccctgatgtttgcatcttagaaagtaaccttagtactttaatttttatttttattttattttatttttccaatttgttctaagtatttttttttttttgtatgcaattcttttgcttggtaaaatggcacaaagtttgattaccaaccaaaaaaaaagtaaaagtccctgttttaaagacttacagaaataaagctgttgtgtaattggctgctaaataaataactttcacaatatgaactccaaaccatttgtggagttgatttctaagtgtcaaaatgatgaagttgtttttctccctaaatcttaatccacttctgttgtaggttaatagaaaaaaaaaaatgtattctcttttgtttttttgttttttttgtttttttttttttatttcaacaattccagttgcttttgtgtcattttcaagcagttcccccttccaagcagcatacttcaggaattgggtttaaacacactgtttcataaactgccagcctcctcggccgccccagtgcctctgattccgtaaatcagatcataggcagcatgctgtcatataataaggtgtctgatccttattaccagtttgttgatgcacagactccttcaaattgaccatcgcagcacatggtttccctggaactagctgtgataattagcgtggttctaatgagacagaatgtcactgatcttgtgctgaactgtcgagtatcgacactacggatgggaactgtcagagcctgccatctgtgacagcgcttggcatattccagtggcaaggtagagtgtgctcggtagagtattttcaaacaaatggcccttttcttgacgaggctctgcgatctgttcgactggaggagaatgggcaaacccaactttgtcctacgtgaagccctattttgacgtccacggaggactattgactatgttcagtgttacataagggaggaagcttttgtttagctggtgacttttaccgtggccgttctttccctgttgcatgtgcttgctggtgtgctgtgtgcagtagcctctcccagtcgccccatattgtcagctcacagtaaaacagtcacttcaaatactttcccctgatttgaatattgccttgtttagaagagatttgttggggagctgaggatggcttttactgatgaagtggtctaagttagcagagggaaaggggaaacggagggagaattcagaatgtgggtgagagcacacaagaagaatcggaatggacagaatgtcgggtctgcagactccagagagaaggagggaggttttactggagtaaaagtccagtactgcttatcattccaaaatatgctttgttgctttttattcctcctctctggcagaccacacagggcttgttctgaagaacattttcactaatctgatcaggcagccaaatacgccgggaaaactgctttaatgatcccactaattacctcaagtcaatatgaactgtattattagactgagggaaaatattccattaggtctccccctcgggagtttctccgctttgtgatgtcaccgaagccttcaccctctcgcttgtaattaattttatttacacacgcaggcacgcacaaggtcacacctgcagaaccatcgctggccagggagcgtgtggcactcgggcttaatcagatctgtcataattaccattctgcatgtttctgacacacgctgtgaaatatttcaatttaactgccgctaccagcacaaccagatgtagtgcgagtgtggctgcattggaaatattattccgcaggataaactctctcctcctcctcttccctccccccctccagctaatgtggcacagaagctgatgtatcctgtaaatcttgaatgtagcgctagattgataacaggcgattagacagtttaaccacaaacagcttgttcatttttcacaaatgaaaaccacatgtggtggaactaaaatttcaaccccttttttttgtaagggttggggtatgtgtatgtgtggaagatgtccttaaataacaataaaatgagcaatccaaagaagttaagtgtttagaaaaatggagacattgcctagtttccctccagatttatcaaaaccttatcatattcccttttacactttaaccaaaactcaaatgggaaaaagattgtggtctctggtgggctttcaggatgttgtatttaaaaaaaaaaacttttgctccattggtctgtaatagccctttgaccttatgccttaaaaaaaaaaaaaaaaagttaacacttctttaatgaaaattttgaatgagttaggttgaacatatagttttccaaagatagttttcattattgcttttttttcttttttcttttcttttttttttttttgtagttaacaagttgttactcaagtttttgtggtcagatatcagacaatccccaaacaatatggtctcagccagatacttgttagcttacagtcgttttcaaagagagttggagaacagtggtttctgcattagaacaccagagagcccgggagggtggcaaaaggccagaatttccacccataagtatataaaagcttcctagaaggccagagtgggtgcgaaaggaacaaccagagagaagtagacacagacccagggaggcatagaaacacccattgctccgttgaaaatgcacatatggcttcgtgccagcatatgccaaatatcatactctgtttctatctttctgctgtactactacaattttgaccttcttggctgctttctcaggctccgtggtggttctgttgtctggctggtctggtttccctttcctatagaacagtgtctttcctgagctctctctgttcttcctcctgcttggaagttccttagatcattggagttaacaacctggctattgtatgttttctggttgctctgaaatctaacgttttctgcctctccacatgttcttttagcccgggtgttactctaaaaggaaaataagtcattcataaagtatttgcctattagctagaccctgtttcttccagctgtgaagatgttcgtttacagagttagttgaggccctcccgctttctatacccttcatctgtctttgtacgtttgctttccatggttttgtttttgccgtctaccttacctttgtcttcagttctcaaaagtgttgttcattactgtggaagattgggttcaccctccatctttcctgccgcccatccattatagcaacttcctcccgagtctagatattacccagaatccttcttgacacagaagtggaggccccatccagtcagtgaaggagcccgtccctgctgcagtccacctgcaattggagattccaagaagggcttggtaccatgtcagagttggggagaactcgattcagaacttcactgatatcctccttaatagcctggaatgtttcacacagctgcttcaagctattttgatggacatttcacaatcactggcaggggtcaccattaaatggattcctaaagtggagaaaagattgtagtccaccgagattcccttccctggtttctcctgcttgcagactttgctctgagttggactttctctgtgcctaggacacttggtgatacgaaagggaagaggagtgcagagtcagctgaccagtgccgttaggaattggtagcatgcagagtttggcaatgttcagcattctgactggaagggaggaagaccttttctcatcccattttcttaggctacgagatcccactgttgaaagaaaatacattacttgtctttaggatcttgctgggttctgtttggtgtgtggagagtttcaatatatgtgttaacaggtcacagatgaagatcagtggccatacaacctgtgctttatgctactttcactcggagctccatccctagccattcagctatgatctgctctaggctctaggacccgcatgtgtgccaccgggaaatgggtttccctcagtgctcttcctaccttctcttggacttcatttcatcttggactcctgctttcgtttgttttcatcttttccttgctgaagtcattaatgtaactcacacttgcattctgagctgcaggaattagagggcccagcacctcatgggaaaagggtgtgtagctattgggacactccctggggatcgatgaaacacctacacatgaacttcacctttcaaggaagaaccttgagacttgaagagctgtagtcccgtttccctagaaattattgtgtgtacagtttggatgaggatgctgttttttgatgggcactactacccatgggtagttaagcttgagaataaatcacacaagaggtaagaccttgagtactggaaaggttttgttttgagggaatgtgctattttggcatctgaggtcaaggagaataatttatgagtggcatttgatgttggcttcctgtgtctgaactccatgttgtgtgaattgaggtgagcccacaatagatagacggcgtcttcatcggagacttgttatggatgagtgaaagccctgcctttcattatgcagcaacttggcagggtccaggcagagtagagcagaagagttgaattaagttgaaacctgggcttggcttcctgggtgctgggacagtgactgccagagcgctgtggcttgaacattgttaatagcttccttgagatggtcagtttagctttgtaaccaacatctgaaaatccaccttaactgcctctattcttttgaacattttctgggaagacaggaatattaaaaaaaaaaaaaaaagaaatccaggcagtatgagaaatcacaggtttggcagagatcaggaaaggagaaaacacagaaggaaaagacttatcttgcatatctgtaggcatatgacttagaacatggagcattcgtaaccgctgagaagcctcccaccccgactagctcctttgaatcttttacatttcactcccagcaccaaggtgagcactccttgtcttgggtgctacttggctacagcactggatgtttggtgctccaaatgaaatgcagattaggtgaaaataaattactttcaataaggtcaaggaactaaaggctgtatatgtaaaatatagatttacaaacaaatgttcttaggaaatccagcttagtccatgccaagctgttattccctaaattgccttttttctttctggctggcagttaatttttgtttctggattgggggaagggtaatagactaatgcagaataattttattttagtaattttgaaagaaactaaataacctggaccctggataattataaagactaaagccttatccatcaagctgaatttttaaggttgtgtttttgttgctgggtagattttacattgattattgttgtgttataaagttaagagagagttgtgcactcagttatttcctaccctctgccccaattttcatgtttattcttcaaattcttccctttttctactggactagtcttctgccatgaactctgatctgaaaggtaaatattgggtgtccatttgctcctttagaacggactgagcagatcaagtgtgccatttgataggcagccttctgtcagggacatagctcctgtcttccctatcctccctgcagccacacccccaagtacctctgcctttgttcaatcccctatgctgcctctcttgtctctgccctgctctcttacctcctaccatttaggaaactctaggttggaaagccagcagcaggtccacagttctcaaaggatgctctcatcctagcctcacctttagatagattaagggatgaaactagccagattagaatgctagtgccccatttgcaatttgcaaactcattctttgtgtgtggaaacaaacaggaaaccagtgtgctatgtatgcattaatgtaactgtccattgacgttgcttaagacatagcagtatcttaggagtgagcttcaatagaactgaattatataaatctaataaaaattctctttcccattcgatgacctaagggtctgatgttgtgggaaccattttatcaatgcgactatccccaacacacacacacacacaaacatattcaaaggtacacctctgaaaggcctctggttggaagctgagacactgtgggctataaccatcctgctaggagtaactaactgtttaactctgccctacctctaagaaacatgttcctttggggttaaggaaggaaattatttcacaaatgcacagagagaaggttttcagtttgctgggtcctatctagattaattataaaaataatatgaagcatgtgagtgtgtatttgagatatgtatgtagatgcacatttaaggttgggggcacatcctgttcaggggttcttatactgtgttccactcttcccaaggggacaacgacacccctgatttattttgtgtgacttctgaatggaaggtggtgtttcattcagccattcataccagcaacaaatcccagcaacatttgtaatacaaattgatcatcagcaaaaaaacatctttatagcatatcatgtcatgatagaactcttgaaatattgtttttcttgatcatcactagaaatctactgctttaaattggagtttggtgtgttaatttaaacatatgcctgcatgtgtgcatgcacacacacacacacacacacacacacacacacacacacacaccttttaatatatcagaaatttttaatagattggtttagtctggtccattcccacccccatgtcttgagttatctataaaccgattatgtatatcagtgtaattggttttctttgtaattttatgtatttatttcaaacatataaaatccttcctctgaagaggcatccatgggctttacccagactgccagaagggtctgtggcaccaaagagatgagatcaatgataaattgtgtagagggaacaattacatgtttaacatattagcctaagaattttttaatttacctgggaaacattttcttccaatttgtttattgctttctggtgtgctgatttttcaagggcttgtcacttcaaagcatagtaagaggaggcctgtagtaagttagtaacatccaaaacaaaccctaaaactgtaccaacaaacgtgtctctagcatagatacccacagtgagtactgtacttcatgagcgaatgcctttgctggagataaaaaatgatatactagttaggccacactttgaataacaatgtaaacctgaggcctggatgcctcttacctcattggatgagatgtgttaggaaaaacaagtccctatagtacgtgtgctcacgtgtacccttcctttgcagagtggcagtctgagagatggccacagtaatgacctgcagacaggtagagtgagtgacccgggagtagactcatcaagctttatatttctaaacaatatggaacagtgagaggatgcccataagacagagctcctgccagcctctcccttgggcatttctgctttggctgtgcttaggtgaagaataacagaggtagcctgcacctaggcttaaccttcctggtgtggccattgtcaccctgacccacatggtatacagacatagtcatgctttctgtcatggctacttgagaatcacaagattggattctctcaaattagacaaacttctgctaaacgtgtttgcgtaatggaggagattatgtggttttgagacatgagatggccttatcagcaaagtcatatataggttgggggcttataatgaccctgacagttgtccctcttggggtctgactcccacgactcataaattccagattgccttctcttggcttaaaacttccttgttctttctcctagaacatcatagaggaaagatttaaatttttaattccctaattctaactatgcataatggaaagtatagctcatttctggagctgtctgcagtactgaaaaggtttatataaatcagttgaaaatgtagtgtagaaatatttgtttaaaataatctagtggcacattatctgtgtaaggcaacaggctatcctatcaggtaaatcaccttaaaaaattgcttattttatgaactttcattttttttaattatttaattatgaattttcatttttataattttccctctcacatatggtatatgtccattagcttcatgctttttgtaagatttttcagacttttcaataggaaaggagcacggtgaaattttaataataattagtaagcaacccagtaaaaacatctactttgtaagtccacatgtgtttgagttgaggtttggggcaagtcaggtttcctaggtttcccttttaaagagcattacacacatctgccttagggccctttgttgatgctctgcctctgtgagcctaggaagccaaattcagctcaaattttatttaaataaagcatcttccctctgagttgacactgctggactttgcagccatatgcgagaccccaggaataacagggatgtgcattgtcttttaccgttgcccaggttgggccatttttataacttcacctcacagcttactggctcttccctgtgtcgtggcgagtcctctcgcaagtttttacactcaccaaagtgtgagccttgggatagttccaggtcccttgagaagagtgcagagaagagtttgctactcacagggctatgtgtgttcacatctatttgggctaaatgtagctcagtggggctggggggtgggctggaatagagaagcaaagtcagggattaaattaatccgggtttaagacccagagcgcaagtaggtgttgaagaaatacaagaggccttcctgaggccgagaactgacaggaactcacgttggttatggaggagacagacaagaaaaattagatttttaattaaagccatttgctctgcatatttttattacatcgtcactacagaaaaatcagaaaatacaagcataaggaagaacataaaaatatccataatctcaatcacctagagatattctgatttaatatcctgatttaggctctttatctacacaggcatgtacttgtatgcatatgtgtggatagatgtatatgtgtgtgttgtgtccatttgcatattgtagcagccatcaattttctatcagtgaatttaggttatttccaactttttgctgtcacaaatgatgtgaatgtcaacactattgcaaagaatgttatgtagctttgtgtcttagctttggaataaacattggaaagtgatgttactggtgcagaaaaggcatttatttgtcttttaaggatcattgccggacatttttaccatctgcattttcacctttcaaaaagagtgtctgttttatacttcagcatcccagcctttgggtagagttggtagtagagctgtaaactgagctatgttgtttcggatgtaactgggtgtgtgtgtgggggggggggggcggggaatctggtaacccagctatgctctttggccatcttaatgtgttccagtccctatgagatgatgcacatttgatagtgtcagcaacaatatataacagtaatagttggaatgttactgagtactgagtcccttccctacgtgttctgtttttattctcggcgtattgaattgggtgataaaactagacttccttttgcaaaggagatatttgagggctgaggaagttaagaaatgtgcccaaggtttctcaccagcttcctagcagacctcagaagcatagcatgtagaaggtaaaagattacagagctaagtcattttcttaagccaatgtggtaagggccctgggaagtttcatctattccgaagcaaccacattgcttattttctccccagaactttgctgattcattttgggctccccgaaaccccattattctgcttaaccccttcaatatggcccattcattaaagccccaccagcaccgctctcatcagggaagtccttcagttttttctcccctccctcccccgattgcttttgtcctctgtcctttgtcctgcttggtatctgccccttgttcacctttgtcacagctgctttcaactaatagttttgcatagcgtacctttccaggtggacagtgtagtgtctagatgcttttacttaactttgctctatccagtcatctcagatcaggcatcagactgaatgtactctgtttccgttgtaccagccactgggagattaataccattgctatctgttgtttgtagaggaggcgtcttcacaggggctgagagaggagatttgctcagattagttttgatgctttcctgtccactgtgtgctcctcattggtctactgaggtgcttgatggaggcttgacggagaagtagtatttagaggggggtaaaaagcctttcttctagagtaaaataaatagaaaacagagcatgagactttgtgggcgggccgtagatactaattagtccaaccgagtgtgaggggtgtgaccaggcataggactgaatgcaagcctctggggccctgagctttgctctcgtgttgaggtctctagaggtcacattgaaccataggactgcatggacaggcaaaggtggatgaggggtgtggaggttttcatcctgcagcctcattcccaaaagccttcccacggtggtgaagaagattcaagaaagctaaatctgcctggtccgttaacctgtctagaagttttcagagcccgtcgacatgcccagtctgcaaccataggccccacgtgaccaaggatagctgcctagagcacagcatagatgtcatcaactcatttaaaactccaggggttttttgttttttttttggggggggggattgggggttttgtttttgtttttgttgtttttttttttttttattttttatcttgggtgtgggtaactcatttggggttttcaggtgtgaacattataaatgacatcacagtatcttaacaggagggcaaacctgcaagtccacaaactgagttaagaatcacattaatttgctttttgtcggaccccattagttctaggtggtggtactgatattccttactgataaaagccgttatcaccactggtccgattctcccctaagtcaagagaggaaaagtttcccactggaagtaattgaaagaatttggtgcctctaagaataagttcaaggaggacgtgtcccaatttgaagaagccagtggtaggcagttcttagtgctggtaggagaggctaaaattaatgagaatttatggcacaaaccgcaggggtactctgcatttttgagatatcctttataaaaaataagaatgaaaatttaagagttgaaggccaggtgtcaaaatagtaaagagaggctaaattattctgctaaaacgtacggactatcatcaaaaatgttgtcagagtgtgtgtgtgtgtgtgtgtgtgcgtgtgcgtgtttctgggggcaggtaagatggtttttccaagctttgtttagaaatcttgtatttctgcccagtaaggttgtcttctagggcagtggtcccaagccttcctgatgctgtgaccctttaatacagttcctcatgttgtggtgacccccaaccatgaaattaatgttgttactatttcataactatatctgtgttttccagtcgttttaagcaacccctgtgaaagggatgttcgaccctcaaagggctcacagccccgaggttgagaactgctgtttgagatattttagtggattgtttagaatttcatttttttgtcttaattcttcctctttcaccttctcgagttctctcttctgggaatacctttaatttaggagagttccttacagagcggccatttgtctttcctcttgccaagttgtcttactatgacgtgaacaatgcgtaccaccatgctcacaccttgtgtgccagtgacctagagaggttgaggaagagactggaataaaaacagacagctcaaagcaaacattactttttaaaattattattattatctgattacgttgcaagcaaaattgaaaagtaaagatggcttgcagtgacggagcacgctcccagcctcagcaccctccagaaggctcttcgtaggcatatgtaaatgctatgttttatgctaatgatagctctcctgaagctgtgctggacctgcttaacctcctagtaacaaaggggcacatgagaaacttctagacagtcagtttatggcctatcattaccccaatatagaaacccacagattttttggctaagatattatgtcccttaaataaactagaaagtctggaaggagatcaggactctcaaaaacaataatctcaagcgtttaaaagagcagtcgtttaaaatattttcatcactacttttccttctttttaacgaatgtatcagccgccacgcctttgaaaatgaattatcagacggagcacatgaatatttaagctgtatttcttagtgaaacccagcttagagaagatgaacagaacctgcccctttgaatgtggaaatacttttcctggtacatctctgttcaaatttatcctccatgttttctttaataagccaatgttaacttagcagggaagtgactccagcgtctgcttagactccctgtgctacatttgatgttgatgcatggaaaagagagatagatgagtgcacttctcactacggctgtggaagagaacgtgggtcttcgttaatgttaatggctggaatctctctttagtccatagaataatcggcttgatcagaaatttccccttctaaagaacttcatagcatttaaggttaatatgttaggtaaagaacactaccctaagacaagtgtttttattacaggacacgatgggatcctctttattaaattatatgatgatctgaattgggaaagaagaaaaagtgtgtcgcctcatgccctcaactttaatgcctttaatcaaataatgaccttctgcaaactagctaattttaagcgtttagaaagatcaataccactttgccaccaaaaaatggcctagatgatgaaatctgatgtatttaaagtatcatttcacccttttaacctagtaaataatttaaaatgctttcagtgctgctctgccatggattttgcttctcagggttcagtgttgggagtgtttggggtggatgatggcaagttggcttgagatgcatccaggcctcactcacacttagatctggagtacctcccccttccaaatactatgtttaaatactacatttggggtacagtgtatataaatcctaaaagatgttaaagtgggcctttctataatgttcgagaggtggtttaaaacacagcaaccacgtgacaccttttgttccatcttaagcctttatgctaaaggtgacagatttggtagttctgacaattagaacccatttccccatcttataggagaacactgatgtaaaattacccttgagtgccagcagctttgtaaataaaaaaaattgccctctattagcatgtttgtgggcagattaaaaactgtcttcatttgcataagtaacacttacagattcttttaaaagtaggaaattatttcctgaatgataaattgctagctttatagttagttgttgttgaaaatgtactcattcaaaatgcctagcgtagtttagtctacaatagtgaatttttttgttagaagtactgtttaatggattatgtactccgttcttgttcccaccacttgcaaaactgtaattcatgctttgcactaaaatgtttgtatcaaatactttcctatttagattgatttcttttaatatcatatattacacgatatgccccagagattggaagaaaatactcctgcaaataacacataaaagatgaaggtgatggggatggatacagactttaaaatgttttgccttttagaactcaaattaccattctattttttttttaatgtatttttccttcttaggtgcggcaggaaagcatgccatttttctctctctttagagctcttagttttaaaatatatatgtacataatggtattatatacatatgcatattgcactaagtgtgcctcccatacacaaggtacaaaagtctaatttccccttgaaaactagttgtgttaagaactcccagctttgtcccagaccagaccttacaagcatctctgtgtatgagaggatttgcaacgattaacaaattaatttcttaggaggcgttagttccctgccgcggaatcactgggtaccccttctgtgttgcaagttagcaatgaattgacttgaactcatcactctaagaaagaacagtatggaaatcagagattgagtttggtggaaattagcagctgagagatggaggtgccagggttttgatttaaatgtggcacaacaagattctgtcagcaaagcacatcattagaatattgagtttggaactgctaatttttcctttaaaatgagcatacagtcgagtgtttcatggaccataataaatgccattgtgttgtcgccgcgcttgtttggattgttgtcacacgggtttggcagtcactctgctttttctctttcccatttctcccccagtcttacatccttaatagatcccaaacccaaaccagtcaaaaaaggatgctgcttcctccttcgtcttcccattaacatcttctctgcactgctttcttgcttaccatagcaaggcgtttgcagatggctgtcggttactataaagtacgtaacaatatctccttggtggcagatggatttaagacttttagttctcaataaatgtaggtttacaatacataactttacaggattcgtgttgtatataacaggttgaacatattatctcagaattcatctgcatggcattttcagcttacacagggtccatgccaggttttgttgttgttgttgttgttgggttttttttttttcctttttcttttttcttttctttttttttttttaagtaatagggaattgctgtgattgatagcaacagctcaaggcgtgattttgaatagaaacaaagggtttggaacagaaggtgtcaaattaaactttgtcagtttgaaaagtagtaacatcctgaaagttgtactaatttatttacatgtggctactgtttgtattttgccctcattagatgcagtgtgatgctgcttggcaatttaccacatttaaagtttaggttgttccttgtgccattttagtttttctgagaatggatcggtctcattgtgaagacttgttaggccaccgtcttttctaccattcaaagagttgtaatctaatttaattttgaaagcagttccagatctgcctgtctctggttgtacacggctcagcaaatcccagagatctttcctaaaagaataatgttcacattttacagcacagcaccaagtctcattcttctctctctttccccctaagcagtgtggtacttctggggaagtcttgtcagatgttagcaatgttcaggcctctgggtcacctttccacatgcattcattctatcacctggggaactggcctaagaaaacgtattggggaattagagggcatttatatcctctttagttgctttcttcaaatcataggttactgtcatgacttatggagtggagagggatagaatttgaggttgtagcaaggtatttagtataagaacagattagttgggggatatatcagtctgtttctattgtgacaaatgaaaaaagaaaggtgtcaaaaatgtgtgttccctttagttaagagttcacacaagcacaacccgttttcttttcccttctttccttccttttttgaacacccttgtagagttttaacagttcccagatgcactgtcaaatatttttgtatgaggcatccgatttcagtctcttcagctcatcctgtctctaaaaggctagcggaaacacgcttcagcgcagattcatcgcgttatttttagataaggaattagaagtattatttaagggcagaggttaatagcaaagtactggaagtgttatgttagtcatgggcaattaataaaaataaggatctgtctgggaagtgccgaagacacagaagtgacaatataggcaaaatgtttgttgaatgagtcagggttctctttctgaaatatttgttaaacccgcacgagtgtgattatttaggaattagctgtcattattagccgttttaaaagaactaatgattttcttttccaaagaacatctgtgatccacatgtttttcccttccatccaagcaccaagtgatctctgcctttacttaaagaagtttctgaaggatgtgagaccatccatgttttcagcactctccaagaaggttttctgacgtgaatcattcttaatttaactcttggcaatttttagctacaggcatttatttcttaaaaaaaaaaaaaaagaaaaaagaaaaagaaaaacgtcgtaagagctcagtgtgtagctcagaactctctaccagccatgttccagagcccttcctccgtgttcttcccaagccacctctggaaaggtgaagaaggccagtgttcaagcatccagtttgggtccgggtcgtatggaaaggatgcagacaaggtggttaagaaagtgatcttaatcagttatgttcaagcctccaggggaatatacacctaaaaacccatccaacaacaacctttagagacgtggcctaaggagatagtatgaatctaggaaaacagatgggattttttatgacttgttccagatagcaagtgtttaccctgaagagctaagtagtatctctaggagaccatgtgtgcaggtgggtctcgaacactttaacctcctctcaagttaagccttgtagttcatagtctgttcacacaagttgaggcaaactcccatcagctcacagtagtctgaatatgggctgtggtcagctgacaagcagactccagaactcagtgccacagtgaggtgggtttttttccattttagtggtcattctttcaggttaactcctcagtgtattgtcccttcatctgaaattgtgtgttcagtggcatcaaataagagcattattatatgaacattcgtgtgtgtgtgtgtgtgtgtgtgtgtgtgtgtgtgtatgtgtgtgcgtgtgtacaggtatgtgagcattcattcatatatatatacatatacatcatatgcacatgaacattcatgtgtgtgtatatacacagatatgttagcattcatatatatatatatatatatatatacatatacacatacatatgcacgtgaacatttattgtgtgtgtatttgcttaaattagaaacaactgttaaagtatccaaactttcttagaggcacttggctagcttgtaaggccctgggttttatactgagctctacaagcaaaacagagcaagagtaaaatttacaccactcacccccaaatcatgggtattctgacaggctagcaggaacctaatgtgttggtccccatcttttctttctttctttctttctttctttctttctttctttctttctttctttctttctttcttttttaatctctcaggcctgggagaagaaggccttgtttcttttcaccattatcacaagtagaggtttcttttgaatggctcactcagcttgaaaagagaaagaaagcggaataattctctggcttcatctcccagtaacgtaaagagcagaatccttcctggatagatctacagtttgcatactagaggtacagtgtctggactattgctgtccaactagcttcctggaaatttctaagaaagcccttcactttggaccgttatcccagaagcagagccccaaatgggtaatggggcctgtccctcaatgagtgggggagaccagggaagggcaaaggacatcgatggcctaggtagaggtagtgcctcagaaggggctagcctgccgtctaattgagccaatcataggtcaccctggggcaataggccagttgaggtagtggagctgccttctggtctatctaggtaagatgtccccgacagtctaatgagctgtcctggctgtgggctccagttgtatactctcccctcccactttcctaccccattgcttgtggcccagaagggcagacaggatgaaaatttgaggtggtgataagcaggtgtcttctgttgaaacttttaggatcaggttgcatcatggccttggttgaatttgtccttcactttgtgttgttgttggttttggttcttctcttttccctaaaaacctactgaagttcttccctgaaaagttatcatatacatgtgctacagatgatgtaaaagcaggactctgaggttccctttaagaaagtttcttgttgaagaattctcctaaatgcccataataaaaccataaacccagtcatgttcgtgcccaagcatgctggcgctggtgtaagcttaggagagcctctgaggacagtttgtttctcacgctgacttgccacctcagtgtcttccattgccagtgaacaagaaggctggtctggatggtccctcccttggcttccttctccgtctctcttactgcagtctgtggtgaatgctctcttgctctggggtttttactttcctctggtgtttgtgtgcgtgcactcaggtacataggagctgaggcaaaaggtctttatggtagacaagccctcggtatctttctccacacccccatcactggggtagcaggcaacaggcttttatgtcgcttctggaggtccaaactcacatctgcatagtggcagagtaagcagttacccaccaagccatcttcccagcccatgtgtctgcctgttaacgatgtaaatctgaacgttctgaacatctgtcagaaacagagcctgcttcctccgttgctacaaccatcctttcttaacaggttaaaaggaagaaagaaaaaaacactcaggcagattggagtgcggtgcgtggatgaaaaccttacggactggagtctcagttttagcatccacagaagattccagcccgggccccgactaacctgttacctcttctcctaagggatggctgtgtgagctgttgcgctggaaagaagatccttctccagaaaacaggaccctgtgggagaacctgtcgatgatccgaagattcctcagtctgcctcagcctgagcgcgatgccatctatgagcaggagagcaatgctgtgcatcaccatggcgacagacctccccacatcatccacgttccagcagaacagattcaggttcgtttaccttggccaattcagtgtagcaccaactaaacaaagccttcaacttagcaaggaaattagtggttctcctcttcccacagtctacatacaggagttctacaggagacagccatcttgctcaggggatacatttctggctaacatggctgaaaagggggcaggagccccaatttggactgacttggttagcactgggttttgcatatgaaagcttaaaacatgtcttttggtgtgtgtttttaaaattcgaatttaaaccaccacctactccctaattaaaaccatccttccctggaggaaaggaaccaactttgtgctgcagaagaaggtcacacattttataccttggcatctgtccagagtgagcgggggagggagcccggcatcttgctttctccttatgctcttgtccagcctttcacctcacatacccttcccacccttcgcagggcagggcagggcagggcgagtcatgtttgtttgtctttccttagagcctctctcccagcacccttgggaaaggagagtctagaggcgttttcttaccaagcctgctgacccctgcaccatggccccatgctgcccctcaggtgagcgggcaccagtttcctgtgctgaggagaaagggagaaaagagggtgttggtgaaggccacttcccccagtcagggttttcagatgggcagtgctagaacggccttgcctctggccaaagcccacagtgccaacctcaagactgcttgatgtccctgtgtggggcgtggtgcttcatctgtcggaatgctgctgcccatgagggacttgattgaaaggctgtggatcagaccacgtattggggatcctgtggctagttgaatttaagttgtgtatcttgtttctgctaaatctgaaggttgcttctagctttctcctttaagggaaatgccattgcctctgggatcccagaaacctgcctaacatctttgttgaatctcttgcattccttcttggtattgctgtatagatatctgtagctaaaataatagagttatccatccaccagaaaaaaaatccttgagtatttattaaagataaaacaaattgaaaaagagaatcccttaggatattaagcactaaaataattgtgaaagcctgaaaaaccaactgtttcagctaaaacaaagacaagaaagatatatgttaagtaataaaaatagtacttgtttgaaaatgtaaattgtttttaataaaattgcttcttagggggataagaggaactgcttaagcacaggacgaatgttgtaatacatcgcagctctgcacccggggttgattggcttggctgctaagaattatgggtgtcgagtgcacagtagacacacgccgcacgtttgttgcgtataattgtgtacaggaattacagcacatatgcagatactaattatgaaaaagtgtctgtatacattaaatttaaagcctaatcacatagtagtttactatagacaaaacaattcgccagctggcgtagaatggagtgaacctttatttgaagggggtaagagaaaaaaagcttagcgttagcctagttgcaaacactaggaatgtgcgtctgtctgtctgtctgtctgtctgtgtgtctgtgtgagggagagagaattgaaactgtctgagagaacatactttcatacattctgcacacctcttgggaaaagccactgctgtgctcccctccatgggacagccacagaaagcagcatagccaggtttcccccgtggagaatgcagtatggccaggcacagtgcttccccaatgcctgggtagctcaactgcccaaagatgtctcaggaatccttgctaagagggattcttcttttaagtctgttaatgaatgacagacatcatgatgagcttgcctggccacctttggtacatatccctttccagagagtgtgttgctcacgttttttccagttgtttttctcctccccagattggtggtaaatgggcacagtagccctgcgagctgcatagcttcctagctgcccagccctgagctcaaatttgtatgtatttatttaataaaggctgtgggctgtttagctggcctgctctttctcggtgtgtctttctcccctactccagccccacccccacccccagacactgcacaggcttggcaagcacccactcttactcctgcgggctcctccgagcagctctgactgtctgcttgtctctttgcagcagcagcaacagcagcagcagcaacagcagcagcagcagcagccaccgccgccaccgccgcagccacagccacagccccaggcaggccccagactccccccacggcagcccaccgtggcctcctccgcggagtccgatgaggaaaaccggcagaagaccaggccacgaaccaaaatttccgtggaagccctggggatccttcagagtttcatccaagatgtgggcctgtacccagatgaagaggctatccagactctgtctgcacagctggacctcccgaagtacaccatcatcaagttctttcagaaccagcggtactaccttaagcaccatggcaagctgaaggacaactccggcttggaggtggatgtggccgagtacaaagatgaggagttgcttaaggatttggaagagagcgtccaggataaaaacgccaacacccttttctcagtgaaactagaggaagagctgtcggtggaagggagcacagacgttaatgccgacttgaaagactgagagaacagtattcttttcagccacaccaccggtatttcctaacaacatgagaagtccaccttgtgttcactcagacaaaccttcattgtttattgtttggccaatgaatcttcggaaacttgcacaaacaggaaggaagttggaaggacaggacagccagcactcaaggttttactgtgttttacaaaactgcttggcagccccgggtgaagcgtcaaggactgtttggtagaatttgtgttcaagggctgcacccaggtgttgtaccctgtcagcatgataccagaaattggttttccttttgattattattattctggagcctcaaataagcattataacttctgtggttatgattgccttttctttagtaattcttctgtaacccgccacactagtctttggaaactggccccttattttaaagagaaaaagaaaaaaaaaaagagagagagagagtttgttactcgattgtatgttaaaaaaaagaactatagactgtggaatgcagtttaaagatgacatatgccaacaaatgccttgtattgtatggcactgccgtaattaaaatttgtttttttattttggaaataaaagttcactgtaatttttttcatcctcattattacatgattttttttttaaggaaaagaaaatgtgaaacacaatttagtccttgttatttatttgtagctcctgcagcatcatgtcataattaagttttttggagatttctgttaaatgtaatgttgctttcccatcctgatttcctttctatttataactgtattttgatgggcagtaaaacaaagtgtcttaaaagttttaaatagagaaaaatgtgctttacacagttgcctataaaaagtctatgttatccaagcaattcactctagaagcttcggtctcgttgttgtatgcaatttttactatcatgcaaataagcttaggtaaataaaactaatagatcaccttagaaaattatgcaattaatgtgaaaataattgatgtttgcaatgtgtcttcctttggtttacaatcaattttaaagcgacatctgtataaagtttctgtataaaggtgtatttcttttttatgagtttatggctatgaaaacaccagctattttgttacagctgctgtttttataagtgtatcacagttttctttatgcagaaatgtgctgattaggagtggttattgactgtaagtacacgattaaaattgtttgtatggtatgacatggcagggtttgtctgcttatgtgaagtaacttgagccaggctcaaggacggctgtcatgtaggtgcatgctcacgctttcttggtgatagcttgtgggttctgaaaagcaactgaacactccctgagatactcaattcaagctacacatatgctcagttttcaatagttatggaattccacaatgcagatgataatctgcttttgcttattacaccagacagtcaaagactccagcagaaatattactgtagcagttaagtacttgagatggccatatctgctttttctgtacaatcctccagttagggcaatattttcttcaagctagggtacattttttttaaaagccatcaatagcagcatgaacaagggaacgcatgggccttccgtgcgagaatcctttgcaggaaacagtttaggggaggggcttgtttgctggtgatttgttttacaagtcataggtaggcaaggtgaacatggactgcctttgtcaaaactgagaaccacatgaagatagtaggaggcagagccctggactccaagtctaaactgctgcatcatggcccaggctggtgtgctgtggctggctccagagaaactttcgtaggctgtgtttttctgtcttttgtatccctttgttagggttcccgtgttgatggggatatttaggtttgtggagccaggctctgtagctactgtcttccgggggagcatttcctcaggcctgggcagctccattctggtggctgcagggctttcctggtggtctaaatgggctccttgaaaactccactgagggatttacttcgaagcacagctgagcaccttggaaggctgctgttctgctgcaaactaatttctgattcttaagtgagagagaaaacaatgcaaactttcttgttcgctggagttgagcaaagtaattacttgagccaaaggcatttgaacggagataatgcaagctaattttaaatgttaaaaacaacaacaacaacaaaacccccaaaacaagtaacatgctgctaaccacagattatcatctgtggcctccttttcccagatttaagaatggatggagcatcatgtagaattgatgccttttttatttaaaacagcccaacacttaagatatcagataggtgtaaaattcaatagttatttagaaggaggaagatttttcctgttcctaacagtctgagttattttgaattgatgtatccaaggaaatgagtgtgttggaaagcaacaccattgtgccagcaaaattatcagatttttaaaatttcaggtcagcatggttttgttactttagaataaagcacatgtttgcaagccacgatggtcacaatggagtgggcaaaactgttgaagacagcgtatttcagaagatttcccctagtgatccacattgtccccagctcccaacgtcattgtcacccatgtgtctctggttgcctatggctgttggtaaaattcctttaacaagcttcattgtgtcccagcgtttcggctgggcatgacatagtgctttgtgctgttagaaccttagcagagtcaggtaatttccgggtagtagtcagttgtgtgcatctgagtctgtcatagcatcctacactcagcactttgccactaatttgtattacactctgtggccatataatacctgcacattatgcaaaaaatgttgttgacagtatcttcttgccacacaatatgcagagttgacacataacctttgaaaacaaaggtgactagtatgtgtgccctacctgtgtggcacttagtaacaaagtctgtacatatgtataaaatgcgtattgactggcatttagtactatgaaattctgagcttaagcgtctgcccctagtagtatctatagttaacaatgcatattgaaaatacatagcttaaataaaaaaaaatttaaatggttcagaagtgattggaaatgagtgtcccacacctgctattattaaattcttccctggtcccagttgttcacatttggctaacaaggtccttgattgtcacagtattttcaataaatgagctattatgaactgcctggtgatattttcagcaagagcaactaaaatgtgtatggcctgtgctatatagccatggaggagatgggactgtgctaaagccagccagaaatgtggatggcagtgtgggaacccagcagctccatagccatcaaaaaacggtcatagaaagaagtctctcaagggcctattcttggattcagtgttccctcagaagcaatcctttaaatgtaaatagtgaatacttgcatgtctttggacaaaagctgagctacaatctattaaaatgcacaatttttgataaaatataaagtgccctctaacaaaatgtggtggaaggtgtgtgttaagaatactatacctgtttaacaataccatatgctaaataaaaatagtttggaattaatgtttaaaacatgagcaa

SEQ ID NO: 253 - DNA, 6304 bp, Mus musculus
tcaagttgccattaacttccgcggcggccgccagctcggcggcggggaggtggcagcagctgcagccgccgcccgggaagtccgccgcccggcgcgcccgcgcggggagccgacccggcctcggcccgcaccgctggcccgcgctgtcccggttccacgcctgattctggcaggtgatctgtaagacagtgactgagtatggatcatttgaacgaggcaactcaggggaaagaacattcagaaatgtctaacaatgtgagtgatccgaagggtccacccgccaagattgcccgcctggagcagaacgggagccctctaggaagaggaaggcttgggagcacaggtggaaagatgcagggagtgcctttaaaacactcgggccatctcatgaaaaccaaccttaggaaaggaaccatgttaccagttttctgcgtggtggaacattatgaaaacgccattgagtatgattgcaaggaggagcacgcggaatttgtattggtgagaaaggatatgcttttcaaccagctgatagagatggcgttgctgtctctaggctattcacacagctctgctgcccaagccaaagggctcatccaggttgggaagtggaatccagttccactgtcgtatgtgacagatgcccctgatgccacggtggcagacatgcttcaagatgtgtatcatgtggtcaccctcaaaattcagttacacagttgccctaaactagaagacttgcctcctgaacaatggtcgcacaccacagtaaggaatgctctgaaggacttactgaaagatatgaaccagagttcgttggccaaggagtgccccctttcacagagcatgatctcctccattgtgaacagcacgtactatgcaaatgtctcagcagcaaaatgtcaagaatttggaaggtggtacaaacatttcaagaagacaaaggatatgatggttgagatggatagtctgtctgaactatcccagcaaggtgccaaccacgtcaattttggccagcagcctgtcccaggaaacacagctgagcagcctccatcccctgcgcagctctctcacggcagtcagccctctgtccggacccctcttccgaacctgcaccctgggcttgtgtcaacaccgatcagtcctcagctggtcaaccaacagctggtgatggctcagttgctgaaccagcagtatgcagtgaacagactcttagcccagcagtccttaaaccaacagtacttgaaccaccctccccctgtcagtaggtctatgaacaagcctttggagcagcaagtttccacaaacacggaggtctcttctgaaatctaccagtgggtgcgggatgaactgaaacgagccggaatctcacaggcagtatttgcacgcgtggcttttaaccgaactcagggattgctttctgaaatcctccgaaaggaagaggaccccaagactgcatcccagtctctgctggtaaaccttcgggctatgcagaatttcttacagttgccggaagccgaaagagaccggatataccaggatgagagggaaaggagcttgaacgcagcctcagccatgggtcctgccccgctgctgagcacaccacccagccgccctccccaggtgaaaacagctacccttgccactgagagaaatgggaagccagagaacaatactatgaacattaatgcctccatttatgacgagattcagcaggaaatgaagcgtgctaaagtgtcccaagcactgtttgcaaaggttgccgccacaaaaagccagggatggctgtgtgagctgttgcgctggaaagaagatccttctccagaaaacaggaccctgtgggagaacctgtcgatgatccgaagattcctcagtctgcctcagcctgagcgcgatgccatctatgagcaggagagcaatgctgtgcatcaccatggcgacagacctccccacatcatccacgttccagcagaacagattcagagcctctctcccagcacccttgggaaaggagagtctagaggcgttttcttaccaagcctgctgacccctgcaccatggccccatgctgcccctcagcagcagcaacagcagcagcagcaacagcagcagcagcagcagccaccgccgccaccgccgcagccacagccacagccccaggcaggccccagactccccccacggcagcccaccgtggcctcctccgcggagtccgatgaggaaaaccggcagaagaccaggccacgaaccaaaatttccgtggaagccctggggatccttcagagtttcatccaagatgtgggcctgtacccagatgaagaggctatccagactctgtctgcacagctggacctcccgaagtacaccatcatcaagttctttcagaaccagcggtactaccttaagcaccatggcaagctgaaggacaactccggcttggaggtggatgtggccgagtacaaagatgaggagttgcttaaggatttggaagagagcgtccaggataaaaacgccaacacccttttctcagtgaaactagaggaagagctgtcggtggaagggagcacagacgttaatgccgacttgaaagactgagagaacagtattcttttcagccacaccaccggtatttcctaacaacatgagaagtccaccttgtgttcactcagacaaaccttcattgtttattgtttggccaatgaatcttcggaaacttgcacaaacaggaaggaagttggaaggacaggacagccagcactcaaggttttactgtgttttacaaaactgcttggcagccccgggtgaagcgtcaaggactgtttggtagaatttgtgttcaagggctgcacccaggtgttgtaccctgtcagcatgataccagaaattggttttccttttgattattattattctggagcctcaaataagcattataacttctgtggttatgattgccttttctttagtaattcttctgtaacccgccacactagtctttggaaactggccccttattttaaagagaaaaagaaaaaaaaaaagagagagagagagtttgttactcgattgtatgttaaaaaaaagaactatagactgtggaatgcagtttaaagatgacatatgccaacaaatgccttgtattgtatggcactgccgtaattaaaatttgtttttttattttggaaataaaagttcactgtaatttttttcatcctcattattacatgattttttttttaaggaaaagaaaatgtgaaacacaatttagtccttgttatttatttgtagctcctgcagcatcatgtcataattaagttttttggagatttctgttaaatgtaatgttgctttcccatcctgatttcctttctatttataactgtattttgatgggcagtaaaacaaagtgtcttaaaagttttaaatagagaaaaatgtgctttacacagttgcctataaaaagtctatgttatccaagcaattcactctagaagcttcggtctcgttgttgtatgcaatttttactatcatgcaaataagcttaggtaaataaaactaatagatcaccttagaaaattatgcaattaatgtgaaaataattgatgtttgcaatgtgtcttcctttggtttacaatcaattttaaagcgacatctgtataaagtttctgtataaaggtgtatttcttttttatgagtttatggctatgaaaacaccagctattttgttacagctgctgtttttataagtgtatcacagttttctttatgcagaaatgtgctgattaggagtggttattgactgtaagtacacgattaaaattgtttgtatggtatgacatggcagggtttgtctgcttatgtgaagtaacttgagccaggctcaaggacggctgtcatgtaggtgcatgctcacgctttcttggtgatagcttgtgggttctgaaaagcaactgaacactccctgagatactcaattcaagctacacatatgctcagttttcaatagttatggaattccacaatgcagatgataatctgcttttgcttattacaccagacagtcaaagactccagcagaaatattactgtagcagttaagtacttgagatggccatatctgctttttctgtacaatcctccagttagggcaatattttcttcaagctagggtacattttttttaaaagccatcaatagcagcatgaacaagggaacgcatgggccttccgtgcgagaatcctttgcaggaaacagtttaggggaggggcttgtttgctggtgatttgttttacaagtcataggtaggcaaggtgaacatggactgcctttgtcaaaactgagaaccacatgaagatagtaggaggcagagccctggactccaagtctaaactgctgcatcatggcccaggctggtgtgctgtggctggctccagagaaactttcgtaggctgtgtttttctgtcttttgtatccctttgttagggttcccgtgttgatggggatatttaggtttgtggagccaggctctgtagctactgtcttccgggggagcatttcctcaggcctgggcagctccattctggtggctgcagggctttcctggtggtctaaatgggctccttgaaaactccactgagggatttacttcgaagcacagctgagcaccttggaaggctgctgttctgctgcaaactaatttctgattcttaagtgagagagaaaacaatgcaaactttcttgttcgctggagttgagcaaagtaattacttgagccaaaggcatttgaacggagataatgcaagctaattttaaatgttaaaaacaacaacaacaacaaaacccccaaaacaagtaacatgctgctaaccacagattatcatctgtggcctccttttcccagatttaagaatggatggagcatcatgtagaattgatgccttttttatttaaaacagcccaacacttaagatatcagataggtgtaaaattcaatagttatttagaaggaggaagatttttcctgttcctaacagtctgagttattttgaattgatgtatccaaggaaatgagtgtgttggaaagcaacaccattgtgccagcaaaattatcagatttttaaaatttcaggtcagcatggttttgttactttagaataaagcacatgtttgcaagccacgatggtcacaatggagtgggcaaaactgttgaagacagcgtatttcagaagatttcccctagtgatccacattgtccccagctcccaacgtcattgtcacccatgtgtctctggttgcctatggctgttggtaaaattcctttaacaagcttcattgtgtcccagcgtttcggctgggcatgacatagtgctttgtgctgttagaaccttagcagagtcaggtaatttccgggtagtagtcagttgtgtgcatctgagtctgtcatagcatcctacactcagcactttgccactaatttgtattacactctgtggccatataatacctgcacattatgcaaaaaatgttgttgacagtatcttcttgccacacaatatgcagagttgacacataacctttgaaaacaaaggtgactagtatgtgtgccctacctgtgtggcacttagtaacaaagtctgtacatatgtataaaatgcgtattgactggcatttagtactatgaaattctgagcttaagcgtctgcccctagtagtatctatagttaacaatgcatattgaaaatacatagcttaaataaaaaaaaatttaaatggttcagaagtgattggaaatgagtgtcccacacctgctattattaaattcttccctggtcccagttgttcacatttggctaacaaggtccttgattgtcacagtattttcaataaatgagctattatgaactgcctggtgatattttcagcaagagcaactaaaatgtgtatggcctgtgctatatagccatggaggagatgggactgtgctaaagccagccagaaatgtggatggcagtgtgggaacccagcagctccatagccatcaaaaaacggtcatagaaagaagtctctcaagggcctattcttggattcagtgttccctcagaagcaatcctttaaatgtaaatagtgaatacttgcatgtctttggacaaaagctgagctacaatctattaaaatgcacaatttttgataaaatataaagtgccctctaacaaaatgtggtggaaggtgtgtgttaagaatactatacctgtttaacaataccatatgctaaataaaaatagtttggaattaatgtttaaaacatgagcaa

SEQ ID NO: 254 - protein, 792 aa, Mus musculus
MDHLNEATQGKEHSEMSNNVSDPKGPPAKIARLEQNGSPLGRGRLGSTGGKMQGVPLKHSGHLMKTNLRKGTMLPVFCVVEHYENAIEYDCKEEHAEFVLVRKDMLFNQLIEMALLSLGYSHSSAAQAKGLIQVGKWNPVPLSYVTDAPDATVADMLQDVYHVVTLKIQLHSCPKLEDLPPEQWSHTTVRNALKDLLKDMNQSSLAKECPLSQSMISSIVNSTYYANVSAAKCQEFGRWYKHFKKTKDMMVEMDSLSELSQQGANHVNFGQQPVPGNTAEQPPSPAQLSHGSQPSVRTPLPNLHPGLVSTPISPQLVNQQLVMAQLLNQQYAVNRLLAQQSLNQQYLNHPPPVSRSMNKPLEQQVSTNTEVSSEIYQWVRDELKRAGISQAVFARVAFNRTQGLLSEILRKEEDPKTASQSLLVNLRAMQNFLQLPEAERDRIYQDERERSLNAASAMGPAPLLSTPPSRPPQVKTATLATERNGKPENNTMNINASIYDEIQQEMKRAKVSQALFAKVAATKSQGWLCELLRWKEDPSPENRTLWENLSMIRRFLSLPQPERDAIYEQESNAVHHHGDRPPHIIHVPAEQIQSLSPSTLGKGESRGVFLPSLLTPAPWPHAAPQQQQQQQQQQQQQQQPPPPPPQPQPQPQAGPRLPPRQPTVASSAESDEENRQKWRTKISVEALGILQSFIQDVGPDEEAIQTLSAQLDLPKYTIIKFFQNQRYYLKHHGKLKDNSGLEVDVAEYKDEELLKDLEESVQDKNANTLFSVKLEEELSVEGSTDVNADLKD

SEQ ID NO: 255 - DNA, 6208 bp, Mus musculus
tcaagttgccattaacttccgcggcggccgccagctcggcggcggggaggtggcagcagctgcagccgccgcccgggaagtccgccgcccggcgcgcccgcgcggggagccgacccggcctcggcccgcaccgctggcccgcgctgtcccggttccacgcctgattctggcaggtgatctgtaagacagtgactgagtatggatcatttgaacgaggcaactcaggggaaagaacattcagaaatgtctaacaatgtgagtgatccgaagggtccacccgccaagattgcccgcctggagcagaacgggagccctctaggaagaggaaggcttgggagcacaggtggaaagatgcagggagtgcctttaaaacactcgggccatctcatgaaaaccaaccttaggaaaggaaccatgttaccagttttctgcgtggtggaacattatgaaaacgccattgagtatgattgcaaggaggagcacgcggaatttgtattggtgagaaaggatatgcttttcaaccagctgatagagatggcgttgctgtctctaggctattcacacagctctgctgcccaagccaaagggctcatccaggttgggaagtggaatccagttccactgtcgtatgtgacagatgcccctgatgccacggtggcagacatgcttcaagatgtgtatcatgtggtcaccctcaaaattcagttacacagttgccctaaactagaagacttgcctcctgaacaatggtcgcacaccacagtaaggaatgctctgaaggacttactgaaagatatgaaccagagttcgttggccaaggagtgccccctttcacagagcatgatctcctccattgtgaacagcacgtactatgcaaatgtctcagcagcaaaatgtcaagaatttggaaggtggtacaaacatttcaagaagacaaaggatatgatggttgagatggatagtctgtctgaactatcccagcaaggtgccaaccacgtcaattttggccagcagcctgtcccaggaaacacagctgagcagcctccatcccctgcgcagctctctcacggcagtcagccctctgtccggacccctcttccgaacctgcaccctgggcttgtgtcaacaccgatcagtcctcagctggtcaaccaacagctggtgatggctcagttgctgaaccagcagtatgcagtgaacagactcttagcccagcagtccttaaaccaacagtacttgaaccaccctccccctgtcagtaggtctatgaacaagcctttggagcagcaagtttccacaaacacggaggtctcttctgaaatctaccagtgggtgcgggatgaactgaaacgagccggaatctcacaggcagtatttgcacgcgtggcttttaaccgaactcagggattgctttctgaaatcctccgaaaggaagaggaccccaagactgcatcccagtctctgctggtaaaccttcgggctatgcagaatttcttacagttgccggaagccgaaagagaccggatataccaggatgagagggaaaggagcttgaacgcagcctcagccatgggtcctgccccgctgctgagcacaccacccagccgccctccccaggtgaaaacagctacccttgccactgagagaaatgggaagccagagaacaatactatgaacattaatgcctccatttatgacgagattcagcaggaaatgaagcgtgctaaagtgtcccaagcactgtttgcaaaggttgccgccacaaaaagccagggatggctgtgtgagctgttgcgctggaaagaagatccttctccagaaaacaggaccctgtgggagaacctgtcgatgatccgaagattcctcagtctgcctcagcctgagcgcgatgccatctatgagcaggagagcaatgctgtgcatcaccatggcgacagacctccccacatcatccacgttccagcagaacagattcagcagcagcaacagcagcagcagcaacagcagcagcagcagcagccaccgccgccaccgccgcagccacagccacagccccaggcaggccccagactccccccacggcagcccaccgtggcctcctccgcggagtccgatgaggaaaaccggcagaagaccaggccacgaaccaaaatttccgtggaagccctggggatccttcagagtttcatccaagatgtgggcctgtacccagatgaagaggctatccagactctgtctgcacagctggacctcccgaagtacaccatcatcaagttctttcagaaccagcggtactaccttaagcaccatggcaagctgaaggacaactccggcttggaggtggatgtggccgagtacaaagatgaggagttgcttaaggatttggaagagagcgtccaggataaaaacgccaacacccttttctcagtgaaactagaggaagagctgtcggtggaagggagcacagacgttaatgccgacttgaaagactgagagaacagtattcttttcagccacaccaccggtatttcctaacaacatgagaagtccaccttgtgttcactcagacaaaccttcattgtttattgtttggccaatgaatcttcggaaacttgcacaaacaggaaggaagttggaaggacaggacagccagcactcaaggttttactgtgttttacaaaactgcttggcagccccgggtgaagcgtcaaggactgtttggtagaatttgtgttcaagggctgcacccaggtgttgtaccctgtcagcatgataccagaaattggttttccttttgattattattattctggagcctcaaataagcattataacttctgtggttatgattgccttttctttagtaattcttctgtaacccgccacactagtctttggaaactggccccttattttaaagagaaaaagaaaaaaaaaaagagagagagagagtttgttactcgattgtatgttaaaaaaaagaactatagactgtggaatgcagtttaaagatgacatatgccaacaaatgccttgtattgtatggcactgccgtaattaaaatttgtttttttattttggaaataaaagttcactgtaatttttttcatcctcattattacatgattttttttttaaggaaaagaaaatgtgaaacacaatttagtccttgttatttatttgtagctcctgcagcatcatgtcataattaagttttttggagatttctgttaaatgtaatgttgctttcccatcctgatttcctttctatttataactgtattttgatgggcagtaaaacaaagtgtcttaaaagttttaaatagagaaaaatgtgctttacacagttgcctataaaaagtctatgttatccaagcaattcactctagaagcttcggtctcgttgttgtatgcaatttttactatcatgcaaataagcttaggtaaataaaactaatagatcaccttagaaaattatgcaattaatgtgaaaataattgatgtttgcaatgtgtcttcctttggtttacaatcaattttaaagcgacatctgtataaagtttctgtataaaggtgtatttcttttttatgagtttatggctatgaaaacaccagctattttgttacagctgctgtttttataagtgtatcacagttttctttatgcagaaatgtgctgattaggagtggttattgactgtaagtacacgattaaaattgtttgtatggtatgacatggcagggtttgtctgcttatgtgaagtaacttgagccaggctcaaggacggctgtcatgtaggtgcatgctcacgctttcttggtgatagcttgtgggttctgaaaagcaactgaacactccctgagatactcaattcaagctacacatatgctcagttttcaatagttatggaattccacaatgcagatgataatctgcttttgcttattacaccagacagtcaaagactccagcagaaatattactgtagcagttaagtacttgagatggccatatctgctttttctgtacaatcctccagttagggcaatattttcttcaagctagggtacattttttttaaaagccatcaatagcagcatgaacaagggaacgcatgggccttccgtgcgagaatcctttgcaggaaacagtttaggggaggggcttgtttgctggtgatttgttttacaagtcataggtaggcaaggtgaacatggactgcctttgtcaaaactgagaaccacatgaagatagtaggaggcagagccctggactccaagtctaaactgctgcatcatggcccaggctggtgtgctgtggctggctccagagaaactttcgtaggctgtgtttttctgtcttttgtatccctttgttagggttcccgtgttgatggggatatttaggtttgtggagccaggctctgtagctactgtcttccgggggagcatttcctcaggcctgggcagctccattctggtggctgcagggctttcctggtggtctaaatgggctccttgaaaactccactgagggatttacttcgaagcacagctgagcaccttggaaggctgctgttctgctgcaaactaatttctgattcttaagtgagagagaaaacaatgcaaactttcttgttcgctggagttgagcaaagtaattacttgagccaaaggcatttgaacggagataatgcaagctaattttaaatgttaaaaacaacaacaacaacaaaacccccaaaacaagtaacatgctgctaaccacagattatcatctgtggcctccttttcccagatttaagaatggatggagcatcatgtagaattgatgccttttttatttaaaacagcccaacacttaagatatcagataggtgtaaaattcaatagttatttagaaggaggaagatttttcctgttcctaacagtctgagttattttgaattgatgtatccaaggaaatgagtgtgttggaaagcaacaccattgtgccagcaaaattatcagatttttaaaatttcaggtcagcatggttttgttactttagaataaagcacatgtttgcaagccacgatggtcacaatggagtgggcaaaactgttgaagacagcgtatttcagaagatttcccctagtgatccacattgtccccagctcccaacgtcattgtcacccatgtgtctctggttgcctatggctgttggtaaaattcctttaacaagcttcattgtgtcccagcgtttcggctgggcatgacatagtgctttgtgctgttagaaccttagcagagtcaggtaatttccgggtagtagtcagttgtgtgcatctgagtctgtcatagcatcctacactcagcactttgccactaatttgtattacactctgtggccatataatacctgcacattatgcaaaaaatgttgttgacagtatcttcttgccacacaatatgcagagttgacacataacctttgaaaacaaaggtgactagtatgtgtgccctacctgtgtggcacttagtaacaaagtctgtacatatgtataaaatgcgtattgactggcatttagtactatgaaattctgagcttaagcgtctgcccctagtagtatctatagttaacaatgcatattgaaaatacatagcttaaataaaaaaaaatttaaatggttcagaagtgattggaaatgagtgtcccacacctgctattattaaattcttccctggtcccagttgttcacatttggctaacaaggtccttgattgtcacagtattttcaataaatgagctattatgaactgcctggtgatattttcagcaagagcaactaaaatgtgtatggcctgtgctatatagccatggaggagatgggactgtgctaaagccagccagaaatgtggatggcagtgtgggaacccagcagctccatagccatcaaaaaacggtcatagaaagaagtctctcaagggcctattcttggattcagtgttccctcagaagcaatcctttaaatgtaaatagtgaatacttgcatgtctttggacaaaagctgagctacaatctattaaaatgcacaatttttgataaaatataaagtgccctctaacaaaatgtggtggaaggtgtgtgttaagaatactatacctgtttaacaataccatatgctaaataaaaatagtttggaattaatgtttaaaacatgagcaa

SEQ ID NO: 256 - protein, 760 aa, Mus musculus
MDHLNEATQGKEHSEMSNNVSDPKGPPAKIARLEQNGSPLGRGRLGSTGGKMQGVPLKHSGHLMKTNLRKGTMLPVFCVVEHYENAIEYDCKEEHAEFVLVRKDMLFNQLIEMALLSLGYSHSSAAQAKGLIQVGKWNPVPLSYVTDAPDATVADMLQDVYHVVTLKIQLHSCPKLEDLPPEQWSHTTVRNALKDLLKDMNQSSLAKECPLSQSMISSIVNSTYYANVSAAKCQEFGRWYKHFKKTKDMMVEMDSLSELSQQGANHVNFGQQPVPGNTAEQPPSPAQLSHGSQPSVRTPLPNLHPGLVSTPISPQLVNQQLVMAQLLNQQYAVNRLLAQQSLNQQYLNHPPPVSRSMNKPLEQQVSTNTEVSSEIYQWVRDELKRAGISQAVFARVAFNRTQGLLSEILRKEEDPKTASQSLLVNLRAMQNFLQLPEAERDRIYQDERERSLNAASAMGPAPLLSTPPSRPPQVKTATLATERNGKPENNTMNINASIYDEIQQEMKRAKVSQALFAKVAATKSQGWLCELLRWKEDPSPENRTLWENLSMIRRFLSLPQPERDAIYEQESNAVHHHGDRPPHIIHVPAEQIQQQQQQQQQQQQQQQPPPPPPQPQPQPQAGPRLPPRQPTVASSAESDEENRQKWRTKISVEALGILQSFIQDVGPDEEAIQTLSAQLDLPKYTIIKFFQNQRYYLKHHGKLKDNSGLEVDVAEYKDEELLKDLEESVQDKNANTLFSVKLEEELSVEGSTDVNADLKD

SEQ ID NO: 257 - DNA, 97568 bp, Homo sapiens
  misc_feature (1)...(97568): n = A,T,C or G
cagccaccgccgcccccaacgtccatgcctgagtgagttctgctcttttgcctcccttttccccttgctactcttgctgttttatctctgtccctctttttccggaatcaatccaaacttctccgtagcacccactcctcgtcccctattggggcggctgggctcccctctcgtgggcgcagggcttcaacggtcttccgagccccttttctcacgcagacggaccttggaggggtgggctggtagagtaggggagagcggtcgggatgggggatttgaagatgccattcgttttctgtctgggtgtggacacaccaccacacctgcccaatagaccctggctgaacaaactccttcaggtcaccggtatggccccttttagaaaaggaaaggggagtggaaaagaccgaaggaagcaaatggggaaaaggggagcctctcggtgcgttctggagccgggcgggcagtaaggtgcctggaggagtgggctgcgggagtggtaatgttcccccaccggatcgcgagtctgctcagcatcctttcccggtccatctccgcctccctccgctccctgcctgcgcggctgattgtaagcatcggcgaagaggggcctgggaagtttgtggcaacttctgcatcccgggagctactcgggcgccggggcgctcaagttggagcccggagtttgaaagccgcggcactcctcatttcgagccctcgctggctgtagcgaggccggtcctggagaggctgctggcgtgaatgtgggtttggagttgggcaagaggcagaagaaagggccgtcctcttagcaggggccgggacatcacaggtgcagcctcgcagtccacaccgtgtttccctcctgctgtccagacccgagcgcggtggccttttcctattgctccagtgctaaggctcccgggccggcagaaccggggtttgggaaaccacgacgagaaggacgaagcaggcaggtggcaggtccggggagtgccacgtgcttactggggaaacgcagtttcctcttgggatgacctcagaagaccaacaggggaaaggggcatagggatctccttgaaagttttggccttggcctccactgaggtgttgcaaatttcactaacaaatgtcaaccacagggtcctctctcaaagtgtcctggttggcaactttgacctctgcgcccttccttggcgaactttctcagtggcattccggacttacaagcaaatgttctaagacttggactccacatggttataaaagagacagggaaaacagaaggatgccctattccccagagagaaccttactgctctgactgactgggtttccatgtttgcatccttggaggccaggggacctgactttctcaagggggtggcgggtagggtaagaatgagtaaaatgttaccgctcggtgtcaggttttgtcctaagcaatctgaaatttacggtgtttgtactgctgacagagtaactcatcccgttgaaacttagttgaaatttacactctatccaaagtggatttttctgagatgtcaggaatgtgagatttattctgtggtcaaatgtagctgcaaaaatcaaaaacaaaaacccatactttaagtctgaagaaaaccaaggttgaggtgtttgctctaaaaacctctcatctcctgtatggtactactgctatgatttagcagtagtcctctatttctattgcatattattttcttagaacagtagtacattcatatactggctgctccagtctgctggcaaacattagcattcaagcttacatttttgacaaatgtgcagacaggaatagcatgaataggcatcttaaatattaacaacctaagcatctgttgtgaaacaaatttaatatatttactctgtttttctcacattgttagaaaaggttataataagtgcataatttcaactttagttagcagaagtaactggctgtatctttcactacctctccaagtgtttattacacaatcatcagacataaatactttaattaacttggttaagcacattattaaatacactgtagacaatgtgtatactatataaaatgtaacagtagcaaactatgtattctatttgtacacgttttaaatgactatgcattttataaatataccaaatatgtttattcttcatcttcatttgacacttactacttcatagttttttctaatgaaaacaatattttaaatgtagagttgttcagtcataggtaatacataatatttaaacagtagctataaaatacaaggcattgtcaaatttggataatgctacatctaacattatacaagagaaataaaattacaattcaattttgtatttatttctgaataatgaatataaataatatatgaaaaaataacgaatagggatttccctcctaaagtactacctccttaaaatttggtgggagggcaggatggggggcggggggaagatagagaaagaagacctaaataacttccaaaagtctgaatagttatttccagaatcaatgcattcctcactttcccacaagctgaaatatgtaataaataatagttctttgtatgtaaaagtattcaaaaggaatgttttttgttcagatttgtaagaaattaatatattctttggttgataatctacaaaagtagttcttttgtctcccagcatcttaagaacgacaacaaaatgaatattggtttatttctgcaaagaaatctgttgccagctatatgaacctgtgattaaataagacatgatatgctgagtgatggtaaagaaatactacattaacttagtaaagactaaaatatctggaggagaatttttagttctttttcatatgacaggttgtggattgtaaattaggcctaaaaggtcaggtgacaggcacctgttcctcattattgtaaaaatattttggttacaaacactgttaagctaaacacaacatggatatacagcagggactctataaagcactctagtgggttttcatctgttctgtaaatttccaaaagggctatacatagatatgccctttacacacatagtttcttccatacatattgtcttggatggctgtaattaatatattagcacttggaattgatgaagtatttaaaataaatgcatatgactaaagcaatcttcagactatttctagacatgatgtagttgaatgcaaaaatgtttttaatctcttttcccttttcaatatattgattatcagaattttgttcatgttataaatagaaacctccccagattgccttttacactttttagataagatgggttcttattttaaatgctgccacgaaatattttgctcagtactcatatataaaaagaaaattagttgctatatactgtcatagctttgtggcatacataaaatagaaaaaacacgttttacatgaatgctgttaggaaggatatcatcatttgatcttcaaacttgccgcttctctcaggagagttcagcaatatttctattggaattaaggaatggggtttgatttttatgaatggtttaccttcagatatttcagagagcagaataagcatacatattgaaaagaccaaagtggcacaaggctgcaaaatattaaaggtgccaggtgcttttaattaacaaatgaggactatctcgagtaaatcagataacttggattaagttctatgatatttcaaaatgtttttcgtctttttcagttttgtgtggtttgtgcttattatattaagtattcatttttagcatttgtgatcagattacagaacagtcattactcttgcttttcaaattgatttggttttcaaactccaaaactctgtgatgatttttacaaattggtttacattttgacagaacagagttaagttaattaatagatcaggcacgaaaaatcatccacagtagggtatattttctggtaaaatgaaagttatgtttcagcatgatgagcatcaggcttcagtaatctgttcctcgtgtggaatgaacacttcctacttcgagctagcaggcacctactgtttatttacgctgcattaaactgacagtgcagcaatcagaggaaaaatattacttaccttcctgaagtaaataccagtttatagtttagtgcacgtatttatattcctgtcaccactaaataacggctctgtctccattttaatatctacctgtgctataatccagggcttcagactcttcctggttggggataggggtcgagaggagtttttcttatcatttccctatggcaaaactttaaagacaagtaatttcatcttttcatttctgtcatgtgagaaccagttgaaagaaatgttatgcacttttactttgcatacctcaactataacatcaaaaccccaaaagaatctgcatgccacttaaaatagtcatcttaaagcaacctcaggataaatatgttcaaacacattcaaatgtgttttgctaaattaactttctacaaagttccaaaaagattaaactatttgattcctcagataataacttcaataaagtgtctcctcttccaagtcttagatggaatgtttaagtttttaatggagttctgaaaatatgaatataaagtggggctcattgattgatttattgattgactcgctaagcttttctctgaaaatattcttaactccttcatttgacttcttgttaatctgccatccttaaaataagggagatttctactttgttgtaatactaaatgtatttgttgtttttcttttatgataaaaatcctttctttttcaagacccctttgaaacatcaaaatactgttaaagttgaattccagaactcacaattaacttgagaaaaggcttattttcacttaaattatctaaaaagcggttacacttaactgtctatacacagttatcaatacctagtcacatattccactgacatcagggtagaatatggtcttaataacaacatataaatcaaatctgttacataaggttctccttcactacactgaagaaaaagtgtctactatagtaatttatatatcgttcctaaatgctgttctcagtggtaagtctatttaaacttgatgtcttcatagagtgtgatcaacacattaacacacattatttcatacttttgaacttatgccaatggtatcttttgctgtttatttttttaagtcttttttaagattagatatttcagagtaaatagatacagattgtgtgtgtatatattcagggtgagatttagtagtgtagcatttcttcaacatattggcctatttttatgctttcaagttattttgtatcacttttacagttgttgcagtttgaaagttcagaagcgaaattctaataacctctttcaatggactttcaaggatgtaattcagtttatgcggtgatgtagtttagttacaagagatgaaaattagttaactggtacctcaggatttatgtccctggtttctgctgaaatttattcagtccagttatttgacatttggtagagaagtggcttgtaatcaaaaattaagagttggttcagtttccagtggagaaaagatttcgctggataaaacatttaactgtgcaatattttattacactcctcactcattttagagcctgcttattgttgcacacatttttgaatacctaggggtgcaggtccccagatgaggctgaaatgcttgcggaagaagcagatgtcaggctgcacctcgctgtgcctttactagtacctatgtggacttaagctgcccgccccccgcacccctttcccccaggtgtgcaggaagtagagggcgttatactgggtgaagtgggtggactctacccagagctatgacctgatttgtgacgcaccctcagaactgcagtaatggtccagctgcttcacaggcaactggtaaccacctcatttggggatgtttctgccttgctagcagtgccagagagaacttcatcattgtcacctcatcaaagactactttttcagacatctcctgtagggctagattcagagagcagcttctgatatttggagggtaagtgccagaaaagttactgtaatgttacatgtggagaatcaggactccagccacagtgacagataggcattgagtgttcgggggagggctttctgttgggatgttgctttttctcagctctagaaaatttgggaccagatactaagaaaaattcttcagtgggcattcttttttgggtggtgagatacagtagcaagttcccagggagaattattagaccttcttgaaatatttaaagaaaaggtagtcagtaatctgtgtgagggggcattctttagatgcaattttcctggaagctaggcatgtagtagagttgattgctagagattcctctatagtcttattcattggttcctgatatgccattaagagcatgtaaatgacaatttggccttttaatgtttataatgttaaggactttaaggcaaaagaggttttatgttataaatattttattgtaataattattataaatagaacctagtgtatgcagatatctttgaaatggagatagtcttgaatatagcatatccataattagctgtttgatattgaatgcaattgagttttcctgttctagtgaaacagacaatggaaatcattggggattaacaacaaggctatgtgattcttgatatagcaagcctttctttcccccagaaaatattttatcaatgaatgaagtactaaattaagatgcatacagttttaaatttttaaaaaatctatagaatttgtaaaataatccaaatgcttcccattgtattttcaccaactgaaatgatacttagatgtactgtttaatggtagacagtgatctccagactgtgggaggaaaaaacaatattttaataactatgttttaaaaattttcttagagttgcatttccctttgggtggttcaagaggactcagaaacaatttagaacattatcttaaaagtttaacaatgacagtttgtatagaatcactgtattttaataatactgtatgcttattagtgttattagagcagtagacagttaattacagccttttctgagacatgttaactatatattaacaaccatgttaaaaaagaatgatgtatactcttaacatacaagcggctgcttgcttgattctttaaaaaaaatcttttagaatgtatggagtcagggttttggttcagaattatgaaaggttttctactaaagcaacttaattttaaaacttttcactgggttataaaatttttctcctgtttttttttctttccagtgtcattagaaattattgctcctcagtggttttagtttttccaaattgtattttgagatacccatgttttcttgttttttgatgacttcggccaacataatccattaaaagcttatttaattgattttgctcctcttaatacttctttttgtggaataattttagtcactttttctttagccaaattgtgattacttaaaactctatataacctaatattctacatacatttcagcagttaatcacagaggtagttctaagattatttcattgtctaaatctcaaacctggattttcactatggcttctagaatggcaaaacaatgggttactgaaactagagggatttaaagctggacttaggcttacttagacaattctatcaaattggttaactatttgagttatcttggttgatttgaatttgtagatcttgtaacctcgtaatatggctcttaaaaacgcactagtattcccactttctgaagtttgtagaagctgctatatatttctgtaagtattaaactacaaaaaagtaagtaagtaataaggtatgtctgtgttatataaaacagaaagttcatagttagcattctgtgccttgtacgtattgagcactcattaaagaattgctaaattaatgataaaatataaaatgtagcttgtgccgataaagatttattggcaaagagaattttctttctaattttctgtttttactagggttatctgaacacttaatctgcacatgcctcattttctggataattggatgattttttttttttttttttggtagcacctgggtctctgttctatcctcattgtctgaccttcagtattaggttaagtgtgcctgctcagcttcattctttggtgtttggttgtggtaacaaacaataccggagtcaaacagagcactcccctgagttccttgcaatttgagccaccaagtagccatccttctgatattccagaaccaaaaatattatggactagtgcctcaaggctgattgaccttctatgcgttctttcctacaataatgattgtttttcaggctcccattgaataaatactactgtaattattgcataaaaagatatttttcattgcagcttaaatacattgtttgaaaagtactctaagatttggagtgtttgtatatgaatattttactccattccttaaaactaattctgaaattgcagtagggttgtgttagctgcatccaaaatattctgaaaagttctaggcattctatgaaagttatctaaaaaagacacttccttttaaaatttattttcattttaaaatatgagtggggctgcttgtaagacagtcctatttagttacacaaaagacagaatttcttaagtggtgcactgctgtgtgacctattacattatcatgcacattctgtctctttaaaaacacagtctcctctatttgccctattaattgttgatatgttgccatccacgagacaaaaattagagctgtaattaaataatcatgtgatgctccttagtgccaatgagagcaaactcatttttccaggccctgatggtcactgattattgtattactactggcttgctttatttttttttaatgattctctatctgtagattacctaactactgtccttcttttcaaaattaaagaaagtagaaaacattcagccagttaattggctagaggtcctcagggacataaggtagacataccttttttgcttttggtcacctggtgggttctttggggaggctacatcagtggtgtggttgcctgccatttaatttacactggtgttttggctgggatggaggcatatggggaatgccaggagaattacaaaaggagccgggtattaaaattcagaaatgattaaaattgaaataaaaggatgctgcttctttgccagtactctggcagtcataatgacacatagagattagtttccaccttcatcttttccttctttctcatttcctcttgtttattgttgacacattttccttatgtctgtctcctgtctctgtatctttttgcaccattatgcattcctacttctccctctttctttaagcatggagaagcctacttaaccttattataacaataacagaataggttattaatatttaatatgcacatgattaaaatttctctcccttaaacataggtcagctgtattattactaaccggcatgtaatttttcatttaaaatattggtattctgccccatgccgtttctgaaatgcagtctactttagtagtgatttaatacacaacgtttagaaaattgtggtcggctagtgagaaaagaatttaccagtcatggataatcaattatgcatgaattcagatgtaacagatggaatctggtgagttaaagtttctctttgccttagcggttattttttttttttatttgtttgtttgacacctgtctcttatatagagataaacatctaacgtagcatgtgagaaatttccttatatttatattttctctttcaagtgaacttaatttttttaattgaagaaagagattttttatgtgatcttaaagatgatcagactctatccattcattttatagatacggaacctgatcctgcttaactaatgaaggatcactcagctagtgagtagagtaagaagcaagacccaaatctagtttctctatcttttctccactacttttcccactatgtgacttatgttcctttttgtgggagttacttaatagtaggggtattatactacctctgagttttaaaggctttctgatgaaaactgtggtagactagttttaaattgtggaatactctcttgtataacatgcaaatattatctgtgtacatataaaaatgttatgctatgtgtatattttatatatatatatatacttattcttacttggatgttggccaaacaattggatttttcaaatctattgagaatgccacaagatttggttttacatcctaaactgcggcatatgccagccttgaagatacatttacacttggttgcagtgttgtaaatttttagtgacaaaacccctttgcacaaagcgaaataaaaagttatttttgagagccttgttacctcaaagaagagatgagaggttaatttttattaaatataatgtgaatatgtagtgtttcttcaactgtaaaagtaatagaagaatagtggatattgacctttaaagcagtctagccttaaaacagaaagctggtttccatcaaaatttttcataaatgtgctatttgtttctctctcaagtgtatttatgtattaaataacacaaatgaaaagtctttgcaaaataaataaaaataaatgattaaaaaacagcctcaaggctctctagttcttttttaaagttctactgtggcattatttatcaactttttccttcatgttggctcaaaatgtccatgtatagtccatgctagttatctaataaatttttaaatgaacacattaataaagaaaaaggcacctacaagataggtaactggatatgccttaagcatagctatactgtgaagctgtcttttagtattttatttaatgcttttacacataataaatatatgtttgtaagttggtttcactttattagcattccttaattatgcgtataagaaaaaaatacagatacgaacttcaataaaatgatttatacatgaatttccaaatcattaaaaactccatcattaatacaagtttttaatataaaatccataggaatagatgatatgaaaactgaatgtggaacagtacaggaaaagatgatatttcaaattattatatgtagatatactttcatccttattactagcactaaaaaagtaactgagctgattaaatttgaaagcgtttttttaaacaaaattttcttttattaaaaaaatagaatctaaagtctttttatgtagacaatttgcaaattagtactttatacagttgttacaattgcagctgttctgcatatatgagcgtgacactcaaagtactgtgtaacagagaaaatctatttcatgcatatagttaatttttactgttttgaaaaacattccaaaagaattttttggacttaaggaactcctgtttgtttttgtctatgcgcctttctctttttttggctaagatattgtattgaataaaaccttaaaagagaaccattttcttacattgaaggaacctcaaagtgagtgggatcttggtctctaattaccaatccatgttaattatccttgggtcaggtattcatcatattaattgtgtagcatagactggactgtagctgttagcaggtaaggacaaagcaatgtaagattggggtggggatgggattgttcaatgtgatgtagctcattgtttctctgaggcttggcatgatattttcctggtattatatatctgccaatgctaggcatacatgaaagattgttttgcttttgtttttttttttttgaaaatgtttatatggtaaaatatgtgtaaaaaaatacgccattttgactgtttctaggtgtacaattcagtgacattaattacatacacactgttgtgcaaccatcaccacagtttgtttccaactctttttctatcagcccaaatacaatgtgctttagttttgaatttaatttctccttcacttcaacaaatttcaagtgttacagtagtatttaattattgtccaggtgtgaagcatttgtttctgatggtggctttccttccaacggacaatgcctcgtccagtgccttatggtggtgggcatagcagtacaatatcagatattgcctttggctgatgttgccacaaaaatgacctggacaaggattcaggaccattgttatcgcgaattctttctccctccaattaagctaggaaagattagaaataacattcatatcaactaaggaaatttggttgatatgtacatcttggttaaaagttgattgggaacagttgctgttcgatttcaccggaattaaaaattggaggattttacctcgagctttctgagaatattaaaggcacagcaactaggtctaggatgctttgcagttggctccttgacatggacagtctaaatactttggttctgttcaagtgcagtgacagtctggaaataagttgaacagttttcagcccttcaaagagaagcccactcaaggttgaacagttgtctgagagaaaaatcatgttatattgaaaaaagaattagaggaaacttggatggttctggctccagtaaataatagactggtttgagaactgtacttccatgtataattttgtggttagtcacttaatgtctatcatgataaataacatacctgcacaggatttctggcaccccagtaaatctcaaacaagtgcccaaatgctagtttattatggttcctcaaatagcatgtatttatttgccaaatcaatgatccagtagcttcctgcccccacttttattgcctttttagaaatttgaaacaagtagcttgcccacatatacatttctcaaattttggtctactgctggttcatacaacagcttagcttttccaagtgactccaggagtgagttaaaaaccacctcagagatgtcctgagtatttgattctctgtctctaaaacatcacctaacctggtagatgccaaacctggctgtatatgagaatcaccttgagagctttaaaaaactgaatgtcttctcctcatcctcagccattctgatttaattgcagtggggttcagcctggacatctggattgtgatctcagtacctggttttacgtcctaagattgtcaaagggaatgcagaaatatatacatgagtaaaccttcaagatgcttagagtcttgcagtttggagaggcagacatatagatagatatgaaatgtcacattgcattcaggcagtgtgatggagcatggagaaggaaataactaacaactggagaaggcttcggactgacaaggggaaatcaagctgcacattaaagaagatagcagaaaggaggtcctcaagtgagaagggacatgaagggcactccacgagctacaggaaaaaaatgaggcatctttgtggactctagggcaatttcaagaatccttccttcttcttactcgattttggatctgggtccagataaaggtaccaattttggtggaattattaccaccgtgccctgtcaaataagtgatccatactgacatccatggaaggaaaggtagctaaaagatttttttccaatgaagttcccaatgaaacagtattgtttctgagtaaaaggcccagatatcctgtcggtttccagaagccagctgcaatggctgctcgttttccctctccagatctcccaaaacaaacataaacattgggttttttccccctcaactataatgacctttgtctattaaaactgtatcatgaattaccactctgtatttacatctatgccaagtaattagggaaataacttttgatcgctatcattctagctaaaactgaaactcaacttcttaggggaagaaaacaaaaccaaaaaatccttaaaccctatatttagagttcattatcatcactcctttaactcgcctgcaacattttgaagctttttgccattattctctgcagtgcatcattatttgttatctggatgccctcccagttcgagtaggtatctacattaatgcttccagagaggcatttctaagggtagctatgcttatataatataggtacaggggtaagggtgggaatgactgtgatttttaacttcacctatgagatacttaaatgttcacggaaagcagcttttggagtaaacacattacttaaaatgtattacagaaccctttcaagtacagacatgtctagaaagttcttaaatttgtatttagcagtatacaggtatcatttcctgcaactttacagatctacaggctaattctaaaatggaaaattatcttgactcagatgtcattggaatgtctgaaagccatttagcacctctaagactcctcctggccaggtcttggattcccttagttgtcttttaaaggagttctctagggtaagcactgtccaatggaactttctgcagtgaggaagtgttctgtaatctacactgtccgctattagagtattagtcacatggggctattgagcacctgaaatgtgaatgaggaattaaatcataaatttcatttaaattaattcaaatttaaatgatatagccaccttcttcaatgttccctcttcctacaatcactttaaaaaactgtcaatgcaatttgtagtggaaattggttgcaagtgacactgtgagcttttgttcccatttattcatttataatataaatattacaaggacactgtataaattcctagtaatatggcagtgagcaagacacccagtctctgctctcatagggcttacagtctagtaagggagacatgtattaagccagtaattacccaaattgttaattaattaagactgtgatgactgtttcaaaggagaaatacaagattctgtgagggtatataatgggggccagaacttcttgcataattagtcagagagtttaatcagagttctaattattaactagacaagaaaagcatgaggcagcttcctttccccaagttcaaggctgggtcaggttggctgcaggaggcacagctctcagagtagggcagctagcatgtgccatgccatgacctccaaagaagtgggatctgtttaagacgtaggatcttaatctgattaagctctgtgcatacaaatactgcaaacttctgaacttgaacaagtagattgtttcccaaactgtatgcagttgtaatgatgtcggtcacagataatatgtgagaagaagcgtgcaatgtttacaggatattgcatttcttctccaatatatattttgacaaagttgtttgggctgcagccccagcttcttcctccctgctctttcaaattggtatttggtccattcaggaaacgatgcagaaatcggtcctgacatcccagacagacaaaatgagacacatgacagcaaaacatatggctcagacacacatccttatatggccaacagagaaccatattcccagaaattcatatatggaaaacaccacctgcagctaaagccaaaaaacaaagagttgacacgacaaaaagagcaatatgctacataaattgtgctgctttaagagtgtagagatagccaactgtatttgaatttaaaaagatgaaaaaagaaaaaaaaacatgtccttagaaagtgttatggtggtaagcattgctttgctaacacagtcactggcggagttgctatatcttaaaagcactcgaattctaaatgctttctctgtttattacaaatgtatgtgctattcagaactctgaatgtgttttaatgcgttcggatatctgcctgcatatttatcttaatacattgccatctgaaacatgcagtagtcctttcattaagtttttaaaaattttgtgtgtagccaggataatgccttctcatgtgatagaaaattgatgcactctgttttaaatgtgcatccacatgttaaatagttcatgtatttgaattgcaatattttatgttcctgaggttttctattttgatggccagacttataaagtttaactttcttcaatacttgcatgcatcattattgcttaatataagatccctgtattgaagttttttcctcctgccgtgatagtttatgttcacatatgcctaggaaggtggtattttcttaattattgctattatttgaatacttgtcctctccaaaactcatgttgaaatttaatccccaatgtggcaatactgagaggtggggcctttaagaggtgtttggatcatgtgggctttgctcttgtgaatggattaatccattcgtggattaatgggttaatggattaatgggttatcatgggagtgggactgttggctttgtaagaaaaggaagagagccctgagctagcatactcaagccccttgccatgtaatatccagtgccaccacaggactctgcagagaactcccactaggaagaaggccctcaccagatgaggcccctccacctggaatttctcagcctccacagtgtaagaaataaattccttttctttataaattacccaatttcaggtattctgttataaggaacagaaaacagactaagacaaatttctttctttttttgttatttatttttatctggctttacactggccaatactcagtggcttataatgaaatattctaaagggtagttaatatatagtaattaatttcatcagtgatgtataccactagtacattaacctctatgtgccattttacttatgtcatttcttatagttctggaataaaaaatgtgcttgagggaaagtttattgtgctatattgttattcattataatatagtcattcttagatgcctttatgctcatttattctgtttatcattttccaaggccatgtcagtccttattacatactttcatgttttgtgtttttgaatagatttgtgactcagataaaaggtgctattcaaatttaaggattgctgtattaattcccatattatattagcattcaccaggtcattaggagggtaaaacattcagatggcattttgtcttatttatttctgtaaaatgatgtaataagcatgtttacaatattttatttcagtctatcttaatattgatatttcccgtgatctttgtttagtggtgttttctcttagtttaaattttattttgcccaacagctttcttttcttttataaaaaacattcagcttgaggtgacattgcctggctaaattacatttgtgtgtgtgtggaccactataatttttctttatttttaaatgttgctattgtttgtaaatttgtacaacaaggcactagagtgcacagtccctactgaaaacaaggcaggtttcagggaaacatgtcaggcattactagtttgaagcaactattaaagtatccatattggaaatttcaaatttaacctaccatatttctatttcttatactttagctaacatatcttccttcagatttccccacattttaacttttaaaaatttactatcatttgggctttttactaaaaatttgccttaaatttcttttcctatttttgatgctgtgttttctgtttatcacatgttcattcttttgctcaaggcttgggtttgtgtgccaagattcacggttgccttcccagatttggctaacctttctggtttgtgggtgaaacgtgggtgctattagagtgatatattttcattttgtttctcctaaacttactctcccctaggaggccatcatttcctacacttttctgctttaccttttggcttttctttagatttgtaatgtaaacagtgtgcctaagagtgtattggtggctttacagagcttaatttgcaaatttcccttttatctcagtacttgtgctaacttgttgcttttttatgtgtaacaaaatgtttatctgactgatttttctcttttccctaccagcaaattctgaaaaataattcttgttttttgttaatgattaactgccttcagggtgctaaaatggtagaactaaaacctaagcgataaatgaggcatttctattttgggttacattgtaatattctttatttttacatgaactatatttaatagattgtctaaataataggatcatacttatgtggtaatgaccatttatctaactgggtaacctaccctagattacagcagaagtgtttattgctacaacagatgtatttaccaacccaaactttcctcttttgcctagcgtaaattatttgaagaatgatggcatcttttcctttataataacaagtcaggtctctttcaagtgacccaaattttgtttaactcggccacgtatttcttcttccaaagtattctatggctcagaagtgagggcgatttgaaccaacgtctgactagtacagaacgctcttactcagttctttctaatgttggctcctcatagtttaaggaccaccctccttagaggataaacattccgagcgtttcgaggctcctggcctttattgctgtacacgtttctgcaccctccgcgcttccccggagagaactgccttccgtctgtacccctccagccacttcctgatggctccctacctcattcctcagcgcctgtcacctgcgtacccgcgcccttctcccacggggccggtgcgtctccctgtccccccacctcgcctgtccctctgcgacgctccaggcgtactcctttttgtggcttttgtggcgtgtgggtggttggttagttttctcccctggccctcgccccctcctccccgtcattttccttccccccgccccccgtgcccgtcctgcccgtcctgcccctcctccctcccactcacacacctgcccctgccgcccgcgcgccgcgcgctcccctccccgctccggcggacgctgccagggaagccccctctcctcctcccctctgcgccctccctggcgcgtctggcggcggccggcgctagccctcgcacagcgccctgttattctgggtattgtgtgtaataaatgtcgggccgcctcactctaatcaagctcattacaaattcttgcgcgcccgnnnnnnnnnnnnnnnnnnnnnnnnnnnnnnnnnnnnnnnnnnnnnnnnnnnnnnnnnnnnnnnnnnnnnnnnnnnnnnnnnnnnnnnnnnnnnnnnnnnnnnnnnnnnnnnnnnnnnnnnnnnnnnnnnnnnnnnnnnnnnnnnnnnnnnnnnnnnnnnnnnnnnnnnnnnnnnnnnnnnnnnnnnnnnnnnnnnnnnnnnnnnnnnnnnnnnnnnnnnnnnnnnnnnnnnnnnnnnnnnnnnnnnnnnnnnnnnnnnnnnnnnnnnnnnnnnnnnnnnnnnnnnnnnnnnnnnnnnnnnnnnnnnnnnnnnnnnnnnnnnnnnnnnnnnnnnnnnnnnnnnnnnnnnnnnnnnnnnnnnnnnnnnnnnnnnnnnnnnnnnnnnnnnnnnnnnnnnnnnnnnnnnnnnnnnnnnnnnnnnnnnnnnnnnnnnnnnnnnnnnnnnnnnnnnnnnnnnnnnnnnnnnnnnnnnnnnnnnnnnnnnnnnnnnnnnnnnnnnnnnnnnnnnnnnnnnnnnnnnnnnnnnnnnnnnnnnnnnnnnnnnnnnnnnnnnnnnnnnnnnnnnnnnnnnnnnnnnnnnnnnnnnnnnnnnnnnnnnnnnnnnnnnnnnnnnnnnnnnnnnnnnnnnnnnnnnnnnnnnnnnnnnnnnnnnnnnnnnnnnnnnnnnnnnnnnnnnnnnnnnnnnnnnnnnnnnnnnnnnnnnnnnnnnnnnnnnnnnnnnnnnnnnnnnnnnnnnnnnnnnnnnnnnnnnnnnnnnnnnnnnnnnnnnnnnnnnnnnnnnnnnnnnnnnnnnnnnnnnnnnnnnnnnnnnnnnnnnnnnnnnnnnnnnnnnnnnnnnnnnnnnnnnnnnnnnnnnnnnnnnnnnnnnnnnnnnnnnnnnnnnnnnnnnnnnnnnnnnnnnnnnnnnnnnnnnnnntcttcctcctcctccccctccccccgaacctcttctctcctcacttgctgggaccccagacgctcacagccccgcgtcaatgggcagggagagggtccttgcggctgttgtcagcgagggcagaatcaaaagtggcattttagtgcctttccggggcttttctcgcgaccccctgccccccaccctcgctgtcccccgctagatgccctcgttgggggtgcgaggctgtggggaaaagtttaaggtttgttaatattagtcgcgattgttggcgaggggggtgggggtgattggaagggaggcgaggtggccttcccaatgcgcgttattcggggttattgaagaataatattgcaagtgacagccagaagtagactttctgtcctcacaccgaagaacccgagtgagcaggagggagggagagacgcgaagagaccttttttcctttttggagaccttgtccgcagtgatttttttttttttaagagaatcctcagtcaccacgtcgtttccccagcaccatcacagtgtacagctcataacgggttttgctttgtttttacgatttccccccaacgaatcacttgtcagatcaattttatcttcttcctcctccctgcttcccactctcccctcctccccatcgcaaaccccgttctctgaggttagacattttacaaacccctatatgttggttttcgaattgtgattttttttttaaacccctttctcatggctactcttctagacgtttatttctgcccttcccccgcttaggggggcgggggtaggggaaaggaaaataatacaatttcaggggaagtcgccttcaggtctgctgcttttttattttttttttttaattaaaaaaaaaaaggacatagaaaacatcagtcttgaacttctcttcaagaacccgggctgcaaaggaaatctcctttgtttttgttatttatgtgctgtcaagttttgaagtggtgagtttcaggtcggttttgctaatttcactcagtaaaactgcagtgtttctgtttctagatagtactttgcttctttgtctctttaaaaggtcacagtgaaagcttggcctggatcgtgccggccatatggaatggataagggcacaatcttaaaatgtgattatggggttgtgtgggggcgaaggaggcgatccagctagaaactcattgaaaaggatctcgctttgcaaaaaatcggttcctaaaaaactagaatttcgagattttctttccttttaaaggaaataattgttgttactgagttcactgttttattcagtaattatcatatatggtcttagtttatgggcagataaatgggattttcagaaagtagcttgctttctgtgtggcaaccagacattgcactaaaatgggttgtaacgtgtaactcaaaagaaactcttcagcctggcatctgttgagaccatagttagttcctgctgctgtcatccaagcaggcctgttggaggttgctcttttcaatcccaaactgaggtttggtgaactttagcccgggcatagagttaaaatgagtaaattgggtgttttatgcgcatttaattttggtttgtaatgtaaagctttttacaccacgacttagtgtttaatagatgcttataggtgggtattcaaaggacagtttttcatgacctatatgatactttagattgtcaatacattaaattataatgtatcactttcatttgctgtacagtttctagtgttgttaagcctcatgattacttaatatgttttatagcattaactttgatgctgttgtctacaccccctccctttttttcctcttaaattgccccaagggctaaagatttttcttttcaaatcatatgttttaaaattcatcttctgctctaggatgaggcaaccaatttcagaaaaagctctgtgttatccacatgaaacgttataaagagtgttttgaataagttaataatcatctctttctaattttggctttagactgcagtttaatataatggaaaagagtaatcttgctaaaaagtggtttaaaaaggcacatttattgttaatgaacctcataaccaaaaacagatgggacctctatcaacggtaaacctttagttctcagtgtgccactctggagtacaaagataaatagccattaatttttctcaaactttatagttcttcaattggcattcttaaggttgcttttaaacttccagattaacattgctgccccccttttcttgattatatggtaagaagtaggctatggttaaacagaagaaaaaatatttacagaaaagccatgctaatacaaactggctttcaacaaatccagatttaaatagctccagtgtaagaatttacaacaaaaacaagctatatcaaattactagacagctaggaaaaatggtaattattctctctggttttcctaaatatgatccccttagtttcataagctcaatacttcaaataccatcaaagttcataaaataattctacttacctgttcttatcaattctaattaaaactatactttaaaaatgactttgatattgtctaatcactttactataaatgatgggaaaattgatgtctaatatataactgaaaataattatctgttaatttttttgaagttaattacaatgttaatgccattgcatgctgaggttatttctgaatactggatattttgttttaccagtatcatcaaggttttttgtttgtgttttttttttttttaattgagcttggcacttcaacctaatgtgcatatcacgaagtgtattcaattttttaaaaatatttattgttaacagccctctattactaatggacacctaaatactgactctaaaacacatgagttttaatgcatcagtacgttggatatttgaaaacccttcacttcttcctgtttctttaggggtaaactgatccaatcacatctttggcccaaaacttgactaggtctgtcacataactcttggaactttgatagtagaaaactttttctatgcattaatttacaaaagccaatggggagtttaaaaagcagttagatgtttgttaccttcttttgagatggtttatgtttttttcataagaattaatatacatacacatataaaatgtatacatataaaacatatacattagatttctaatattttgaactatgatcatctttccatcctttattaaagtgtttctgctgtattttgtaatgtgtttctaattgttaaaaattgggactacgtaaatgcaatttgctgttttctttttagctatacttgtaataattcttgttctaaaagtaagcccatttttccccacttagtttttttataggccagttatctttttattcatgtgtattggtacagtttccacagatcattttgttaatttgaataagaatgtaatgctatcatctagaaatatagtaacatctgtatcatatctagataggccattttacaaatacattatatttgtggagagatatctagagctaaaacatttacataggacacatatatacacgtaggtccccgcccaactataacgtgtcttctttttaaattctggcaggtgatctttagacagtgactgagtatggatcatttgaacgaggcaactcaggggaaagaacattcagaaatgtctaacaatgtgagtgatccgaagggtccaccagccaagattgcccgcctggagcagaacgggagcccgctaggaagaggaaggcttgggagtacaggtgcaaaaatgcagggagtgcctttaaaacactcgggccatctgatgaaaaccaaccttaggaaaggtaaataccttcaagccaaatcttgaaaagctgaaagccctgttgtctacacaaggccacactgtgtgggggtggagtggcagaacatgttttgtatactctgcctttattctccttatgatcgtacattagttacattctgggtccttagtatcaatcacgttggaaagtatagcctccatgcttgggtggagcgttctactgtagactggaatcatggaacattttgggtaataaggactgaattaaatataatggttttagttttggcagggtccattcaaaaggtgttgtagtcgaggattgtaggcagctgtttcttcaaactaacctgattaagaataaaacacttaggtgatttgagagttaccctagcttcttcctaagattcttagttgtagggcagtttcagagatcttggacatcttatgtagaagtttggtaatgttattttttgtggcttattttcttaagagcaaattcattagcagtaaaaaatctgatgattctagttttttatttttgttttaattgggtatttttgatgaagaaagaacagatttaggcaagtttataaggggaagatgtgtaactgtgtgacttttttctaccaatattaaattgatgcagtttaacaacttggactgtgtttaacagtgttgttcctgtaaagcagtgcctaccctgggtgtaatgcatgtgcctcataaggagcttcattttgtgtctgaataacatgtataggaatcagattttccttacatttgctaagcaatggataaaaatgctatattttagcaaccaagaatattaagtagataaagttagaaggcagaggaatttcattgtgtttgatgcgtaacatttatcatacaatcatttattttttccttggtttggcgaaaacaaagaatatattgatcctgaaatgaacagacacagcagtccgtattgttagatctttatctattaaaaatgggaaaacagcacttcagcaaattctttggcctctactcatgattaccctatttattgattgtttgccaagaatgtatgcatcttaagaaagccagggtaagagcattaaaaatataatttattacggcttttcaaacagagtgcattaatattgtactgtgaagcactggggctgtataaaaaagactttctgacgcctgcaaacatgtaagttccataaattcctaaataggagatttcagctgtctctggtattatgtgatatttgcacagcaaactttaatgccaggacagttttagacaaggattctacagacttcactgctccttatggcagacgtgctgtttacacaggctcataaaccttcagcaaaagcttctaagactgccttcaggtttaaatcatgtggtatttttagcattcagcagtgaccagtgctctcccctttaaatgctggaaggttatgaagttgctgtagttggaactctcgccaaacactagcacgaataatcatacagttcagaaaaggcttgtgttcagcattactcccagaaacgggagggtaaccgcaacagtttgctagaaggtctgtaattagatagtactattgtcactttatagccgtctttattattttagggtacctctaaacatgatcaataaaatccacaataaatccaatatatttcaatagtttgaaaaccctgcagttatttcatagatctaaggaaaagcatattgtagaatacatctgattcatcctacaaaaggaaaaatgaatgtgtacatttttgttgtacttacccaactctttgaagatatcaggacaggaggaggaaaactaaaagtacagtaaattcacttcctgctcaaatgctttttggttttgttttgttttgttttggatgtattctaaaaatgcagtttaattgtaggagggtctcagatactccaaataacaaaattactaaagtctttttgtgggtttttattaacattttcatcttatttttcatgtgcatggtttctgtctgataggtgctaaatgaaaattatggctgagatgagaaaacactactaagaaaaagggattgaatggttttatttgtttaggcgattttgccagaataccttcaagccaaggaaggaatcgccagtttgcatattgctatttttgctgtggtctccccaagttgtcttctgatccccgacgggttctttctctggtataaaacagctgaatgaatgacaaaaatattggcaagctctgcggcttgtttttcatgcctagcctattggtacctccgaatgagtttgtgagtttttctaagtaaacctaaagggttttgtcagacctagaatctcttgtgaacagttcactaaagctttggtgaagactcacatgtagaaagatgtagctgttttattgccggcttttgttcagcagaaacaagcaaatagagaatctttgaagggcctctctggtgtcagtaggaaatcctgatttttagctacggttggtgtgcactaagtcatcttcagaagttggtaggattctgtgagtccagaggacagagcttatagaggcattagtattgtaggactaattgtggatcctgggtgccctgttaaagtaacccttgtcatcatttatgctaaagatgatacccttctggcagtttgccacagtacaattcagatgcatctgcttttaacccttttccgttatcattggaagtctgacagtgcgctgcataaacaccttgagtaccacagcattccgtaatatcaatttctagaagaagcctctttctaatagtagtgtggccggtgcttattaatcatctagctactgagttactgtattggattaaaatatataaagagagagcacaccaaatctatgcagattcctttatcctagtatgtcagtttccttttctatctctcatttttaccttatttactgtaacaaagattgttgattttaaagacttatgggtaccgtgctctctttttagttaggtaggttaaatgagtattcataaaagcaaatgttatttttctacattatgcagatattgaaattgtgtattatgagcaccagtttggttaagtactttttgtggaaccagttagagctaatatctaaaaaaggaagaaaatgatttgtggaaccagttagagttaatatctaaaaaaggaagaaaatgaaaatttcgtggtcgaagataatttgtttggacacaaacccaggaaaagtttattattaacaaaatcatgtaagcagtagaaaggtgggttcttctgaagataaatggtgagttatgtttgcatactgtatactactcatagcaaattagagaagatacatttatttctctttcgtcaccattattatttgatcagaaaggtaattctgcattcattgcttttggcaaatgcactgttaatttagagcacagcttaccttaggaccaagttcatattctacttaaatatttctgttacgactttaaataatatgagaatgtatatatttgtgtgcatttgcctgtactgtacccagtctgccttggaagcacagtgaatctcttgtgattatttattttcatggctaatatttcctcccgccacccccaagctgtatttctgaagattgttggttttccatctcttcttcttcatctttttgataggaaccatgctgccagttttctgtgtggtggaacattatgaaaacgccattgaatatgattgcaaggaggagcatgcagaatttgtgctggtgagaaaggatatgcttttcaaccagctgatcgaaatggcattgctgtctctaggttattcacatagctctgctgcccaggccaaaggtaaataatgtgtacgtggggttggaaaaattgcttagcattctttgtttaccttgcagagaaagcactgaatatttttattcaaagaactgtagcctgtgtattacattggttccttataggctgtggctttaaaaaattggcttaattcagtttggtttagttaacacacattttgctcatgtggaatgtcgaggtagattttttttttaaattacttcagctgaatcattagtatgcttattgaccttaataatctgctccactgaggacccacaaggaagtgaggagcgtatttgagcagatggactgttgagagtcaatttgcatttatgactgaatatctagttctgtttcttttattctgtttctgatggttttatgggctgcaaagtatttttcaatgctgattcccactgcaatagagaatcttatctaaatcataaagccatttagaactggttcggctatgtcttattagaacttcctgtaagttaggaaaatgtggccttatgcataggttttattgatggggttttatttccaaaataataaacaaccctacagtcatttacataattttacaatttggaaagctaagctgtgaatattttcattgacctgccttttagagggaagggaatcattcaaacagaaataacggtactgcttgtggtaggggtagtagaaaagaaaagaacacccttctagtagatatattatctgagggtaaaatatttagtgacatattctctttatctgaaatagggctaatccaggttggaaagtggaatccagttccactgtcttacgtgacagatgcccctgatgctacagtagcagatatgcttcaagatgtgtatcatgtggtcacattgaaaattcagttacacaggtgagtcaagacagcaaatctagggtgaaacattcttcttacctggtcttttgaaatgaagcatttctctctggtcgaccttcaatttttttttagtctgtgtttcagaaaggttaatacagatcgattttgttaccctatccttctgccttttttcctaacttcaatgtataatttaaaagcaatccccccccacacacacacaaaaaatgtgtaggtttgtgcaggttatcaaaagacaagactttttacgtttagtcaattaaataatgcatcacaagaaggcattttacataaagtttacttaagaaaaaaatatttttgcatatcatgaacagtgccatctgtgtacattttgtgaaagactgtcttattcactattaccacagtcttatttatttatttatttttttatgattttaattcatatgaacagagtaatgaaaggaaatcggttaatacattaaagcttttcatgatggctcaggagaaagcagtacaccttaaattgtcttcccaagcgcatcagagcaggaaggtagaagtaacatgaaaaaatagccaccacaggcagctgatgtataattcatgcatcgatacagcagatgtgttgtataaagtaattaactaatcggaacaatcaggagaccgagagcaatctccagatgcatctgtttgatgcgcaaaatgaaatctgtctgtcttaaaggaatgttctgcagcgggatgcaatcttgtaataatcccctttctaatctatgtctcaaatagttgccccaaactagaagacttgcctcccgaacaatggtcgcacaccacagtgaggaatgctctgaaggacttactgaaagatatgaatcagagttcattggccaaggagtgccccctttcacaggtacttagcatagaatgtaataaataataagacatcatgggcaaccctgatttgaggtttgatggagctccctggtttaaagcaactggtatctgaagcaagaatctgccaaaaatgcaaagtgacttgaccactggtgaccttttaaaatatgcctgattccttgtgaacagagcctataggctttttctcccttggggaaaagaggcaaaggactgtttacaggaaaaacagttcagtggaagactccgctggctaatttttagatttgtcttctgagtgctattagcatgatggctaaattctcctgaatgcccttatttaagaaagagtcgaggtggtactactcccacgaagcttcggtgagagggaatggcagtgtcagtgttaatgtgtaaaacttcaccgtgctatctgagtaaaataacagtacaattcttggatactttactcattaccaaaaaattaaaagtattttagtacaaataattatgaaaataattactcttaactaaaggttgaatagttaattcattaggattttgtgaccagttttgtggctttggtttacttcttttctgtttttttaagtggaattttcttttttccctctgagatgcctgttataccatcagggatttttaaaataaagatttttttaatgattttccttgatttctttttttagaataaatttggtggagggcagctaaaactctagatagagactgcctacctgcttatagacagaaaatcaaacatcatttttgatgaaactcagctgatttcaaataaaaaataaaaaggatgctgtgaatctactcttaaagggctgcttttgtggtcaccatgtaaatgtgttatagtcatcccctcagtacccaaacccgttttaaggccattccatgatacagtataattaaaatgttggtccaactagatttttaccagatttttaatgttttcttttaatttgagttttaattctgaatattagtcttagccatttgaacttgaactgtaggatgctgctgtaaacatttctgcagtggagagatctcaaagtgtatttctgctatattctgagtagcagatattctcaaaatgtgtttctaatgtgaggcttatgaagattattgggtacctttgaagggaatcttgtcagctttgtgcttctgtttcatagaaactccatgcatttcagatttgctaagttacgttccaacacttttactttgatatttgctagaaattttaggaatgaagcaaatgaattgtttataattaatagctttctatatattctaaaataagctatagccacaggttacatattctctgtattgttaagtgtccatttcttgcaattcagagaaaactcttatttgtcatttcagttatacctacagctaatctcctgtcttccctctctcacccttggaatagagaggatatgaatttataaccatcaaataaaaataatttaaattaatcacaaatgaataggatgatagaataaaagggtgactcttacttcagggactttgtttcgcagacaactccagataacatgttacatggttgctaacatatgaaaatttgaaatgatctagaaataaactttttaaaaactcagttaaaatatgatgtaaacacccagtactggaatcgcatgtgtctttatgttactaaatgtcccattgatcttggaagtatattcagacaaatacttaaggcatttactatgagctgaagaagaggctgtcgttacaaatatttattgatacagtcagtgagaactaattgttaaatgacatcaacattcagccaataaactctacctcactataacttataaatagaattgtgaatttacttaatgttatcatggaaaatgaattgcatacaattataacattaagtagaatgacaaaatgtaattcaggacttggttttggagtcatacattggtgaatttctatagagagaggttttcagatatatggcttcctgtggctggatacctcactgtaatcattaagtgatggaactaggctacaatatcaacatcagttataattgcagtattcttttccataaaaaaacttctaaaaattatgcatagtttaggagtgaaagcaaatatttgaaattaatatttaataatatgaaaacatgtaaattgttctctaaatgaggtacttattttatattttgctgaatcatcttctctttttctatgaatctgatactccagtcagaattttttcaacataaactgttttctgtttgcttctttattatgtttttctgtctagagttattaaaatgagagatgcaagttccctaaagcctatgtccaaaatatatgccaagtttgacaaaactactctttttcctatggttaagatttggtgatgaagatgtcatggtgaaaaaagcctagcaaataaatatggcctcagtcttgagcaaaatgggacctaacaccaagaaatgccaagtgttaagccctttcttcccctgtggagtgttgattcattcatgggagagaacctttagcatgcaatacaccatacacattttactgtacagtaagggttttattttgttgaatatgataaagtactccagtagcaagtatggctacaggggccctaaatattatagttagtagaaagttcaccctgtgggcaggtaaattccttttatagagcaggggccaggaggagtggaactggggagccaccaggattttgcctggggtgttgaataagccctgcctccaatgctcttaggacgattgtctaatacttgctaagcaaatgtccatttggacttggattcttagaaccagaagggattatccttcctaggctcctccttttgataattgaaggagccagtgtccctggagattaaagtcacggtgcaatgactaacaagaaagtcctgacttgctaagcctatgtccttgcctgacaataaattttaaagtgctgatttagctacttgggaggctgaggcaggagaattgcttgaacccaggaggcggaggttgcagttagccgagatagcaccactgcactctagtttggtgacagaacgagactccgtttcaaaaaaaaaaaggaatacttacatttgggtacaataatgttttctttgatgatattcataaggttttcttcagctgcagaaattccataagtgggcttagtttgatttacaactcatacctttatttctgttatcactttcctatcataaatctgcccaaatcgattgacactaatttattaaattctttgtaccatgtgtttttttatttttgtaaaatgttctaagacataagaaacacttagctcattataggtctgaggttagatgttttgttgttacttttgtttttttcggtggatgtggttagataagttggatggtgcattctgaactgcagctaaggagagaataaacactgatttggggacaagagagcctgtagtcatgaaacttttgaggatatggatttgggaggaaaattgggaatttaaaaagtaaacatttttatttataataaaacattaacattttgatgcttattttccctggagttttagaaattgcatttaaaaactagataaatgtatatacattctgatacagggtagattcattttgttaagtaaaggtcagctattacttctaccagcgtaatgtcttccttctaaaaatgtttaggtcaaatatttcatggaggttttaatctgatttgcgcatttttaccttccctctttcaccacacatgtgggcgtacatactcgcgcgtgcacacgtgcacacacacacatcacaactttcacatttttaaggcattggattattttctatcttatttctcacctggaaaagatatctttaagccaagtcatataaagtgggtgagaagtgttatttttattttcaagtagcaaaatatatataaaataaatttgaacattccatttagaagtaatattgagaaagatgattttccaactttccttttattcacagcatcctgagatctcaaatatgttggacaatttatttattaatggaaaaataaattttaaaaagaaactacctcgtgctcctgaagcttagcttcagtactgctctcctgaaacatgacagtcatttccgtaggaattaaatacacttaggtgtttagttgatgttcagtctgtattataaatgatattggagcaacaattacaaatctatcatgttatacaaatgtgtttttaataaactgtactttatttcacagtttttggactggaatgacatgtttcttaaaattttaaatcagttttagtaagcacattcttaagagaatagccagcatcagtgttcatatactgcatttcacatgagagtctaatctatgaaatttgttcacattcatatattcaaaagtatgtattgacagtctgccgtatgccaggcattccatttcctatgtagtgttaaggatataacatcttattagttgaaataatagtattacactttgatttagtgcttttgatgtatcgagagcgcctttggtccccctaagtaggatatagtcttatatccccatttttaaatgaggaacctgaggcacagaatgttgacatgagtgagcgtccatggctacatcgctggtgaagcacaagggtgagacttcataccgagagcccgggagcttcaccaagtagccttttcatcacataccacagataaaggaagtttaaaaaagacaaaatgaaagcctctcagatgaattggataggttttataatatgctttgatttctctaaagtagtgataactacttgtagttttccaagtgtatttattctcattgctgaaaattttctttaccgtgttttggttttgtgtctttgattttttgtttgtatgttgtcttgttttaaaagtacattgctgtcatatcaagcccctaatcatgggtgatctagacaggaactgacttttgggataacttggtatttgggacgttccagaagatttgccggtatagttctgtgcagttacttctctttcctattctttcatattctcaagaccagtaggcataattatgctaatagccctttgttttgaaccccaaggtaacattagtcattttcattagaaatagtgggcagatgaatttcttgggtctgtttgaaaatacagactccagtcatcagactggtcttttacgagcagctccattttaaaataaaaggattcctgtttgagatgagctggaatgattttgtacttgccccttcccagtataaaattatcttatgtttaaacatcatatattttgaataaaagctctacagagaatcttctttcctttttaacattaaaaaactttccctagtttttaccctactgaccgtgggaatcttagattataaatatctgctttgccaggcactgaagtacttgatactaattggatattatgaccacttttcagcaattgtattactgtaatggtgggatccataaaggaaatggtaaacctgtcttatatgggtagttgtgtgaattgcaaaacttacatcaaataatttttttgcctcgtcttttgaacaagtcatgacatcattctagttcctttttcaacttagtgagatgtctgctctgtgttaatattataatgtgtataatctacaacagaattgtcctccaaattgcaagttttcctttttgaatctaatatatcaggctcatttttagatgacttagatgcataaggattttatcgtagcttgatgttagctctctgtaacctttcaggtatattaatcaaaaaagccaaacttaataaagcatctaatttaaaatggattgatctcaaatattttatagccactatcttttcacaatagtaaaacataaaagagtttaagctatgccaatttagagagtgcttaacaatgtgtaattactttattttcacttaatagatttttacctgtgccttgtttcagatctgaataggtttcctttgacctcaaaatcactaatgcagggaaaattaccatatcatgagagtatttttcctctttcttttttttgcctgatgcttagaataataaatactcccaaggcttaggagtagacatggcctgagagaaagcctattaaatgctattttctaatggttttaaaaaacaacttaaacaaatcatgctactcaaactgattttcttgctaaaacagaactagttttagagtatattttagacatctttttttctcaattactagttaaacttgaagttgggctctatctggatttgctttatagatctgcttcatttcatgccagatttgggcaaaccatgaacaacccccaactccaggaaaaaaaaaaaaacctgataatcaaaacaaacagatacacgaactcaatttccccctctttcattggaaactgcttgattataacgtgctctgagtatgaaaaacataagagagcctttaacataacagaggagagcctcagccctggttctgcagctcattgccaattgaagtaaggaacgctctggctgttgggacttttaaatctagacttaaaagttatttgttctgtttagcatttttaaaatgattctattaggaattgtatgtgcttcagttttaattttaactcataatgattgtaaagcaccctgggatgcttgcatgaagggcgctacagaaatataagattgtattgtgttctaatatgcagtcttacggggtgctggagtttcatcatggacaattcataagattgcagaattcctcatggcagagaaggtggctgacttctttagcagtctttttctctcattcttactctgaaactttgttctctttagtcatcatctttctctcttaaaaaaattgattattttctattgtaatattttcccatagaaatgctaatctaatttagtttactcaggttgaagatgcaaaccagttgataggttggaagttaagaaaagattaaagctttaattgctagcactatttgagatcacattcttatctgaataacaagacatggtacttcattactggataccaccaactctctcaggcttgtcccattttactgtccacctactatttgttccaaggaagttcagaaatgtaacaagtattaactttgtgaaatgtcacaatgagactcttctctgtattgaaactcctgtcttatgataacatacgacacagcttgatctagttttctttttactttttaatgggactgtttctttagagtaatggcatttcttcagcaacttcattgtgttactttttgtgtgtttttgtttgtcattgctctctagcatcactttaattagctcctagcatcgtaggaatcaggaatgtgagttatgttgtggccagctatatgagcttgggcagctgactccatgactcaattttctcatctataaagtcggaagataatagtaccaatgtctcgcattgtttagagaattaaatgagctagtacttagaaaacatttagaacagttttcagtcctaaagtgtgccataactagttgtttttctaaaatgtgggcattgagagtttgaaatcacacttgtgcatgccacatggtctatgtaactctctggctacatggaagattttggtgcaatcttcatttttagtgaaaacaaccaaatacttttcatttgtgaaaaaattaaaagactatattataactcaatctcaacattaaggaacacttacagtcattataaagttatgatgtattttaaattggaagtggaagactgcagcttatactttaaataaatccatttggaagtttagcatatatgataccctaggctagataatgtcaagtagaataaagatacctgatgggactgttaccaagaggtgagcttttcccagtgtcttttccgttaactaacttcgcctgtactcccagcacccaaggttctgtcctctccttatgtgcccatcgtagcatttgccacattgttctgaaatagtctggactaactaggctgtgtacactgtaattgtcccaaaggaactaagttgtattcatcactgtcatagatcctgacacacagtaggaactcgggaatattcgtcagacttaaacaatcttgtaggatttgcacatgtttatttcataagccagtataccgtgtcagtagttgtattagtagtactttatacttttatctacagtatcctatcttatgaaatattttcctattatacttaattctgtatttttacctaacaaagaacaaatcacttctgaatttttctctaagaaaacctactgacatttcaagctgtctcatgcttttgtatatttgataatgttcatgaatatgtgtactaaacatttgtaagcacaacaatagccttggagttacagggaactcagaggtctgaatgcttaaaaagacctgattatacatcacagttaagggcaagctttaaaaacatatgcagcatttctaaattttaaaatttttcttccacaattgtacatgtatttcagcctggctaataattttcattttgtctcagttacattatatttgagacccacacttcttcactattattttcatttgtttattttcttctcatattcaagagtaaaataggaaattttcaataacagataatttatagacaaagatactgatgttgccaatacggaaatgttaacagtatcaccccatgttcacttccagcgtccattcctcagttgtgttctaaagtctacatttggcataagagactccatttaaggctataaacatgcagtgttttaaagtcagctgtatacaggtctagagtcacctgaatttagagagagctgcaagggtagataactgttcagccattccataatgggccttagggacttggtttgtccactttctgcgtgatcaccagctcagcctggaaaacacatgtttagtgatggatggagctctttattatatgatttacaacccattccaacacatttttatcatttcgccataacttctaatgagatgattaccagaggatggcattttcctacactgtgaaggattttcataatattgattgagatgaagccagattaatttgatttttctttatgatctaatccagaggtgacattggtttatgtttatctggtagacatgggaagtcttatctaaaagctgacaatgatgaataaaacacagaaatcaaagctgcggtttagccctcagtcttctgtgaagtcttggatcagatctgagaggggtccatggaccccacaatctgtgcagaccctgaaattataagccaattttgggaatgcatggaggacagctttcataggttttatgtaatttccagagttagttctgtggccctgtaaagagctaaaagccaggaggtattttacccccaatttttaggcagtatggcttaaaaatctaatatgctcctgtacagaaggaatgcaaagaggtaatataaagtcttcctgtgaagagttacagaacctaattctaatatttacttttggaaaatgaattgctcaaagtactttagttcttgttttcgctctgtggtttaagggttttttggttttgttttgtttttttaaaaggctctatttaggacctctggaacttaacacgaatttggtatctttccagatactagaaattgtaatctctagagaggatgagcgatttaaccacacaagggcatcagagaaagagatttctcaaatgggtacattggtatagagtgcctaagattcagaatcaggaaacaattttgtcaataaaatcaaataaaattccttggattcatatttatctaatgaaaaacttgtgaaaattctatttggatataacataatatataagttaataatgagtgtattttaaataatcataagcaggatgccaatggggtcgtaaccttcctaaaaataagactctagttggagacatttgcacagtgagtacctgagaatgaataatgtgcgttacaattgaatcttttttagtcactctgtttgagaagacatacagatttcatagacttttaaatctgttagaggagacgttggagattatctagttcagttcccttcatgttacagcttctgtgtgcagttaatttggaatatcacatgctcttaatataccttttaaaatattttatagtttaagctctttaccagtatattcatttggtttgagttaggtttcagtgtgataagaaaggtctggctaggtacttatacaaaagggcagaatagagaatctggtcagaacatactatctgggcattatgtaagttattttaactatatggaagagccatataaactgtgaaccaacattttcttttaaaagttatgaatcgagtatttaaataaataaaatttctgtgctttgatatgatcacattttcatctttaggaaatatagtaggaaaattaaaatagaattggatgtgttctctttgtgcttccttttgtattcctttggagctttgtactgagtttccaattttagcaatgtgccagggttactttgtatgaaaatgccattttcaggcactaggattgatcaagatggcaagagccataactatgacaactggagtttaagtaaaatttagaagtgattagtctcttctcaacaaattgagattccaaatatgccccagttgtatctcccaagagaatagcttagaaagcaatagaggatccagagggaaagatttgggaaacagaagctgacaagcacaaacagaatattgcacttagaaatcctgccattcgctgtcataaattgaagcccatttcctgtccttcccaccccaaaataccagatgggaactacctgttaattttcaacaaattcatttcttgtcaatatatcatatctcatacgatgcctcttagagcttgtttgtagtatttggtgtcctttgagattaaaagaaaacctcatttacgaggaatccctgtgaaaattgtatttgaatgtgtagttgatgtgaagttaaagtttgacctttgaattttccatggacagataaaaagctgctgtaaaaaatcaggccataggtagtcaggacatgcacaaaggggtgggagattagaatgtatgaagttgaacttctcaaaaaataaaaatataataaaagccagtagtttgacagattgttcagtaaatgctcattttattgaaaactacaaaaaggtgcttaatgcctttgcgccattaatacaatacataaaaaggttactgtcaagattagtgttccatccctgaaaattaactgtagggctttatacatcaccatgcatagactgagaagttaaaggttttttttaaatacacattttgcattgtgcaggcatttatttcagaaaacaattattttagactttgtgccaaagacattaggaatgatgtgctttcatttaaagcacagacataacagatatgtattataaacaggtagaaccatgaaattttccttatagaataaaacctgtgcaagattatttcccttgctgtctctctagagtattccaattcaaaacatacattccttcctacagaaaaaagatattcagattccttagttgaaattaattagcattcagaaaccagatagcatgtttttgggtattcatgagatctctgtttgaaaaaaatgtttttaacttgtagaaatgtgttgcaacacacagatgggaagaaaaagaaaaaaaaatctctttagcaagcactgtgtgtaaaaggaatattacattttgcacgctcctgattgctctgtgtaaacagtttttgacatctgtctttatagttttcgaggagaggaagactttgttaaaagaatcatttttatacagcagtcaccatttcagtcttgctttacctgtattatgaaagcagatggtctgcatgtcttttgaatatttataactatcaaaaacaatctcttgctattcacccttaggcttatgagatgtcaggactgttctggttgaaaaaaatcatcttgggtgtttacagaaagaggattacattaagctgaaatgactatacattttccagtttaatatttgtccatcagctgtttaatcgtatttagataattgtgtaaataagatgttgtagcccttgccctctctgctgatggagcctgaaagctttaaacatgggtgaaccaccattttgtagatgctcttgctacctcctccccacctcagctaaaccatcggcaagtccttgataagttttgatcatgatatcacagtcctgttttttttgttttgtttttaaagtagtgcaaaaaacgcaagcatgtagatcatatgaaatactaggaagctgctggcttccggtacaggctgtttagtttattagggtatattgtaatatgcaaatatggtacagcactccaattaccctttaaagctgacatggttttctctttattttctatgagcatgcagagctctgagggtatttggaaaacttttggtatagtgggggttaactgttttttgactggaagctgagcaatcagtgataacagattttgctgtggttggttgatttggcagaaaagcatgaacagttttggtttaaatgattgaataacctgattagcattgttttggggtggttttttttggttgttgttaaagacacaacaaagcaattttaagggtaatcagatcactgcctttccccatctgatgaatctttttttgagaaggcctcacctctctcaaaaccccttcattggctactgagatgaacaagtaaaaaaataaaaccatcttccttcatttttaaacgtgttatagatatatacctacagtacatatgatattgtagcaggggtttaaaagaataaaattttttgaaacattatgtaaccttaaccgattctttgtggtttttgtttttcaaatttaaaagagctagagtattttagagcaaaggttcagaatgttctatctatctttaagttaggctttagaaaaattccacccttaccttttcacaattagaaaggttataaataatgtatttggctgaaaaggaagctcagcctgtggcagatggtatcattctagagtactggggtttctgtgaagatggcattctttcagatcggaacttcagcagactctcagaaagaaccgaagctcctcatagggagtagacatgtgctttatggatcttagaaaagcttacaacttggctcctaggatgagaatattgtgtcacactggggttatgagacccacagccaatttctgccaactttgaaattgtatttcccaacactggaagctgtggcctatttattggttggtgtaccgtgtagcatttgaacttggtatttcaaccgactgagttttgtcggttggtttattttattctgtgaacattgatgttttatacagaccagccactgaataggaaacttgccatacaagttgtgtctttttcaaagtgctttggatagcttatataaatagacactgagagagaactggaataacataaccaccgagcactgcaacttccgagacatctgtgtggatgtattttgaaaaacctgggaagggatctcttgcaaattaatgaacaaaggttcttgaaactatgatttctatcacgacagccaaagcgatggatttgaaagattcgtgtcatagttaagctgctattatgtttgacctttaaggggaaaaaaggggaagaggatttctggtggcttgtttcagtgaccctttttattgatcacctagtctgtgtccagccctctgatgagtccaggatatattcagatgagacctaaggcccacagtccagtgcaaaataaacagcaggatgagtgctctgctgcaggaggtttgggaagttaggaaaggcctcatggaagcaaggatgcccaggctgtatcctgaaggatgagcagctgttagctagagatgggagagggcatgggccgtgcatccaagccagaggagtggtgtgccttcttgatgctttctaccagatataggccagcttcagaaaacaccaccaaattggagtatgagaaggaaagaaatatttccccgtggtgttttcctttactattccttgtaccaacttgtaacttaataatttaatcagtatacttcattctacattaaaaagactcaaaatactgtatatcatttgaaaattttatctgatactcaaaacatagtcacctgatatgaaatgtgatcatataatgaaagcccagtgatgaggaggaggcaaaggattgtcatagtaattaatatctcttcagtctatatgtaatatgttacaggctctgtgctaattgtatcacatctattatttcctgtccaagggcagataatatgtctcttcaagtcattattttcctagtgacttgcccagtgcttggcacatagtagaatttaagtatatgctaaatgaattttaaaaatgcctgaattgatggattctcagaacaactccatgaggtgtatgctattatcattcccatttagcataggaaattgtgatggaatggtcaactatttgacccaaggtcatactaccagtgtgtgacacatcctcacttgaatatatgtttatttctattctgttttgtcagatgaacatttagtgtttatattaatgcatgccaggcattgagctagaaaataatatggtgccccagacctacgtgaactcacagcttagtgcaatctttttaaaccagtacctccttttaagtgacacaagaatcccaagcctttctaacatggaacttggcctactatctgtacatcccaccacctaggaaaattttaccaatcatgacttttttatttgtgttatcaaaacattacgtgtttttttcctgatattctaaatttaagattacactactgtatatgatttttcaaatgccatgtgcaccacaaaattctgcagtctctttcctgccattgaaaccggctggctggtctactccaatgctatgcctaagcctttagtaggaattttaccacctgaaacacacacacacgcccacgcccacacacatacacctcatgaagtggctataggagcaatctaattggacagattattgcatattgtccaataaaaatagacatgactccaagttacctgaattaggaaatatttcccagtcacccaaaagcacagaaagatagggaatccaaaaagttgctttgtcatgcattataagttacggattagccttttgatttaagtcttgcttaggctattatttacattaatcagagtttcctaagcatacaccatgtgacagaaaagcacttaagcccagaacctaccaatttagggttaagtagggtagggggaagctttgacaatgatgcacatatggatattattttccatgtacgaataataataaactgtatagcactattacatataggttctagttttataaaactatttcagacattttttcacacacaccatggatgattcttccttccgtcgtcccctatacattttccactgttgatataccaaatcacattaaattgagatgatctatttacatatctgtgttcttaatagatagtaaacttcttgtaggcagaggctgtccgccatctttggatgacaggtgcctcatctttgtaggcagaggctgtctgccatctttgcatccttactaccagccaggcatatagtaggtgtgcagcaaagagcaaatttcatatatagaactgttggcaaactggagtagactggatgtttgtcaaaaacctcggcaaaatttggatattccatacacttctaaaaagtaagacataaaccacatctagaactcatgtgtattattaacatttaaggaactgccagaatgtctagataaagagtaataatttttttaaaaattggaccagagtggaagaacatcaactgtcatccatttgcagaagaatcaccattatccatcagcgatctcaatagtttttattagtgtctgactttattgatcccttattacaagagagtaagtgagattgaagctgacagatcaggtaatcttctggctctggttttggcaactttgctaagtgtctttttacactgtggactgtgggaggctcttagtgaaattgcaagctattggattaatggcagagcatcatgaacacattaagaatgtctttttagagatataaaatgtgaaaatgactatagagagtgtcaaaaaaaaagatatcacagtgcctcttaggaaagatagctgtgttttacataaataatgcgactccagcttatccttcactggaagttctttagagatcccccaaatttacatattccagaaatgtgtgcatgctacagaattaacactgatagtggatgtcaggagaatgaataataactgaaagagctttacattagaggtaacttaaagaagataattatataaaaatacttttgtccccaaactggcttttctggttgttcactgcctcctgaacaatgctgccttctataaattatttcaccatagaccaactgatgtctgaaatgtgagttctcatgtttctgcacataggggtgagggatagattggtgctacaaaatcttactcctaagactcggtaggaaattaagttagctgttactagagaatatgggtaacaggttaatatggaccatgaatttagtcattgaaattaccgtaaccaaaatttgctgggaagattgaaaatgatttaaaaaaagaaaccctcctagtgattcattaaaatcatgtttttcttcatttttgtatgttaaagggctgacagttttccgggcatttattaaaagcaggataaagataagtcacaataggtcatctttttgtggtatccttgagaaatttagaagcatgaaatgtataaatttaaaatttttatgatcggtttgaaattcaaaacttaagctttactattgatgaagccagtaataagattgcagaatgtttttctcttgatagaggatctctgtgaatagtttgtttcttctcaaatacggtcagttaacctttgatcagtgttaatgcgcgtccactttaaatccaaataatagagtggaaagtgcaagttctgtttctcaaattttaatatacatgtgaatcccctgggatcttggtaaaattcagctgctaagtgcactggtctggggtagggcccaagattctgcatttctaacaagcttccaagtgatgcccatattgctggtccctggtctatactttgagtagaaaagatgtagagtccagtcaaaaaatcgcgaagtctcgtatatttatgagtcacaattataaagtcatcttcatgtatttggatttattgggaccagtgagtttgacagcctagtaatagatggcattgatggagattcaatgaatgctagagcaaagtctgtgggtttgatagctttatactggtctcagtgggctgttgctttctacttaaataagcatttgatgatctacttaatgaatattaagaagtcgaagctttaggctaaagtgtgaaaccaaaatgtattggtactcagttgattaaaaaaatacagttgccacaattgagatcatttctgtgttccatcttgtgctgctgtgtattacaaatattctccccccttcttcatgcagagtatgatttcttccattgtgaacagtacttactatgcaaatgtctcagcagcaaaatgtcaagaatttggaaggtggtacaaacatttcaagaagacaaaagatatgatgggtaagcaaaaaaaacattgcagcagtggctacataccattacgtgtcatttgggggtttatcaaagtcacatctaaagccaggtcttttgattgcccaattagagatcaatttagaatgtttctttgggggtgggaagtgggtatgagtataatgagataattaaattcaataaatgtttgtgtttaaatcagccaaactgacttggttgtcagacatgcaggaaattgaggcgttgggaggggagctgtcattttttaacaactcagtgaagacctaaccaggccttgaataactaatattagctgtgatttctttctctgataagtcttgcttttaggttttttgtttttgtctggttgaatgagaaagtgcctatttttacacccaattttaaaggaaattaaacttcttaaattaaactatttatagtttccacagtagagatcaagtgatttttatagctctaacccccagcccccatggatgggcactttgataagcacattgctttaccatccataccagaacaattattgcatcatttctgaacttttaattccaaggtagcattctatcttaacacataactttaggtgaatatttgttatgcaagaagtacactaaaattatctgcagtgtaaaatgatagataaaagttgtgtatggtacctaagcatttagatgatggcattttctctctgttgagtttgttaatgttcacaaaagcaaacactgtgattaaggttaatgttttaatttttattactgttctctttcacctacttttaccctccaaaacatatattttaaaataatataggaatgggcattatgtcctgttttaaatctatttctatttatttctttacattcatttaatttttttttaattttttaagaaaaattaatccaaattttgagcaagttttagctcttaatatttgaagaaaaaccatccatctaccaaaatggattctttgccttttatagcttaaggctgtaatgaagacaatgcatcatttttggaataattgcttgaattactgttctctgtgaatggcccacttgggctgatatcactggtagaaattgaagatttcttccccaattcttagttatattttgcgtatatcaggagctatagcgctatgataaagttcctctaaatgtaaaacctgcatatttaatgaaaagagaattgatgattaaaatcaaactagagtctacatgtgggaagtctgtgtacaatttggaaagtcctgtttatgtacagcttcatgctcagcccttccagccaagagcatcgaaccagtctcctcttcgtacagaaaagcatttacatacttagagatgatgctcagccaatccatatgaggaacctagccaaggaagaagcattcatcctgggtaggtgggaataaattgcaaaatcatgacagcctcaccattgtaccagaacgattccctgcaagattgtctttagcatctggtgatggccatagcttcctgaagaaaaaacatttggatcttagcaacactgggtatgctggcttgatatacaataaatcacttgctttattctaaaaagtatttccagatatacctactgcccatgatggttagaattaaaatgaagcaaggcatataagatattcagcaagtgttcaatatacacttattattatgcccatttttatttattacattaactacttctattcactgctgggtaaaaattgaaagtaggtgactttttatgtcatattttttcttttacacctttttcctagagtactaaagttaatgaatatcatgagaatatatttgtaaatttttttagttgcttattataagcttattttctcagctcagctcactgtttgtagttgtcattaagcaaatgacattcttttagaagccatttttaaaaattgttgcttagaagccttcttggggtaataagtgagagtgaacaactagttggaaagagtttgggtaataattgattttatgccttaaatctaaaccactttttaaaaataagattaggaatgctgtcccatttccaaagtttgtagaattgttcaggaaaggagagcaaaaacacagcctggtaagttgcaacttgaaattttcttggttttattggatttggggtgtgccctgtgcctacccttttttaatttaggaaatggttagaaatctttatcaatgccaatcattgttggctgaatgtgattttactctttgtccactttagttgaaatggatagtctttctgagctatcccagcaaggcgccaatcatgtcaattttggccagcaaccagttccagggaacacagccgagcagcctccatcccctgcgcagctctcccatggcagccagccctctgtccggacacctcttccaaacctgcaccctgggctcgtatcaacacctatcagtcctcaattggtcaaccagcagctggtgatggctcagctgctgaaccagcagtatgcagtgaatagacttttagcccagcagtccttaaaccaacaatacttgaaccaccctccccctgtcagtagatctatgaataagcctttggagcaacaggtttcgaccaacacagaggtgtcttccgaaatctaccagtgggtacgcgatgaactgaaacgagcaggaatctcccaggcggtatttgcacgtgtggcttttaacagaactcaggtcagttgtgtttcataagtggttctgtgctgtctcctattttctctttctttagtcccatctataactaaagtttattcttttacttctgtactaacattttctctctctcttcatgtgatcatattacctattcctggtggagcctcaattttaccactccttttcctatgatatacttctgaatcaagggaacctatgtgcagattgatcccaattcagggcctttgaaagactaattaaatgtcaaacgtactttaaactggcattacttatgcttttatataatggaatcataagctatagtagatggttaagaaaagtttcatgactcagtcaaggctattggcaggattccaggcttctagcctattgtcttttccatttatgttgttactacccatatcaaacttaggtatataaatgttccctcttaaagttctactgcagcgttgttgttgttgttgttgtttgttgttgttaacaccttggaagcaataatccacttaattctaagcagccattttgaaaaaatattatatgacttattaacataaaatatttgtaagctgtgtgcgctccctcatgctattgtcttccaaattcattgtctagaccaggcatcagcaaactttattctgttatcgaccagatagtaaatattttaggttttgaagcacttaaatctcggtcacactgtagagtaataaagcagccatagactataaatgaatggcactgggtatggtagtatttcagtaaaactatttataaaacaggccatggagtaagtgtggctggcaggccttagtttgcagactcatttgtagagatctcactgcctgcttatacccctaatgtgcacacctttgtcttcctggcccaattcctgtgaaggtactatctatcagcctggaagatgtttaagagggtcatggagaaaaagtgatatatatgagaggtcataagataaagatatttgagaagccctaaacaaattgactctgttgaactgtgaatgagaagaatttttttctttgtttggaaactagtatgatacgtgatatatatggtgtttatttttggcccaggtacactaaaacaaaacaaaaaacaacaacaaaaccaaaaaacaaacaaaaacgaaaaaccgcgtaactttgattagaagaaggacattatgccttttcagctcttttgttttaccactgttctttcttttgtcaatttatcttattttttggcctgactcacattttcctttcatatttaagttattttgtttattacatgattatgattatgagaataaaattctggtacagaagtaatctagtattaattcctagtttgcagagtttccatacctaggagaatcccagctgtgacttatttttggcgtgccttaactagatggggagttaggagacctgacaaagcctctaattcagtgtttgttttcagtcgattcatctttttttttttttttgtacgttcgtctgtttttgaaaaggcagttgcacaaggctatgtctcaggttaaaattgtatggttttacctagttctatatctttatagcttaaaaaactgtgttcatcattagctggtgaacttaatatgacacctatattcagttgggggataattattgaaaatgaatggctcaaaagtcaaccctctaaatattcctgtttctggtagcattctttattttagtaaatatagtaagtactaataattctccgtactaggccaaaaaaagtaggtctctacataacatttcaataatgcttttttgaattgagttaaaagcccacaaagacatcatgacatagacacaaattatatatatatgtatatatatgtgtatatatatgtgtgtgtgtatgtgtgtgtatatatatgtatatatgtgtatatatatagttactggtgtcttaaaaattgagcagttatttcttaaagcactaagtaagtgtcctttatatagtgaagaatgctaagacagtagaactcagagaagtgaggataaagttgtcacccatcattacagcttttctccttttgggtttatgatgttacagccattactatgaggagttggccatttgttctgcctttggtccttaaaaggacaaattccacaatatctacaggatttgttactggaagaaaggcaaaattttctcttttataccatattaatctctttgaaaaaggtaatcatctctgtggttaatatcaaaaacagtgacttttttttctgtgagaggagaatgaaaactttaccttgtatagcttgattgcagatacctccttattaataatagccaatttaggaaaaaaagtcattaccaaaaaaatatttagtgccctggattatgaagggtgttttaaagctttatattgataattgatactcttcagtcaaagtagatatagggccatatttgaagatgtttgacttaagaggaaatttgtatatatatttcaatattaattccttgagaactaacttttgcacatgcaggcatgaatttattttcattggtcattcttaaaaaccacacacacatacatacacagctgcatttattttttaatgattatgcattggtatgactggatgtagtgtgttgatttcaaagtgtatgcatttcaataaaagcaggtgcagagggtatggtgtgagtgtggagtatgaaaatacacatgctaatgcgtatgtatagacaaggagctctgcagagttaaatcacacatcacacatttgtgtgcacctagtacaatgtgcagttccaactccaacttttaaaacattaaaaaaccaaacaccgcatattctcactcataggtgggaattgaacaatgagatcacatggacacaggaaggggaatatcacactctggggactgttgtggggtggggggaggggggagggatagcattgggagatatacctaatgctagatgacgacttagtgggtgcagcgcaccagcacggcacatgtatacatatgtaactaacctgcacaatgtgcacatgtaccctaaaacttaaagtataataaaaaaaaattaatgtaaaatatgtacatacaaatacaaagttacatgatagggtcagatgaagatactgtttcttataaacggcattaagaccttaatatgatagaaaacacttgtatgaattgagggttattttagtcattgaagctctgtataactttaaaaccctgggtcttaggttttaactattgagaattttcttatcatcttaatagggttccctatattaacacattaccctcccaagactttcgcacatggcttttttcttaagcctaccttttctgaaaatttatggtaaacttacatagttacttgttttaaggaatttttccccttctgaattgatgggcatgggttctttaattgccgttgaagatatcagcttttagcatatgtcattcattcagttatgcctacttgatgtctttttaatggaaacctatggctaaaagtaattgccaaagcttctagatttctacttttcaattcacttctctatcttattgctatttaatggttctgatacatgcaaatacattccttaataccctttgatttttaaaagaataaaattcagagtttaactctgatcccactctgtggcttttttcccctttttcttccccctcctcttgtcttttggcacactttattttccagtaaaataaagaatgaagatggattattcaaaactgataacagtaatggaccatcatgtaatgttttattaaatttgagttctgtaaattatgtggtggagagaaatttgcctgcttaagtataacagaaattgctactgtgtttctataattcttcacagtgtaatttaagaaaagtccactatccatatcactattgaataaaaggtaaaaaggtgctattaccccaacaagacagctctctggttagcctgccaaacgacagagataaatgtgtctacttaaaacttacttggcatgaatccatggtagtaggtggagtttgaaaatagtcttttacctggacataggattaaaaattcaccaaacaacagaggcaggtagccttgaagaatattctatgtattttctttttaggagggaggtttcatcaaatcatattttcttcctgagggctttgaagttccatgaagctgataaaatctatttgaatcagtgattatgttcaaagaggagacaaacgggaggccagacagcctttttgttcagattggcagtctctttcgcttatctgctgttttaaagaattcataattagcttttggaaatactgataatatttattggaggttttttctttcttttacaactactaatgaattttacttgtaataacttgtaaactgtttttggaatgtaaaaacaggtttaggaattcagcagtaaattcattctttagttgaaaaaattagaactctgacttaaccgctatgtaatgacaatgcaaaacaattttgtgttttcatagatacagcacacatctaattattggtaagatgtgaagtcccaatgaaaggcagcttctgattttcaataaaatgaatatttatgaggtactggtaacttcctacataacatacaagttctcaggttcttttcagacacaagaatgactaatgattttgtttaatttaattcaacaaatttattgagcgccaatgattcttgatactgatgacatattttagtcctgatgtttcagcatattctatgacataaataaggtacatgatggccttttcatactattttttagcatgaagaatttttggtaaaaggtcacgcttactgtccactgtgtgggcagtactacaaatgaccttggcaagtctgtactatgtcttcaattataggatatgggaactggtggccacatatatcttgaattcagcatataaatatgagtgcagctattcaagtaacaacaacctgaacaggaccaaaacatacattcccatatctgggatctgatagcagtcattttgcatccaaaattattctaaagtgacttttttttttaagtaattatcactaatcaaaatgttttctgacaatattttcaagcatttccaccagggggcactcccctcattgaaagctctgggccaaaaaaaaaaaaaaaaaaaacccaaaggtttctgaaacacctgagactgtctacactggctgctttaaagctctttgagtgtttcagggtttgaaacatcactttataccatcaacatatttcagacgaacaaaaaaccttgttccagtagaataattaagtggtagtaaaatgctttgcccctaaaaacacttgtatgcttaaataggaagtcacaccaacatcaaaatataggtagagaacttttaaaattttctcccaagtgacataactaccttccaatctcaaccatatggaaatgacttagtcttatatgttagcaagacttgagaaagaatattattttgtatgttttcctgtatttgactttctcactatagatctctgctgcctcaggaaatatttttgatagaaatatgtgatatagtactttgttatttgggatttttaaatacctaatttcaagtttcccaaataacatcctaaatatttataactatgttttgccctaatctaatttttttaattattagacaattaggaaaaacatctcaaaaaatgccacagaacttttcactgtaggcccaacatgagtgctaataactactactagaattgactcatgggtaacacatcttgttcttaagtttctatcacctgtttgtgattgttttctccattgtggtctttatacacatgatcagtccatttagtaaatacttatcaaacatttacatgagagacattgtgctgggatgatgaaagtgaatattagattattatgctcaaggaatttgtagcatattgtgtttatactgatgttttcatgtatccatatctgtgtagttgagaatatattgctttgtcaagtacattttttaagacataacatttggtggagaggagtaaagagcaagggttatttcattacacctattttcaaactttttttttttgagacctgaatgttttactttcaatatggcacatcagaaacacagtcaaactaattaggtggccttgtgcaaattaaatagctggatgattgactgcctgtttgactgaattttagttaaattgactagatgttttgctcttgtgtagacacagttacagcattactcgttagtatcctaaggacacatgcccttcattcttcagtcacatttcttagggtaaaaacgaaagttcaggtccaatttccaggctttagctgtaagagactaagtgagagacaactttaaaatggactctgaagccctctgcacctgttaaaagttctttttaaataccagcttataaatcattttaagaagtatcagtacttttgtattgtctgcacccaactgttgcatttcggcaacatggtacattatctttaaatttgggaacaaaaccaggtttgtacttctaacaaaccatgaaaaaaacaaatgttttaaccttggggcttcattgttttgacatgacacgttaccttccttcccccaatatacctttaactgtttctgcaggatattggaaagtagatttgcaaattatatagaaatcctgacaaaattttattctgaagctgatactctggctaagtgaagaaaccaaatatgtcttactattccaagcattatttcatgtacaagattaaagagagaagagctgcttagcccttataaaatgaacagaaaattttccaattcttttatttcatattgtctcttaaatgcaatggggagaaccacccatttttgaaagagttcttccaaaagttaaaaaaattagttgaaaattgatgttctgttatttaggggggaaagacaccttaagagttttctaatgatttataaatttcttctatcactaacaatttttattccccaagaaatttgataattacagaatttgatactcttttccttggcatgctgtgatggactttcgcaatgttgaaaattagttaatatatttcaaatcttgtctatggtttttaaagttcaaaatttaaacctgttacccagtggtataatacagcaagatagtatttagaatcatttgtgataatcagtgaggttctctgaaaatggtaaattgaaagggtcacgtagtgtcatgtactttgataagtcggagtttaaggaataattttaaacattgcctgtgaaaatacagcataaaccttaggtgatgctttagtaataacctttgttctaatatgttaaaattcattttctggtattttctttgaaagttctacttctctagaaatggctttgtatctttacatattgggctgtaggcattacactgcctttgtctaggcagcttgggaactatacagttcagtgctgttgcattataaggatttcgtttattcttaacttccctggatcgtctctctgtgaaagatttcatggcaagttaagctactcaaaggaaggagaccaattaggcagtttcagtttatgttatatgtaaagcagatgcttaataaaattaagaatacaattgaggctctcttctctaccacttcagttgtaactaatatattcctatgcagaattaatgcctctgactgttcattttctaaacagagtggagaagaaaagggaaggatcactgctggccaggcaaagcaaggcagcaggctcaccctgtgcctttcatttcttgcagggcttgctttcagaaatcctccgaaaggaagaggaccccaagactgcatcccagtctttgctggtaaaccttcgggctatgcagaatttcttgcagttaccggaagctgaaagagaccgaatataccaggacgaaagggaaaggagcttgaatgctgcctcggccatgggtcctgcccccctcatcagcacaccacccagccgtcctccccaggtgcggtctccttttcctccttgcccttctttgtttagcttttttttaatgcttgaggaagaatctcaataagaaattagatagatagatacatagatttatatgtttttaaattcgtatagttgcttgaggagaatttggtcccaaatcattaattctgatataaaaacaataagctcctaattagatagagggaagaaaattgctttgtgttccttcattctttgggttatttgggggtgaaagtagtctttaaatgggatatttgtctctactgttgttattaagtaaagtattttaaactcaatagaaaaagaataaagtcagttttttcccaactggtttcagaatcgccatttgaatagtaaataaataaaaataaataatttcatttgtatttatactttccagtacgaactgcagctggtaccaattacacaccatctcatttgtaatctttcataattaagtttaataaaatccttgaaggcagctttaaatggggctgataaggaattctatccatactccaagatacgggcatgttttctctttcttaaaatttttggactttttaggaaagaaagttgccttccgggtaactttgggtatgtgaatctgtattgttttttaaactaagttttaaaagtaacctcataactgttataattcagtaaatcaatttgcattacaaacccttagataaaagtttgctagttagtgtattagactcaaaaaccacaagcaaatatattatctttttttttttttcttttgagatggagtgccgctctgtcacccaggctggagtgcagtggcacgatcttcactcactgcaagctctgcctcccgggttcacgccattctcctgcctcagcctcccaagtagctgagactacaggcatctgccaccacgcccagctaatttttttgtgtttttagtagagacggggtttcaccgtgttagtcaggatggtctccatctcctgacctcatgatcctcccacctcggcctcccaaagtgctgggattacaggcctgagccaccgcgcccggctgcaaatgtgttttcttacatgtttaacttgtgacatttacagctcttaaaaataaggtcagttaaaattggataaaaattgaacatggaagaaaaagtcgaaatattcatatgacaatctcatagtgaaattgtatctcgattttacttcattctcatcaatggtagaaagtggttatacattttcatgtatagaaatctagaaaaaactcattcaacactaaagagtgaaagtactacggatactgcataaataagaaatatttagccacttgttgagtagctaaataaactgcttatcataaggttctgaaactattactttttagaaatgtcacaaaatccattttcactagtttatttaatgaaaatcaatctggtcttgatgtctataggaacagactataaggaaatcattgctataattgtgaataaaaaagtcatgcttctttaggagaaaagcatggcatctatatacgtatgtacacacccacctgcccacgcacacaaagttattgaatttgatctctaaatgcttctataaaatatttcctaagataaagaatgaggaactctttatgtataaaaaatatgacttctaagtatggttaaagagaaaagataaactatgacttctaggaatgataaaaaagaaaaaatatacgaaatgaaataaaataatttggtttggtactttttctgtagtgtttagtgttaatacacacacttttattagttaactttgctcctgaagtcaccactgacagggctctgagcagagaattactttacttatcacttaatctgcaatactaataaaagaatggcttacttaagaccaatatgaacttcaacattgaactgcttttaaaaaaaaaaaaacatctagccagatatttgactttgtggttccttaatacagcttttgttttctaatttttctaggactctggttttatttattttccaaatgtgatttgggtgtccttactcatcaagctttttcttgagctaaagttataccaattcttattaagtgatatttcttttcatatgctgttaagatactataggataactttcctgtatgtatgcttaaaggctttatctgctgataagttgggatagaatatatgtttaatttatttttgcctgaattattggttaactggttgtgccacccttagctgtatttgtttgttctgaagaggagctgagaccaagcccatagctagggtattcagccaatgatgaaaatatacagtatatacatactgtagattcttagtgaaactctttcaaataaaacatttctattactgcagtattactggccatctaaccaaactccaaaatgactaactgatatgtgtatgtgtgtgtaattttattttgctgctgcaatataaatctttaaattattaatattattataatggagatcactaccagtttgttcacattcttccctttaaccatgattaaatgaattaaattttaagaaatcttaaggtattaaaggtattatcaatgcaaaattagtactttagatttggaaaaacacgttatagagcacttgaattagtgctgtcttgtagcagttgaaataatgaaatgatgcttaaactggaaccagtatgcatattaaaaatgagttaaaataaaggataaaatggagaaaaccacagataacacagactgcaaaattttgtctttttaaattttacattttgccaaagaggagtccatgtgaaatcagtatacatttcatttcccccaaaatgaggagatttgaaacatattttgagacaaatcttgggtttgggttgcacctgaaacctgatttctttctaaagaaccacatgttaaaagcagaggccctcagtggttcacagaaaacccagcccccattaaggcctgggaaactggattctcttccacctctttatagagtgtaaaacatgcagaagatgattttggagtgcccttgggacataccataacaaggacctaaactattgaaggacttgaattctaagtcatcttcaagaaaggacttcctggctagtcagaccccacctggggacacctagcctcaggaaacaccagagctccttggtggcccagtccaggtgagatgcctccctgcagaggtatcccatgtgctccagtagggacagttatgccctgtgcttcatcctctgcctgggctataggctctgggccagacctggttgctgcaaacattttcacaacttacatgctctaattcaacaaataagaatatcttgcacctgataatgattcacaccctaacttgataaaagctattctgaaagcagctgaatacattaattcattgaatcctcataccaacctttccctagaagaaaaatgagaaaaccaagtttaaggttgagtcagagttttcaaatcctctgctaagtctcttgctccttcctctacttcaagccacctcctcagaataaaagcaaacttattttagaaagggaaaagtgaaacttggagatctttttgtttgtcatagaggatgggaggttttcttgttagaatgggaagaggagcatgtgctaaagcattgtcctaatgaaataacttgtttgacaaattatccagttgggaaaactagacaatggcatttctgggattgtggggagaacagccccttttaaactttggtctcatgaaaatatctgggagaacccagtcctcccagcttccttggtcttaaggtttcttttcactataagctttgcagattttcctgatgagtttattagaggaatttttatgaacaataataattcatgattattatctgagaattgtatattttacagaattttaagtgatgatttctaccgtaagggtatactttttaaaatttgatttgtgcattttatggtgtgtgacttttggagttaaattaatttagcagtttgtttccatgaagactgtttgaaagcatataattactgagttacagcttttacatgaattacacaaaagtctttttttcttcattttttacatctctttatgtaattcttcattttttacatctctttatgtaattacctaaagaattactaaaggtatgctatttcataacaatgctttagaaaatttatgaagttaatataaacagtatatgattaatctggtagttgcactattttgtctctttacaagaaatccctctacgatataatgaaacataggttcatcttgatttcaggttcagttacaggcaggaacttaacacttggtaaaagttttatttcttatgaatcccttgaagatcattttaagatgttgcttatgtggttataaaatgcatcccattaattgtcgtcttttaaaagctggaagacttttaaaggctagatttggaaaataatactgttcctggaaggaaagaaatatctaaaaatatgaaaccatggtgctaaagacagtgttaatatattaaaatttgagagtgggaaatattttccatcactaataagcatccataaaagaggacatttcttattttcattaataagaaaatataatttttataccctgaaaaataaatttagattggattttaatcaaaaatcaatagctattaaaaaattagacattaatgagctagatttatcaaagggccaccaaaaaacaagtccagcctgctctaaaaattaagaattttttcaagtaaagaaggtgcaggtaatgtcatgaactctaaataactttgggtttctagttaagtttagatctcagcattgctccaccaacaaattgtttaacctgtttgttttaacggagttttctcaattttaaaatgggacaatcataatacctcctccgggctgttaggcaagttaagaagttaatatacattaatacaatgtccagcacataataaacaactaataaatgtcagtgtttattatcacaattattaaaactacatataactttaattttgcttgtgtaaaagcagtgtgcttgcaggcaattcttcatgcatcagagtaggatgttcaccaatcaaggctgaaatagagttcatttcgtgtaaaatctaaaagcatgattcaatgcatacagcaatccatgaagaagcaaaatagagtttttatggaaaatgtgtgtcctgcggcacaattttagtgaaataaaaagcagactctagtgctgcaccctatccccacatgggagggtaagtagtagaagctccaattcttaactacttccccggcgccgccttaataatggagtagtacaccctaccttgataaaagctattctgaaagcaactgcatttattttacctcctgtgctatttgcggagaagagctgaacagtagtttgttttgcctggaatgaactactttatgaattttaatgtgtgatataatattaaaagctaaaccaggattaaagaagatttttttgtactaagctaaaatagtacttagtagagtgaggtataaaagatttttgtttccatttttacctggggaaaaattcagctttcatatttttgaaaagctgtccaagtcagtttcccttaagcaatagcttgtgtttaggaaaaaaaaaaatgtgattctagaattctaatagcttatctatgataagatgtgtatctgggccaacaaaatggtaaagaagagctttcctaaatattttttaaatgagtagtacagagatactttctaactttgtaattgttaaagtttcaccctcacattctttttttaaaaaaaaatatttcttgtatacttttttcacttttgttttgattgtgttggctactaggaaatggttttttaaaataatttagaatttgtgcttgattataattgctttaaaataaaaaaaaaaattaaccaaagaagtttttagaaacaaagtcacagggttgaaacaaatgattatagcgcacctcaaagataaattcttaaacatcatttttacaaaataatgaaaattactttaaaaacagatcgaaacaccaactttccaaagtctgttcttttaactattgcttagcagattgctaccaaggatctgtttcttcagtgcactggacttggtgcccccatttccataacattcagttttcaaaatgattgaaatggcttttcttttctctttcatttaagcagtgagaaaaataggtattaaaagggaccccatggggtgatcaaatctatccctctgcctcaaagcaagaccaccccagagcaaagtttccaatctcaccaaagcaactttgtaggcaatttatggtaatgtgttgttaactcttctggctcttaaagtggtgtttaacagattattgcttcaaagccctgtatgtgttctagtggcctccagtcattaatatatctctatgagtgcccttgcttactagagtggcaaagctagaaggggaactctggagaggaggcggatgaggccccacctttggtcacctgtcctgccttacctgctgtgtccccttcaggcctgcgggccaactatttcccagcattatcttttccatgcttggaaaggtggtatcatggtgaaagcatctaccagctttctcaagataagcaagaggtgaattattttgctaattggctagaaattaggattcagcaggcacattttaaagggatctcctatttatgctttaagtacggagaattgaatcactgaatattttaggaacagagtaaaataaatcttaaagtcctgcagcttgactcaaaggctatatcatttaatgccaaaaaaatcatttgtttattctacagcatacttcattttctattttcatggtttatgtgagaaattgtccaggatggtaagtttctagaggatagaaacctgagttctgtaaagtaactgaaaagatgtctttaagggatcagtttgctggaagaaacatggttttgtatctgtagtaatttttcatttatattttcatcagtttcccagtaaaaaatcagctacatggtttttatgtaaattttccaggctagttcatactactgtgtaataaaaaataaatttggagttttaaacatgaattatagtatcagtacattttgaagttgagatttgctttcagcccctaaaattttgtggcattttactgccgatatctgcttatcactattactaaaggcattgatgctgatttttctctcaagattgtactttttgaatatattagtaaagtcactgattatatattttgtgatgcttacannnnnnnnnnnnnnnnnnnnnnnnnnnnnnnnnnnnnnnnnnnnnnnnnnnnnnnnnnnnnnnnnnnnnnnnnnnnnnnnnnnnnnnnnnnnnnttatatattttgtgatgcttacagcaatatttttatttaatattgtgaaacattatcttattgtgtggtttcacaagtcaaaaggaaatagttatatacaggggtgccaggaaaagatgaaataattatacagaacagcttggacatgcacgtgtaaaattcaaccagccttttgataattaagcaaggcactctacctgcttcatggatggatagaagatttaaatacgcagttctgcaaatggctttgttatggaagattttttaaatgaaacataagaggaagatgcataaaaatagtctaaaattaaaaaggccatagtatgtaatagctattagtgattcaattgtctattaggcaccgggcacccagtgaagatacagcactgtgcattatgattttaattgtgaatttcctttgttaggattgcaatggaaggtaattgggagacaattagtttagggttttcaagtctttgaaactatttcgttttccagaaaacttactttatggcattataattcctggttgtcagctggcagttgctgtcatattacagatgcaatcacctgtgacaatgtgacttcccttaacttaagcaatctgatctcagggcaataactaatgttgaatgactgcactgttgatcaccttgatcataaaaggaacaacagtgtccagtttggatgctgagcctgagaagcttcaaaacaattcagccaatgaaaaatgacagccatgttcaaaatgttttgtaggtgaaaacagctactattgccactgaaaggaatgggaaaccagagaacaataccatgaacattaatgcttccatttatgatgagattcagcaggaaatgaagcgtgctaaagtgtctcaagcactgtttgcaaaggttgcagcaaccaaaagccaggtaagagcctctgttaggcattgagaatgtttatctgtgttgcctgtagaattttcattaaaaggagtgtctattttcagtatgaacttgcatcacggagaggcctctgtgtctaggattatttccagagctctaaaatgaaacaatattcaaattcaggttataggcacttagttttgttttttccaatagccactcctcagaccaaggattttatggtaaatccccaagtcagttaataggtattttgagaaggatatcataatggatagtcagtttctcagtctggtctattgtagtagaataaataatgtgaattactattatttcattattgcttagatgatctttattttttttcctactaaaatgctacaaaactttatacagtttcttctgttccaattcagccatctaatgtggcattggtggtatagcagtgagcatagttgcctctcaactcagctggctgcaactattaaatacacttattaagacaaactgacacacacacacacatagctttgcatattaatgattttaatttttctgtagagtatacaagacacacagattgattacaacttgtccaaccctgaattacagctgaatagccttgaattggaaaagttgtaaacttctaccaaactaaataaaaaaggataggtcgtatagtcttttatcagcataactgtcaaatattaataattcatgttcatcaaaagtggaatcatctatatgaacaaacttagttatctataaacccttctccaaagccaagaatactttttaaaggaccagaagaacactaaactcttttcccccttgaaaaagaatttcataacactatcaaggtgacattagaggcaaatagggactccaggtaagattttaacaacttgaaattttacacaagtatatttttattaccattaatgaatcctaaaacagcctggctgttgtcaacttctgatgaaatacacaattgtgggagtatttataatccgatatatttgtaacataataatcttttcagattttcctaaacttttaccctatcgacatttatagtgttacttgacaggagttttgctttagaagaatgttgttcttggttaagttataggnnnnnnnnnnnnnnnnnnnncttaagggatatcttggaaatgttatataaaaatgattaaactcaagctgtggactgtaaaaattatagctttataggccacatgcctgcctacccttcaatcactgtcaaagtgataatttctacaataatatgtttcttttattgtgagattctaaacatcaagtgctgtttaaacattaaactgaattgtttatgttagtgctgtactcagcgtgtcatacatcaggccaccgtaatctctcatggaatgtaaaattctgtcatgaatcatggcttgtatatcggaaattactgtaattttgattggaaattacagggctcttgaaatgtttctaattatgatagaatgttagagccgctttaaacctgtgtgcttcttcagatgtcttcatttacatgccaagactacgcatttaagagaaatgtcctggtctcactccccccccccacctacttgcccaccccacacattcttgttttggctctttagcctaattatgatgaggatatcatatttaaatatatattatcttgcctttcttattctacatttttttttctgacctgtccgatcatcagtaataatcagactgcattcctacaaaagcctgtttccctaaatctccaaaatggagaaactggacatgtattatagtaaaggttagctttaaaacaaaaattaatattataacttattaataaccatatttagttatctatcacctgtcatttaattcaatctacccccacccccgccatcattttcctttctgattccctgtgattgataattcctttgctatctttgacttcatccttttaaatgataccccgggttctccccaatctgggctgagtactgattttggagctatttagatagtagcagcaactggctaataatgtcatataggtgatgttctaagccattttaaacatccctgctctttgttaccctgtcctacacagctcctcatgggtctctatttcagcaatgtaaataagcaaattccaagcatcttctgtgatggtgtgtttcccaaagccccaaagcttttagctaattactcattactagttaagagaaaatcaaaggggccaatagtgggctatgggagtcaagcaaactattaactttattcccttggatagttattctcaacttctaatttactctaacgtcctagtagagcatttttgtagtcttgacttagttgttcagtttaatgttagcactaccctgtttatgaaaacatgtagaaagattgatgattgcttaaaaaatgagacagtccaaaacctgtgtatatcactaacaaaagaaacccgacttaataaggaaaagtggccatttacttaggttctgttctcatgctatgatgttttgtgaaggaaacagaaaaactaacaacaacaacaaaaaaacccttcaaatcagactgacctttttaatggtcaaaatattgcacttctaaaatagatatttaggcctcagatgtgtgccaggacttgccaaaatgaggcagcagtcccccaagacaaaatgtgtgtgaagcaggaagaaccagagtctcttctgtctcagcccatctacctacatctgcttctgtgtcttgccctggttgtctgggttgacttaaccatcgtgtttttttgtgctagaccctatcatgcattatagattatctgcattaatttagtaaccctgtgagctattattttcttacttttacacatgagagtttcttaaataataaatgtagtacagccaactccaaattctctgcatttctcctattttagactgtcttcagggttcaaggcagcatcatcactgaagtactaccctgatctgaggaagaggaattagggatactggtcttattgacagtagaaacagtgagggctttcctttcttcattgacatattcatggaacacaaggttcttaccaacacagagccttcagagtccaggctctatcatacctaatggaggtgggtgtacagggtggaggagtcaaaggaggccaactctgatccaggttgtgtcattggtggtataatattggaaaattttaacttttgagcccaggattcttttaacatagaaggcacatgctacaatgtatgcaaaagagcttttaaattatatagcactatacccaaatggtaacgtttcataatgtgctaagcaagaggttcagtcctccacatggatagagatttatttatcaggtatttatgtatcataaataccttccattttaaaaggtaaagcgtgctctgcagtgactaatgcacagtgtattttcggtaaaagaagccaactcgtggattccaccatttcacatgtattgtctcttcaatgaataatagatatggaattgtttttaactctaatagaaacgtctgataaaatatgcaagtaaaaactgaaggtaggctactttttgtgcttggttaggaaagcaggctaatgcaaactttaaaaagatgatatgctttaaacataatgtgagtagctacaaatgaatacactttatattctgggtattcaaataagcagcagtttttccaagtgaatcatattggaattttatcaaacatttagtctgataacattcaaataattatgagagcagaatttgctaattttactgtttaaaaaaatagttgatttgggtaataaccattacagtatcaaggttcagttactgttcattggttatagtgttttcatatgggagatggaaatggaattttttccttaatggtggcagatgttggaatctaattttattccacagcaaaccccttgagagctctgagacttaaggtgtgtgtccagcaaggagacattagcagcactgtaggccttgccttgtatactgaattgttacattgattttcatgtttgcataggtggagcttgcaggtacagtagtgcagtaagacagtaaagggctttcacagaaccacactgcatcatcacttgtgcttagaaaataatttcctctagtgttttattgaacaatgtatttattttggataaagcaactagctggtgaaaattctgtttgactaacatacttttggtataatatttttgcagtctctgagttgtagtactttctggctgctacaactttggctgatgaataggtatgtttttaatacaaaaaaatataaataaagagcatttctgactatgcaaaaataacatggctagtagaagagactgaataatttaaagccttctctttcatctacttttcagtcacttttgtttgtcattgagattcatggcccctaggatgagagagaggggaaaacaaggatgaaagagagaaaaagaatacctccattttccttaggtttgtaggtgaaagaaaacgtcattctgacctttaggtttggaaattctcacatggtaatggatgtcttaaatgcaagtaagacacgtgtcgcaaatcattggggctagaaatagggctaaaaatgtaattttcattgctgaaaatagatctatagtgacaaaatccaggagtaaaatcatggaaccattgacattgcattctgtatgctagcatgctagtgaaggcatcttttattctgttagaattaaattacacttcagtttttaattctgtgctgattcattcttttggaatgttcatataacagactttgctacaacaagagttcacctgtgtagcctcctatttaaggcacataggaggccctgcagatttgagaatcatggtttctgttatttccggtgctacatccttttgtagcggtctgtgggatcttcacattgtggcctaagagccccttctcttgggcaaacgaagccttcttcattcactttctaaagagagaactgcccctttacatgttctccatctaaatgtgtagaggacaccctgagggggatacagcttctgtttccctgggacccacttgcctggaagaggaggaggcaagagaagtatttgtgaggaaaacaagaagacaagtaagacagtccagagtgtggtccctgcatctcagcagtctgctggtgttaagtttaacacagatctttggaggtccctgtgctccattcttgagtaagaaggatgtggagttcatcagtctctttatttaaggtgttctatattagtggccatttataacaatctcttacatcttaatgttgggaattcatattggattcaattttctaaaacgttgatatatttttatatttctagttgaatgccaaacaggactattaaaattaatggctttaaatattgacattaatagtttgaaggtacatgattgtgtatgattttttaagagctaattgtggatctgaatatgccttcttttgagattcttgcctcctaaaaataagtatgtttgttttagtgtatctaggatttgatctgtgaggtccagaattattaaatagaacaattgcttacttatcatatttctggctaaaaagtcgtatcaagaggtgatttatcccctagacacttggtattacctacctttaaaaaaatgaacagaagatctctggttatcgtgttgcttctttgaaataatttaaaattttcaccttttccccataaatttagaattaactgaaagtcaaatatattttctcttcgacccacttaataagcttaactgttacaaatatagacataactcattaagcctcatttctgcatctttagaagatgtcataagaaaatttttagaccagatttgaagagaattaatttgtgaatattgagccagctttaaggaggttcatcatgtaaggaaacacaaagaagttcactgcaagagtggtccctttacagcaatccagcatatatgttctgaagcacggctatgccaactatgtattcatagaacctgctttaatatgagagcaccttttgtcctaaaatgttagtgtaagctgaaaagtgtaaactaagaatattctataaagttttctctttttggaagctcttctgtattcagctttgtcagttgaagagttagttcttcaggacaggttcgggtgggtacagaaagtagggaaaacagcaaatcaacaaggtttcactcctaacaggaattaatcttaaaactgagtgtcattcagttaaacttatcacacagctataacactgatataatcctttaacaatctaccaagttagaagatgaaagtgttttttcttaaaagtctcagtagttgtcttttatgtttttgataatgaaggtaggttttattttaactttatcttcttttttcctcacatgagaaacgaaaataaagaccctgtgaaatgaatgagctatgaaaatgcatttatactaaaggacaatagaaaaatagctgtggaagaaactgtaccattaaaatttcacatcagtgaaaggtgctaagagaggaatggaagaacttacgttagtaaaatgaatctaatgtagaaattttctgccctgccaagaatatcgatggtatcttaaaaagtaaccttagagattactcatttttctaagtatacttgttatacttttagatatgcaacccatttgcttggcagaatgacacaaatcatagaccacccatttaaaaatatatatatctatattttagagattagtagacatataactactctgtaatttataattacataccatgtaaaaatagaagttgtaaaccatttatgaaatcagcatacaattgtcaaattgatgttttttcccctaagtcttaatctacttctgttgtatattaatagaaaatctattctcctttgattttgtgattcacctattccagttgcctttgtgtatttttttaacaattcccttttcaaccaagatgcttcaggaattgggtttaaacacactgtttcataaactgccagcctcctcggccgcctcagtgcctctgatttcgtaaatcagatcataggcagcatgctgtcatataataaggtgtctgatccttattaccagtttgttgatgcacagactccttcaaattgaccattgcaacacatggtttcccctgaaactagctgtgataattagcgtggttctaatgagacagaatgtcactgatcttgtgctgaactgtcgagtatcgacgctacggatgggaactgtcagagcctgccatctgtgacagcgcttggcatattccagtggcaaggtagagcatgctcaatagagtattttcaaacaaatggcccttttcttgatgaggcctctgttttctgttcaacaggaagaatgcatgccccaactctgtcctatgctaaacccattttgaggtccaaatttgagtaaatatttaaatctgttatgtgttacataagagaggaatcttttgtttagcaggtgaatcttaagtggcatttctttccttgtttttagggttttttttttcttttcttttctttttcttttttcttttttgtttttcctctttttttttttttttttttttgcctctctcagttgtcccatattgtcagttaacagtaaagcagtcatttaagatacttttccccaattttaaaattgccttgtttagaggagatttgttggggagttggggatggctcttagtgataaagcagtctgatttaacagagggaaaggggaattgaaagaagtagttcagaatgtatataagaatacacaggttggatagaagaattaaaatggacaagacagttagatctgtcggctccagagaaaagaagagattttttgctatagtaaaagtccagcgctgcttatcattccaaaatatgctttgttgctttttatttcctcctctctggcagaccacacagggcttgttctgaagaacattttcactaatctgatcaggcagccaaatacgccgggaaaactgctttaatgatcccactaattacctcaagtcaatatgaactgtattattagactgagggaaaatattccattaggtctcccccttgggagtttctccgctttgtgatgtcactgaagccttcaccctctcgcttgtaattaattttatttacacacgcaggcacgcacaaggtcacacctgcacaaccggcgctggccagggagcttgtggcactccggcttaatcagatctgtcataattaccattctgcatgtttctgacacacgctgtgaaatatttcaatttaactgccgctaccagcacaaccagatgtagtgcgagtgtggctgcattggaaatattattcctcaggataaactctctcctcctcctttttcctcccacccccccatcccttacagctaatgtggcacagaagctgatgtatcctgtaaatcttgaatgcagtgctagattgataacaggcgattagacagtttaaccacaaacagcttgttcatttttcacaaatgaaaaccacatgtggtgtaactaaaatttcaggccccccttttttttaagggttggggtatgtatgtgtgtgtaagatgttcttaaataaaaataaaatgcagtcaaaagaagttgtgtctagaaaaatggggttgtctagtttttttccaggttattttatcaaaaccttcatcaaattccatttttatacttttaccaaaattcaaatggtaaaaagattgtattctgtgttgggcttttcattttttttctgtaagtttttttttgtggaggggggtgggtagggtgcataatgtcccttgattctatgccgtattatgttttcagtgttaaactgtttatttgaacctaaattctgaaaggatttctaagactggacacaggtagttttctaaaggacagcttttctttcttttttttttttttaatgcaaagttgttacttcaggctttatagtcagataccagacactcaaaaagcaaaaatggccccagttaggaactttatttcatggagatatttgtggatttgtgtaattgatttgaaaggcagagttggaaaccctgaggattctgcttttatagaaattggagataacctggcgaaatgcaggcacagtaggtaactgtttaaggctaaagttatcaccagtctcggaagaatccccctataaataattggatccataagaaggcagataagctggtggaaaactaaagctaagagcggaggaggaaataggatcagtggtgtttttgaatcatacgtcctggaaccagatcacaacaatccactttagagaccatttaaaacatagatatagcctacttaaatatcttttaactccaaataaaatacactctttttctttttatctttatttttgttttatgacttcagttatgaacctagcttggaagctacttagaatggtggtggtggtgattcctgctgtccaactgagagaaggtgtactttcccaaagaatagtgggggttttttgattccttactcattttcccttttgcttagtagtttcctcatgtcgtgtttctttttcttctttgtataatctttgcttcctagtttttttctggaactttcttcccacttagtctattttccatgtgttttgtgtttactccacgataactttcagctttaaaatctgatattttttcttcctattcatagtttcttttggcctaaatatcactttaaagggaaaataaaatactgtctttgccttttagttagaactcttcttccatctaatttaggtcatttgtttctcccatcttaatctacctttgtaatcattttgcaagatatagttattgtagaatatttgattcaattcctatatcacaacactctcctgatgagtacagatatcacctcagaacccttcttaacacagaagtaaaaatacccattgctaatcagggagataaacccatccctgctgtagtcacttgtattttaggattcccaaatgggggtttgctattcaaagcatagttgtgtgggataagtcaaagaaataagaaaagtggaggtaaataaaatttatggtttcattgctaatgcccttgctttaataaccctgaagttttttgtacagctacttgaaggtatgttagggataagccagcatgcaagttcagtcactttttgcaatcactggtggagctcaccattaaaaggagtcctaaattgttcctttgcaaatgaaagatttcacttgcaagataaaaaattatcccccagtttttcatgtttgcaaacatttttgtgtatttgtatttctttgcctggcatgcctgttaatacaaaagggaacagaaaagagaggggaaaaaagttgcttcgttagggatgctgttgtgtatacggagtttaacaagatcagtattctcagtacaaagaaagagcacatcttttcattaaattaatcgttagactacaagaatcctgcgtttcaaagacaaattatttatttatggacccttccaggtccctatctaataagaagacattttccatttgtctgttaacaagtcaccgatgaagaatcaatagaagtgttacaaactttatcttgccccaactgaatccaccatcctcagtcactctgcaattgctattcttcagtgctctcatatcttcatgaaaacatacaggaaggaaaagtgattccttttaatgttctttgttgttttcttctggacccactgtcttcatttttcatcatcattgttgaagtcatcagtatcatttgcagtgtagcctaagctgaaaggaactagagggcatggctcctgattttctacataatacagaaataaggtaatagtacctaatttgcaaactcaccgatgttttacctaacaacttgtacatgaattgcatcattcatggaaaacattgggaactgcaaagagtggtagtcccagttccactgctaacctgctgtgtagtcccaggcaagccgtttaacctctcagacattgaacttccccttcaggaaagtaaaatagattaggtcatattatatctaacgtcccttaaagttctaggtctgtgtgtttgtgactgaaacaggtacacaagtattacagaggatgctattttgattgaagacactgctgacaggtgttctagtctgggaaacaaaaggtaagagtttggataatggaagggcttagtttggggggtaggcggaaaagtgatattttggggtctagagccaagaagggttatttacaggtggcatataatgggttgaattgattgttggaatccagtatatgaactccatattacatggtgtgagttgagctcatgattgatatacacttttcatctgagacttgttgatagatgactgggaactctccctattatcatacagagacctagcagcatcagtacagtatagagtatgagatgagccgaattccattggggaatgggcttggtttaatatgtggtagggtggtgattgctagcatgatatgatttgaaggttgctaaagactttcctctttaaatatgtctcttttttgtttgcttttcaattgatgcctgaaggtccacccttagctgctcttttgattgattgattgattgattgattgattgattgatggaagtttttttctggcacattaaaaactttaatagcacattaaacgggaaagcagggcaatgtgagaatactcgattgatgagaaatcacagatttggaagagattagggagatagggagtaaatacaaaggaaaaggaagcagggagtgacagctcatttgagagaataccttgaaaaaaaaaaagaataccttgaaatccatttttgcaagtttataaattggtacctgtagcatttaatagctgctgagatgtgtccatccccaaatgtcgcgtttaaatgtttacccattttacttatggtaccaacaggagtgctgcttgtcatgggtgttacttgactggtttactgatgaagtatttggttgtttaaatgaaatgcagattaggtaaaaataaattactttcaacaaggtcaaggaagtgaaggttgtaaataaaatatacattcacaaacagacaaatgctatttggaaatctagcttagtccatgccaagctgttactgtctaaattaccttctttcttcctggcttgcaattaatttttgcttctatgtttggagattgggggaagggtaatagcctaatgggtaatgattttattttagtattttgattaaagagactaaatagcttggaccctggataaccataaggacgaaagccttatccatcaagcttaatttctaaacagaagtttatgcttgtatttctgagcaaattagcattgagccacatataatataaagttatgagacggttatgtgctcaattattttctacctgtctccccccttaccatcttttctactcaccttctttgatcttctgttagactggaggacaaggcacaaggcagctagttagacaaagactgtatagccatgtgctctttgagaggcagtgatcagagagcagggactggtatttgatcactgctagtttcctagcatttgcagagccactcccctccccgaccctacccacccacacatccaatgcttgtgccactcttccattctgtatcctgcctctatcctgtatctgtcctaccttatctccttctatttggaaaacccctgtgtctttggaaaaacttgttggtgttctcctggcaggtagacatttctgaaaggatactctgctaatcttatttacctttaaaattacttggatgacatgatgtcaatacccgtaacaatttagatgctttattcagaaattgtaagcccaatctctgtgtttgtaacaggaccaggaaaacaatgaggtatatatgtgctagtgcaattgtaaaccaaaaattgtaagctgtagaaccatcatttaattaatgaaatctcattcagaactgaaatatataaatgagatgaaagttttctccattttgattgacctgaggattgaatgggggcagggaccttctcatcaaccccttaaccctacacatacacaacgcgggtacttctgaaacacctctaatggaaacctggggctactgaggacacagtctaggaacccctgtggtagtgactgtttttctctaacccatctctaagaggcatggtccttcagtggcaaaaaaaaaaggaaatttgtttcacaaatccataaatactaagattttctaatatgttaagaacttataggagatagttctggaacagtatttgaagtgtgtctatacgtacgtgtgtgtgtgtgtatatatatatacatacatacatatatatttgatagctatgtatgtatacacacacacgtttatgtggggtaagaggaagggtcacccatttaggggttcttaaccttggcccaccttctcccccagggaaccatgaacttggatgaaaaaaatgactttattttctccaacctcttcttactgaaagttgacattttattcaattatcaatataggcaacaaatgacagtagcaatacctatgaatttgtcaccattaaaaaaaaatcacaaaatattttcctgtcctattatgttgttctagatatcttaaaatatcatttatgcccatcactataaaattacagtagttattagatctgttgctaaaccttgttatttagtgtgttaataaagaagtatatatattactgtatcacaaatttttgatacctgtatttcagtataattgattttctttgtaatcttatgtattttatttcaggcacataaaaacgctgttctgaaaaggcatccatgggctttaccagactcccagaagggtccatggcacaagagatgagatcaatgattagataaattttgtagaggaaaaaaatatatatgtattttatcacatgagctgagggattctcaaattaacctgagaaacatttactttttgtttattgcattttggtatgcttgctcttcaagcatccttcactccaaagcatgtaaacagaggtaacaatgatgcagtgacatttaaaacaaccaccaaaacagaaaccttccagacaaccttttctctgatattcgcatgcccacatgcagtgctgtaggactttgtgagagaacgcctttgcttttagattagacatttttttttccaattgaactaactatacctttagtatcaacttaaacctgaagtttaagtggttcttacctcactggacaagaagttttgtccccacatctcctgttagcctacacaatgactagcacatagatggtactcaggaattctttgtaggaggatagaatgattcagaagtaaattttaatcagctcccaatattaccctcacaaatgccagcctattccaaagggagtcagtgtgggacagtgggaagaggcgctggagtgggctcacaaggatggagtagggtcatgcttcactgctgccattctcccctggagccttctctgagcttgctttccccagatgtaaaatgtggtcagaggagtgattgagacagtctgtgcaaagccccagtctcccttgtctccttttattggtaaaattataacccggccattgtcactgagacccacatgatgcttctagaaatatttatgcttgccttttttaatgcctacttgtaaatcacaagatttgggtctttcaaattaagccaacttctgattagcaagtttgtataatggataaaatgatgcggttttggacactttatcagcaaaatcataggcaagttgggagctcatagtgaccctgcttgcttgttcctcttagggtgtgattccctaacttttacagtcccaaattgccttgccctgcttttaaaaattttttgttatctctcctaaaacatcatagagggaatatttaaatttttaattcccagtccctaaatatgcataatagggagtgtagctcattttaggatatacatgcagtgttgaaaagtttcacataaatcaatgtaaaatgcagtggcagaaatatttatccaaatcaacctggtagtaaattatttttgtaagcagacaaactaccctgtcaggtaaattgtcaccttaaaattattctttttatgatttcttatatttatttggggttttgggtttttttttttttttttttttttttgcacatggcatatatgaatattcagcaatattttttcttaatgaccattattttgaataggaaaataaatattataaatttttaatagtgactttaggaagcaacataataaatttgcttcataacattgcaatatgagagcacatactcatttgggttaagaaatttaggaaaagtaaagtttcctagcataaattcttctttttaaagaaaataataattttatttgcctttgacagagttttttatggtgctgtcctgtcttaaacctattatgctgagctcaatttgaaccttattttttttttgaatacagaaacatcattatgaatacaaattgttggactttgctactatacatgagccctcagaaattgcagaggtgtatacagtattttaccactaaatagcccagattgggccatttttgtatctttctgtgtacccgcatttgctgccgcttgaatttgttgtggtgaatcctttgccgcatttttacatttcactcgttgaagtgtgagcctcagggtgtttccaagctctttgggtgaaggaaagtgaggagtttgccactcaaagggctgtttgtgttcacatttgtttgtgataaatgtaactcaaatagcagggttgggggtgggctggaataaagaaggccatcagaattagattattgaagaaatgctgtgggactgaaccacagcaggaggaatggaaaagaaggaacaaattcaagagatgtttgagggagtattgacaggaattcatcagttatggaagagacagacaagaaaagttagatttttagttaaagccacttgctatatatttttattacaaaactaatacctagctactatagaaaaagtagaagatataggcataaggaaaaacataaaattatccataaatttaatcacctagagatgaccaccttaaggatcctgattgacgccctttatacatacacacacatgcacatgtatctatatgtatatatgtgtgtatgcatgtatgtcttgcatttattcatgtgctgaacataccatttaattccccactgagatgtatttaggctatattcaacttttgctagtacaaataatatgaatgtaaacattatagttaaatatttgtacatatccttatttccttaaatccttaaaagtgaaattattggatcaaaaaggcatttgtgttttacaggtgattgctagatatttccacattctgcaattcacagtgtccttcagaaagactataccaatttatgcttcaaataacagtctttcagcctaggtgattgggtatgtggtaatactattaactgagtaaaacttcctaggagaacctggcttaggggaagatgcttggttcagactggaatattataactgaattattttcattagcccccttgatattcaaatcccttgtgtgataataacaacaataaaataataatagcttacattcatcatactgttactgtgtgccaagcccttttcatgaattattttacttaattctcacaaccctgtgaactaagtggtaaaattagaccccattttatagagcagaaaattgaggtttagcgaacctgagtaatctgcctaaggttacaaggctatgataaatggtagaatagatattcaaattaaaacccagacttcttaacaaatagatcttaaaagtccagtagaggaaatgaggttacagtaactaagtagtattctcaagaaagtatggtaaagagctattaaaaaagggtcatagacagttcaaaagcaactggtctgttttcccagccccctgctaattcatcttgttctgttatttattatttttcctgttttaaatattgtccccttttcaaatccaagccagtatttctcttcatcaatgaagaattccttgacaaccctacctcaactcttcttctccatgtggatccacttgatgtctgcccatcaatgacctttatcacatgctatcttgcactaatagttatttttgaattccaggttttcccaaatgtgcttggagacatttaaggcaagtgctttcagtaaagtttataagaccttttggtagttaccatggagcaggcattgggctgaatgtattctgtttcacttgtactggctactatcctgtgagattaataccattattatctacagtttgtagaggaagaatcttgaggctcagaaacattattcaagttcacatagataaatgcctatatgagatataatcattttattggcatacagaagtgcttgagcgtgtcttgaaagacaagtagtatttgaatgggcaccaaaaaaaaaaataggagaaagggctttcccattagagagaattgtataaggaatggagaatagaatgtagggcagtgctcagcaatagctaataaatagcccaacagatttggacatcagtgtcattgggaggaacctcgaaaacagcccctgagagggtgaacttttctcctaccttgggaagccactgaaggtcatggtgcacagtagggtaactatgggcagtttgaaagtggaagactaatgtaaagattctcactctgggatctgatttacaaggatatcacaaacatggttaagaggattcaagaaagcttaattaaacccgtttctttacctatcagtaagtttcatgggcgaaattaaacatcagattaatgtgcttttttgtaggaatcacatcaactctgtgtgatgacactggttctctattcttcttgaaaactctggtcatcattgacttacttttcccctaacttaagagaggaaaaggaatgattacttaaaagcttttttgttcagaaatcaaaataattgcccactggaagtaattaaaaaagaatgttgttgtctaacatagtaattcaaggaagaggtgctccagttctgacaagtcaatagtggtagaatggaaaggagtggatggttcttaatgatagaaagagacacgaaaactgatgaaaatgttacaccatgaaccttcggagtactgagttttctgttttttttaatgataccagctatgaagaatgaggagaaaattaaaagttaacatttgaagagaaagtgcataaatgttaaataggagccagatcatatcactgaaatttatgtaatgtcaaaaatatatcttaggctgacgagaaaaaaaacgggaacattttttttcagagtccttattcaagtatcagatatataagccagaattttatttgttttgtttcagctttgactaaactaccctaaaagcaggtttgacgtatatatgaaaattaaactttcaaattaggtattttccaaatctaatgttttaaaaataaattcagacctttttttggggaaattctctatttcaattaagagctcctctttttgctaactggtttagtgggttgtctagaattttatacttttatgttcattcctgtttgtttttttctccccccttctcaaattctccctctgaaaatattctttaaaatgtgagatctccttgctcaacaacctatttaagtcagaaccatttgtatctgctctggccaggttgtcatttgataatcttgttatggaccaaatgatttgtagcctaagaaaaaccaccaaatccacatgtgccctaaagttagtggctttgaaaaagtagagaagaggtaaacataaataccattaaaaacaaatgatttgcacctttttatctgattaaattgtaaataaaattgaaaaatgaagatcatttaccagtgactgtgagtattccttccaagttcacaaaattttaatagaaatttttctccaggtttatgctaataattttctttctgtgtaacctttagaaactctggtagaggtgtttaacttcttaatgtctaagtggcaaaaatttactcaagcaaaaaattttctgatagccattttatgtcctattattaccccagtattggaacgcacaaatttttggctaagatattgagtctcttaaataaactggagcctctagagagaattcaaaaacagtaacagtttagaagttaagaatagtaacatttaaaaagaagattattattatttttttctttcagcaaatatgagtatcagaaaccacactttgaaaaataaacatattgggggatacatacatgcacacacatatgccttttaaaatatatttcctttttaaaacccgtctttgaatcaagtggatgtaatgtgctacttttagaatggaaaatgcatttactggcacgtctctgttcaaatttattttccatgttttctttaataagaccaatgttaacttagcaggaaaagttacttacagtgccagctgaggttcttttcactttacacaaagtagatgttattaagctggagagaaagattaatgcatttcctactaattccatagaggagaacatgtatctttattaatgttaatggtgggggcctctcataatgttatagaataatctgctttagcgaaggtttttcttctaaagaacttcataacatttaaaggttaatatgttaggtaaagaacaatatcttaagacaagtgtttttattacaggacatgatgggatggtttatattaaattatatgatgatttgaatgggaaagaagaaaaagtgcatcgcttcttgccctcaactttaatgcctttaatcaaataatgaccttctggaaaatagttaattttaagcatttggaaagatcaataccactttgccaccaaaaaatggtctagatgatgaaatttgatgtatttaaagtatcagttcacccttttaacctagtaaataatttaaaatgctttcagtattgctttgccactgtttctcactgcacagtgttatgattcttcatgaaaaaaggtcacaagtgggtgtgtgaagcatttagacctcacacctagaaatggggttgtatcttccttaggtcttgggtgtttctgcattagccaccccctcaaaagtatatatatttaaatagtacctttgaggcacagtgtgcataaaacatatgaaaatagaacccttctgtaactatactgttgtaatattgttttagttgttttttcagacagaaaaaggggtggtttaaaacattattaatcacttggcatctttgtgatatctttaaacctttatgctaaaggtgaaggatttggtagctctgacaattagaactcattttcccccagcttgtagaacacactgatatgaaattacccttgagtgccgacagctttatttaaaaaaaaaaaaaaaaaaaattgccctctattagcatgtttgtgggcagattaaaaactgtcttcattagcataagtaacacttacagattcttttaaaagtagaaaattatttgctgaatgataaattgctagctttatagttagttgttgttgaaaatgtactcattcaaatgcctggtgtagtttagtctacaatactgaattttttgttagaagtactatttaatggattatgtacttaatccttgttcctactacttgctgaaatgtaattcatgctttccactaaaatgtttgtatcaaatactttcctatttagattgatttcttttaatatcatatattattatactgtatgccccagagattggaacaaactattcctgcaaataacacataaaagatgagggtgagggggaataaatacagactgtaaaatgttttgctttttagaactcaaattaccattctgttttttcagatgtatttttccttcttagttgcagtaagaattgtcattttctttctctttttatagctcttagttttaaaatgtatatgtacataatgataatatatacatatatgtatattgcattaaatgactttttttctcagagaataccaaagtctgtttcctcctggaaaagtagttatgttacatactcccagctttgtcacagaacaggccttgttaggggttctcattctatgcatgtgaggctttataaagtacaataaattcatttatgaaaggaggttactttcttgactcaattaaaatcattgtgcaccccttccttatctgttaaaatgttagaagcgaattgacttgaattaaatgttgtaaaaagagtggagtggaaatcagagattgagtttggttggaaattagcagctgagagatgaaggtgccaggatttttatttaaatgtggtacaacaagattttgtcagtaaagcacatcattagaatattgagtttagaactgctaatttttcctttaaaatgagcatacagtcatgtgtttcatggaccataataaattgccattgtgttatcattgagtttgttttgcttttttgcagtactgatttggcagttattctgcattttctcttttccttttttttttttttttcaatcttacatttctttaatagatccctaaccaaaaccagtcaaaagaatgttatttatttcatacagtcttaggtttagcatcttttgcaccattttcttgcttacggtagcaagacatttgcacatggttcttggttactataaagtacataacagtatttcctttgtggcagatggatttaagacttttagttctcaataaatgtaggtttacaatacataactttacaggatttgtgttgtatataacaggtttgaacatattatctcagaattcatctgcatggcattttcagcttattcagcgtccatgccagttttttttaagtaatagggggagcactgtgattgattgcaacagctcaaggcgtgattttgaatagaaacaaagggtttagaacagaaggtgtcaaattaaactttgtcagtttgaaaagtagtaacatcctgaaagttttactaatttatttacatgtggctactgtttatattttgccctctttatatgcagtgtaatgttgcttggcaaatttactacatttaaagtttaggttgttccttgtaccattttagttttctgagaatggatcggtctcattattttaaggctgttagtcccctgtcttttctactgttcaaaacagttgtgagctcatttaatttagagaacagttccctgttcttcctatggtcttatgtatatcaagtcccagagacctctcttaaaaacgtaattatgttttgttttgttttgttggtgttttttttgtctttttgcaacaaagcactgcatttcattcctcatctctgctcccccacataagtctatgcagttaacacttaaaaactagtacagtactttggggaatcattatttttgttagatattaaaaatattgtgacatattcattttcttcccaagtttatttgttctaacaatatcacttgtggaaaactgacctagaaaaaggtactgaagcattagaaagcatttggcttctttagtcattttctgcaaaacataaatcagattactgtcattattaatagagtaacaatcaatagaatttgaggtagtcaaaatattccaaggtatttaaatagcattagaataaattatcttatttttgccagtgtaaactgggaatgagccaatttatttctacactgacagagagctaatgtgtcaaaatgtctgttttccattatttttttaagagcaatgcgcatcaagagaagcatcccctcccccttttaaatttttttggaataccctttagagcaaacagttcccagctgcaccgttaaatatttttctaagaagcatctgatttcagtctcttaaaatcatcgcatttcttgaaaggctagcggagacatgcttcgacttataattcatcaaattatttttagataaggaattagaagtattatttaagggcagaggttaatagcaaactactggaaatgttatgttagtcatgggcaattaataaaaataaggatctgtctcgtaagtctagagacacagaagtgacaatatgagcaaaatatttgttgaatgagtcggggctctttttctgcaatatttgttaaaccagcatgagtgtgattgtttaggaattagctatcattattagccattttaaaagaactaatgattttcttttccaaagaacatctgtgatccacatgtttttttcacatatatccaagtgctaactgatctctgcattactttaaaaagttcctaaaggatgtgaaaaatcactggagtttttcagctctctccaagaagcttttcttacatgaatcattcttaatttaacttttagcaatttttagttacaagcatttatttctaaaaaaaaattcttggatgctcaatgtttagcatttattgcaatagtagaatgctagctgagtttaaaaaaaatcttctgtgttctttatgaacctctaacttcttttgaaaggtatataaaactgtgtgatttgctgtgttcgggtagaggggttctgtcaattatgatagctaaaggaggcagacaagggggagagggaaagtaatctcacccacagttaatattcaagcctaccagaagataatctatctaaaacatacatagcaacaaaatttaaaggtaaagtataaagaatagcttagttgtaggaaaatgtatattttcatggcttaattcagatggcaaatatttaccagtaaaagctaagtaaacatctgcagggcaccatatgcaagtgggtctcagatacttcagatgttcacataacagttttatagttaatatattcacataaatagagctgaaatatgtcatattatagtattctggaaataaacatagaattgccatggttagaagagaagcaaattcagtgacattgccatcacaatgatttttatgttttatttagctaacagtctttcaggtaaatcttcagtttactgcctgctgtcttaaccttgaattatgcattcagtggcatcaaatgagtgcatggttacaagaccatgacatgcatatatttgcttaattaaaagacatgttgaataggaatactagtagatgtcatgagatacagcagtcgtcacgatgagctgcttagcagataggccttaggaagccaatatgtcagttttctaccttttcttttaaaatatttcaaggaggccatttttgggagaacaggccatgcttctttccactatacatattgcagttgaagaattttctctctaatcgtttcagtttgagaagggaaggaaagtcatgccatcctctggcctcactcctggtaacataagaaacaaaaccctccttggctagatctaaaaattacataattaaaaaaaaaactatacttccattttcatccgactaatttatttaaaatttccgagaaatgtctttgtcttagatcaagttccctaaatgcagagcctaggatggggagtcaggtgatcatgatttggtaagggccctgggaagaaaggaggaggatagggaagcgaaagaggtcccataaggatatggtctcaggcaaaatctagccccagattgatggagggagcaagaagaatggggatgactgtctctagagagtaaattgaagggtagagtaagttgtccattttcagaaacaggggcagagactttgtgccactgggtcagccagtcactggccacccggggtgaggaggtcaatgaagaagtgtagagttggtttcaagacattttttgagagcagagtgcaggtgagaggtattagcaggcagcagaacagctgaggggtagctgccttggctggtgggggtctggatcagacacccttactcttccccttcactccattgtttagtgtccatcatggcagccaaggtgaagactcgagatgactggaaaatatattcttcatgatcattcagttcttgatagataacctcagggtaaaaaactgggccttggaaacatcagagaggtgcagattttggcagtcattggacatttccttctctcttagcccaagaaacctattaaattcttgcctgacaaatcatatgctcccactgcagcaggcggaaaaataggactccagtgtctctctttggagagttctttcatagcaaattcctgtaatgcccattctaatcattatgccttatactggaaaacattcttgctggtgtaattgcacctgtcctttctgtttcatacatgtacacacataaatattcacacacagttttctttcaaatccaaaaagtacaagcttaggaaatccttttagaaaaaaattatttctaaaatctgtcctgcctcttaggcacttccgtatcctcagatggccagccactcgtcagatagcaaagttgtgcaagactgaagcacatcaactttgtttttctcctatttcatatattaaaaaatctgtgataaatgctctgttaccctcagagtctgaaaaaatatgtccctcctttgagatgcaaatctgaactttgattagaaacagagtctgcctccttgacagccacagataacctctcttaacaagttaaaaacaatttttaaagcagaatggtgtgttctgagcttatgaaaaagttaattcatagggtttttcctttttagctcctaatggaaaatgccagcccctctcataggcacaaactgacctattatgcccttgtctctaagggatggttgtgcgagctgttacgctggaaagaagatccttctccagaaaacagaaccctgtgggagaacctctccatgatccgaaggttcctcagtcttcctcagccagaacgtgatgccatttatgaacaggagagcaacgcggtgcatcaccatggcgacaggccgccccacattatccatgttccagcagagcagattcaggttcgtttactttggccaattcagtatagcaataagtaaataaagctttaaacttagcagggaaattagcgtttctcttcctcctgccagtctaaccataggctttttagcaagagataacaatacactgccatcttgctcagggggataaaatgaatattaacatactttttccagcgtatgtatcgtgttcctctttcctcatctcccagccaccaaagcaacaggaaccccttttttacactcgtttggcaaatgtgtctttgttggtattgggttttgtgttaagagcttaaaatttttgtgtgttttttaaaaatcacaatttaaaacaccacctattttttaattaataccacagtgcccctgaggaaaagagcaaccgctgttgctgtaaaggaagtttgtagaatcacaattttatacattggattctgtccagaaagaggaggggagggaagcttaattggaatcttgccttacagtccttggcccttccttcaccttgtatgtaatagctgtctccccacactttacagaatgtaggttaggggtgagtcatctctgtttgtctttcctttagagcccctctcccaccacccttgggaaaggagagtctagaggcgttttcttaccaggcctgccgacccctgcaccatggctcggtgctgctcctcaggtgagcgggcacagttacctatgccaccaagggacacagagagggggtgacctaaagacctgctccccaggtcaggattttcaaacctgtaaaggccctactaaccatggtcgtgggcagagctcactgtgccagcagatgcagccttatgctttgtttgtcatgtcatgggacttgtcaccattcatctcctgaagacactcttctgtgaatttagatggaaaagttctgggatcaggtagtcattagcgcttttagggccccagttgcttagaaagcgtgttgtcattgaacttgagttgtatagcttatttttgttaaaggggatgattttagctctcttttaaagtaaaatgccactgccttccagagtcctaaaattctacctctgttgagtcacctacattctgcaatttttttgtatttctgtgaaaaattatatatatgtgtgtgcgtgtgtgtatagatagatacgtataactaaaaacagtaataaagttatttatctaccaggataaaaaaattctcaagtgtgtattaaagataaaacaagttgacaaagagcttccctttaggatatcaagcactaaaataatcgtgaaagcctgaaaaacttactgtttagcaaaaacaaaaaagagaacgatatatgttaattaatttaaaaagtacttattcgaaaatataaattgtttttaataaaattgcttcttaggggtataaaaggaaatgcatagacacggtatcagcattctaatattttgccacttaggttgatttactttgctgataagaattatggatatcgagtgtacagtatgtgcatgtgtcacatatttatgtataattgtgtatggaaattgtagcacatatacatatactaattatgaaaaagtgtctgtatacactaaatttaaatcctaaccacatctgagtttgctatagacaaaacaattcgctagctgtcgtatggtggattgaaccttttgaggtaagaaaaaaacttgcagtgtcagcctagtgcaattcggtaagaaattgtgtgtgtattaaattggaactgtctgatagaaaattcacaagtgtgagaatatcagaaatcctttagtctcatgacagataacactgaataagagcataagctcatcttctgttcttcctggccatccaatgaaacggagcagaacacaaatttctttccccgctgctctgtagctcacctttctgaaatgtctttgaaatcctttcctctccatcttcattttaaatctttgttaattatttacatcataatttgatgtgctgtcttcgcctttgatgcgtatcattctagtgaattttatggctcacattttcagagcactgagttttcacttcctctgctgatctctgataagtaagtgcagtagccccccaaagctgtcttaattcatcccttcctagtcatatcattttgatttttttgtaaatgctgtcggccatttcgccggcctaccttttctttctaaatcttcatccctatcaaagaagctatatgtaggatccgggaccacatttttcctgattggagacggctttgtgtggaactccacgatagcagagctctgattgtctccttgtttctttgcagcaacagcagcagcaacagcaacagcagcagcagcagcagcaggcaccgccgcctccacagccacagcagcagccacagacaggccctcggctccccccacggcaacccacggtggcctctccagcagagtcagatgaggaaaaccgacagaagacccggccacgaacaaaaatttcagtggaagccttgggaatcctccagagtttcatacaagacgtgggcctgtaccctgacgaagaggccatccagactctgtctgcccagctcgaccttcccaagtacaccatcatcaagttctttcagaaccagcggtactatctcaagcaccacggcaaactgaaggacaattccggtttagaggtcgatgtggcagaatataaagaagaggagctgctgaaggatttggaagagagtgtccaagataaaaatactaacacccttttttcagtgaaactagaagaagagctgtcagtggaaggaaacacagacattaatactgatttgaaagactgagataaaagtatttgtttcgttcaacagtgccactggtatttactaacaaaatgaaaagtccaccttgtcttctctcagaaaacctttgttgttcattgtttggccaatgaatcttcaaaaacttgcacaaacagaaaagttggaaaaggataatacagactgcactaaatgttttcctctgttttacaaactgcttggcagccccaggtgaagcatcaaggattgtttggtattaaaatttgtgttcacgggatgcaccaaagtgtgtaccccgtaagcatgaaaccagtgttttttgttttttttttagttcttattccggagcctcaaacaagcattataccttctgtgattatgatttcctctcctataattatttctgtagcactccacactgatctttggaaacttgccccttatttaaaaaaaaaaaagaaaaaaaagagtttgttactctattgtatgttacaaaagaactatagactgtggaatgcagtttaaagatgacatatgccaacaaatgccttgtattatatggcactgccgtaattcaaatttgtttttattttggaaataaaagttcactgtacttttttttcattctcattgttacatgattttttaaaaaaaggaaaagaaaatgtgaaacacaatttagtcctcattatttatttgtagatcctgcagcatcatgttgtaattaattttttggaagtttccgttaaatgtaatattgcttctcttgttaccatactgattcttttctatttataaatgtattttgatgggcagtaaaacaaagtgtcttaaaagttttaaatagagaaaatgtgctttacacagttgcctataaaaagtgctctatgttatccaagcaattcatactataagcttcactcttattgttgtatgcaatttttactatcatgcaaataagcttaggtaaataaaactaatagatcaccttagaaaattatgcaattaatgtgaaaataattgatgtttgcaatgtgtcttcctttggtttacaatcaattttaaagctacatctgtataaaatttctgtataaaggtgtatttcttttttatgagtttatggctatgaaaacagctattttgttacagctggctgtttttataagtgtatcacaattttctttatgcagaaatgttctgactaggagtggttattgactgtaactacacaattaaaattgtttgtatcgtatgacatggtagggtttgtctgcttatgtgaagtaactaaaggagtcaaaggatggccctctcatttaggtgcatgttaataacttgttatttcactgattttaaaaagagcaattgacaagttacttgaaacactgtaaatttaaatcacaaacacatgctcatttttaaataggtatgaaatttcacaatgaaaataacctgtttggttaacattttgcttaataagtagagataggatggtcaaaagactctccgacaaaaacaaatccagtctctagcagttatgttgttagaatggattcatctgtgcttatttcacaatacttcatttatagcaatgcttttccttaagctaatgtataaatatttctaaaggccattaatagtaacaaaataagtagggnnnnnnnnnnnnnnnnnnnnnnnnnnnnnnnnnnnnnnnnnnnnnnnnnnnnnnnnnnnnnnnnnnnnnnnnnnnnnnnnnnnnnnnnnnnnnnnnnnnnnnnnnnnnnnnnnnnnnnnnnnnnnnnnnnnnnnnnnnnnnnnnnnnnnnnnnnnnnnnnnnnnnnnnnnnnnnnnnnnnnnnnnnnnnnnnnnnnnnnnnnnnnnnnnnnnnnnnnnnnnnnnnnnnnnnnnnnnnnnnnnnnnnnnnnnnnnnnnnnnnnnnnnnnnnnnnnnnnnnnnnnnnnnnnnnnnnnnnnnnnnnnnnnnnnccctgatgagcttattggtaggcaactgggctgctttagtgttgaacttgtactttagaaactgaagtggaatcattgaaaactttcaataaagctttaa

SEQ ID NO: 258 - DNA, 4079 bp, Homo sapiens
cagccaccgccgcccccaacgtccatgcctgtgatctttagacagtgactgagtatggatcatttgaacgaggcaactcaggggaaagaacattcagaaatgtctaacaatgtgagtgatccgaagggtccaccagccaagattgcccgcctggagcagaacgggagcccgctaggaagaggaaggcttgggagtacaggtgcaaaaatgcagggagtgcctttaaaacactcgggccatctgatgaaaaccaaccttaggaaaggaaccatgctgccagttttctgtgtggtggaacattatgaaaacgccattgaatatgattgcaaggaggagcatgcagaatttgtgctggtgagaaaggatatgcttttcaaccagctgatcgaaatggcattgctgtctctaggttattcacatagctctgctgcccaggccaaagggctaatccaggttggaaagtggaatccagttccactgtcttacgtgacagatgcccctgatgctacagtagcagatatgcttcaagatgtgtatcatgtggtcacattgaaaattcagttacacagttgccccaaactagaagacttgcctcccgaacaatggtcgcacaccacagtgaggaatgctctgaaggacttactgaaagatatgaatcagagttcattggccaaggagtgccccctttcacagagtatgatttcttccattgtgaacagtacttactatgcaaatgtctcagcagcaaaatgtcaagaatttggaaggtggtacaaacatttcaagaagacaaaagatatgatggttgaaatggatagtctttctgagctatcccagcaaggcgccaatcatgtcaattttggccagcaaccagttccagggaacacagccgagcagcctccatcccctgcgcagctctcccatggcagccagccctctgtccggacacctcttccaaacctgcaccctgggctcgtatcaacacctatcagtcctcaattggtcaaccagcagctggtgatggctcagctgctgaaccagcagtatgcagtgaatagacttttagcccagcagtccttaaaccaacaatacttgaaccaccctccccctgtcagtagatctatgaataagcctttggagcaacaggtttcgaccaacacagaggtgtcttccgaaatctaccagtgggtacgcgatgaactgaaacgagcaggaatctcccaggcggtatttgcacgtgtggcttttaacagaactcagggcttgctttcagaaatcctccgaaaggaagaggaccccaagactgcatcccagtctttgctggtaaaccttcgggctatgcagaatttcttgcagttaccggaagctgaaagagaccgaatataccaggacgaaagggaaaggagcttgaatgctgcctcggccatgggtcctgcccccctcatcagcacaccacccagccgtcctccccaggtgaaaacagctactattgccactgaaaggaatgggaaaccagagaacaataccatgaacattaatgcttccatttatgatgagattcagcaggaaatgaagcgtgctaaagtgtctcaagcactgtttgcaaaggttgcagcaaccaaaagccagggatggttgtgcgagctgttacgctggaaagaagatccttctccagaaaacagaaccctgtgggagaacctctccatgatccgaaggttcctcagtcttcctcagccagaacgtgatgccatttatgaacaggagagcaacgcggtgcatcaccatggcgacaggccgccccacattatccatgttccagcagagcagattcagcaacagcagcagcaacagcaacagcagcagcagcagcagcaggcaccgccgcctccacagccacagcagcagccacagacaggccctcggctccccccacggcaacccacggtggcctctccagcagagtcagatgaggaaaaccgacagaagacccggccacgaacaaaaatttcagtggaagccttgggaatcctccagagtttcatacaagacgtgggcctgtaccctgacgaagaggccatccagactctgtctgcccagctcgaccttcccaagtacaccatcatcaagttctttcagaaccagcggtactatctcaagcaccacggcaaactgaaggacaattccggtttagaggtcgatgtggcagaatataaagaagaggagctgctgaaggatttggaagagagtgtccaagataaaaatactaacacccttttttcagtgaaactagaagaagagctgtcagtggaaggaaacacagacattaatactgatttgaaagactgagataaaagtatttgtttcgttcaacagtgccactggtatttactaacaaaatgaaaagtccaccttgtcttctctcagaaaacctttgttgttcattgtttggccaatgaatcttcaaaaacttgcacaaacagaaaagttggaaaaggataatacagactgcactaaatgttttcctctgttttacaaactgcttggcagccccaggtgaagcatcaaggattgtttggtattaaaatttgtgttcacgggatgcaccaaagtgtgtaccccgtaagcatgaaaccagtgttttttgttttttttttagttcttattccggagcctcaaacaagcattataccttctgtgattatgatttcctctcctataattatttctgtagcactccacactgatctttggaaacttgccccttatttaaaaaaaaaaaagaaaaaaaagagtttgttactctattgtatgttacaaaagaactatagactgtggaatgcagtttaaagatgacatatgccaacaaatgccttgtattatatggcactgccgtaattcaaatttgtttttattttggaaataaaagttcactgtacttttttttcattctcattgttacatgattttttaaaaaaaggaaaagaaaatgtgaaacacaatttagtcctcattatttatttgtagatcctgcagcatcatgttgtaattaattttttggaagtttccgttaaatgtaatattgcttctcttgttaccatactgattcttttctatttataaatgtattttgatgggcagtaaaacaaagtgtcttaaaagttttaaatagagaaaatgtgctttacacagttgcctataaaaagtgctctatgttatccaagcaattcatactataagcttcactcttattgttgtatgcaatttttactatcatgcaaataagcttaggtaaataaaactaatagatcaccttagaaaattatgcaattaatgtgaaaataattgatgtttgcaatgtgtcttcctttggtttacaatcaattttaaagctacatctgtataaaatttctgtataaaggtgtatttcttttttatgagtttatggctatgaaaacagctattttgttacagctggctgtttttataagtgtatcacaattttctttatgcagaaatgttctgactaggagtggttattgactgtaactacacaattaaaattgtttgtatcgtatgacatggtagggtttgtctgcttatgtgaagtaactaaaggagtcaaaggatggccctctcatttaggtgcatgttaataacttgttatttcactgattttaaaaagagcaattgacaagttacttgaaacactgtaaatttaaatcacaaacacatgctcatttttaaataggtatgaaatttcacaatgaaaataacctgtttggttaacattttgcttaataagtagagataggatggtcaaaagactctccgacaaaaacaaatccagtctctagcagttatgttgttagaatggattcatctgtgcttatttcacaatacttcatttatagcaatgcttttccttaagctaatgtataaatatttctaaaggccattaatagtaacaaaataagtagggccctgatgagcttattggtaggcaactgggctgctttagtgttgaacttgtactttagaaactgaagtggaatcattgaaaactttcaataaagctttaa

SEQ ID NO: 259 - protein, 757 aa, Homo sapiens
MDHLNEATQGKEHSEMSNNVSDPKGPPAKIARLEQNGSPLGRGRLGSTGAKMQGVPLKHSGHLMKTNLRKGTMLPVFCVVEHYENAIEYDCKEEHAEFVLVRKDMLFNQLIEMALLSLGYSHSSAAQAKGLIQVGKWNPVPLSYVTDAPDATVADMLQDVYHVVTLKIQLHSCPKLEDLPPEQWSHTTVRNALKDLLKDMNQSSLAKECPLSQSMISSIVNSTYYANVSAAKCQEFGRWYKHFKKTKDMMVEMDSLSELSQQGANHVNFGQQPVPGNTAEQPPSPAQLSHGSQPSVRTPLPNLHPGLVSTPISPQLVNQQLVMAQLLNQQYAVNRLLAQQSLNQQYLNHPPPVSRSMNKPLEQQVSTNTEVSSEIYQWVRDELKRAGISQAVFARVAFNRTQGLLSEILRKEEDPKTASQSLLVNLRAMQNFLQLPEAERDRIYQDERERSLNAASAMGPAPLISTPPSRPPQVKTATIATERNGKPENNTMNINASIYDEIQQEMKRAKVSQALFAKVAATKSQGWLCELLRWKEDPSPENRTLWENLSMIRRFLSLPQPERDAIYEQESNAVHHHGDRPPHIIHVPAEQIQQQQQQQQQQQQQQQAPPPPQPQQQPQTGPRLPPRQPTVDAESDEENRQKWRTKISVEALGILQSFIQDVGPDEEAIQTLSAQLDLPKYTIIKFFQNQRYYLKHHGKLKDNSGLEVDVAEYKEEELLKDLEESVQDKNTNTLFSVKLEEELSVEGNTDINTDLKD

SEQ ID NO: 260 - DNA, 4926 bp, Homo sapiens
tcttcctcctcctccccctccccccgaacctcttctctcctcacttgctgggaccccagacgctcacagccccgcgtcaatgggcagggagagggtccttgcggctgttgtcagcgagggcagaatcaaaagtggcattttagtgcctttccggggcttttctcgcgaccccctgccccccaccctcgctgtcccccgctagatgccctcgttgggggtgcgaggctgtggggaaaagtttaaggtttgttaatattagtcgcgattgttggcgaggggggtgggggtgattggaagggaggcgaggtggccttcccaatgcgcgttattcggggttattgaagaataatattgcaagtgacagccagaagtagactttctgtcctcacaccgaagaacccgagtgagcaggagggagggagagacgcgaagagaccttttttcctttttggagaccttgtccgcagtgatttttttttttttaagagaatcctcagtcaccacgtcgtttccccagcaccatcacagtgtacagctcataacgggttttgctttgtttttacgatttccccccaacgaatcacttgtcagatcaattttatcttcttcctcctccctgcttcccactctcccctcctccccatcgcaaaccccgttctctgaggttagacattttacaaacccctatatgttggttttcgaattgtgattttttttttaaacccctttctcatggctactcttctagacgtttatttctgcccttcccccgcttaggggggcgggggtaggggaaaggaaaataatacaatttcaggggaagtcgccttcaggtctgctgcttttttattttttttttttaattaaaaaaaaaaaggacatagaaaacatcagtcttgaacttctcttcaagaacccgggctgcaaaggaaatctcctttgtttttgttatttatgtgctgtcaagttttgaagtggtgatctttagacagtgactgagtatggatcatttgaacgaggcaactcaggggaaagaacattcagaaatgtctaacaatgtgagtgatccgaagggtccaccagccaagattgcccgcctggagcagaacgggagcccgctaggaagaggaaggcttgggagtacaggtgcaaaaatgcagggagtgcctttaaaacactcgggccatctgatgaaaaccaaccttaggaaaggaaccatgctgccagttttctgtgtggtggaacattatgaaaacgccattgaatatgattgcaaggaggagcatgcagaatttgtgctggtgagaaaggatatgcttttcaaccagctgatcgaaatggcattgctgtctctaggttattcacatagctctgctgcccaggccaaagggctaatccaggttggaaagtggaatccagttccactgtcttacgtgacagatgcccctgatgctacagtagcagatatgcttcaagatgtgtatcatgtggtcacattgaaaattcagttacacagttgccccaaactagaagacttgcctcccgaacaatggtcgcacaccacagtgaggaatgctctgaaggacttactgaaagatatgaatcagagttcattggccaaggagtgccccctttcacagagtatgatttcttccattgtgaacagtacttactatgcaaatgtctcagcagcaaaatgtcaagaatttggaaggtggtacaaacatttcaagaagacaaaagatatgatggttgaaatggatagtctttctgagctatcccagcaaggcgccaatcatgtcaattttggccagcaaccagttccagggaacacagccgagcagcctccatcccctgcgcagctctcccatggcagccagccctctgtccggacacctcttccaaacctgcaccctgggctcgtatcaacacctatcagtcctcaattggtcaaccagcagctggtgatggctcagctgctgaaccagcagtatgcagtgaatagacttttagcccagcagtccttaaaccaacaatacttgaaccaccctccccctgtcagtagatctatgaataagcctttggagcaacaggtttcgaccaacacagaggtgtcttccgaaatctaccagtgggtacgcgatgaactgaaacgagcaggaatctcccaggcggtatttgcacgtgtggcttttaacagaactcagggcttgctttcagaaatcctccgaaaggaagaggaccccaagactgcatcccagtctttgctggtaaaccttcgggctatgcagaatttcttgcagttaccggaagctgaaagagaccgaatataccaggacgaaagggaaaggagcttgaatgctgcctcggccatgggtcctgcccccctcatcagcacaccacccagccgtcctccccaggtgaaaacagctactattgccactgaaaggaatgggaaaccagagaacaataccatgaacattaatgcttccatttatgatgagattcagcaggaaatgaagcgtgctaaagtgtctcaagcactgtttgcaaaggttgcagcaaccaaaagccagggatggttgtgcgagctgttacgctggaaagaagatccttctccagaaaacagaaccctgtgggagaacctctccatgatccgaaggttcctcagtcttcctcagccagaacgtgatgccatttatgaacaggagagcaacgcggtgcatcaccatggcgacaggccgccccacattatccatgttccagcagagcagattcagcaacagcagcagcaacagcaacagcagcagcagcagcagcaggcaccgccgcctccacagccacagcagcagccacagacaggccctcggctccccccacggcaacccacggtggcctctccagcagagtcagatgaggaaaaccgacagaagacccggccacgaacaaaaatttcagtggaagccttgggaatcctccagagtttcatacaagacgtgggcctgtaccctgacgaagaggccatccagactctgtctgcccagctcgaccttcccaagtacaccatcatcaagttctttcagaaccagcggtactatctcaagcaccacggcaaactgaaggacaattccggtttagaggtcgatgtggcagaatataaagaagaggagctgctgaaggatttggaagagagtgtccaagataaaaatactaacacccttttttcagtgaaactagaagaagagctgtcagtggaaggaaacacagacattaatactgatttgaaagactgagataaaagtatttgtttcgttcaacagtgccactggtatttactaacaaaatgaaaagtccaccttgtcttctctcagaaaacctttgttgttcattgtttggccaatgaatcttcaaaaacttgcacaaacagaaaagttggaaaaggataatacagactgcactaaatgttttcctctgttttacaaactgcttggcagccccaggtgaagcatcaaggattgtttggtattaaaatttgtgttcacgggatgcaccaaagtgtgtaccccgtaagcatgaaaccagtgttttttgttttttttttagttcttattccggagcctcaaacaagcattataccttctgtgattatgatttcctctcctataattatttctgtagcactccacactgatctttggaaacttgccccttatttaaaaaaaaaaaagaaaaaaaagagtttgttactctattgtatgttacaaaagaactatagactgtggaatgcagtttaaagatgacatatgccaacaaatgccttgtattatatggcactgccgtaattcaaatttgtttttattttggaaataaaagttcactgtacttttttttcattctcattgttacatgattttttaaaaaaaggaaaagaaaatgtgaaacacaatttagtcctcattatttatttgtagatcctgcagcatcatgttgtaattaattttttggaagtttccgttaaatgtaatattgcttctcttgttaccatactgattcttttctatttataaatgtattttgatgggcagtaaaacaaagtgtcttaaaagttttaaatagagaaaatgtgctttacacagttgcctataaaaagtgctctatgttatccaagcaattcatactataagcttcactcttattgttgtatgcaatttttactatcatgcaaataagcttaggtaaataaaactaatagatcaccttagaaaattatgcaattaatgtgaaaataattgatgtttgcaatgtgtcttcctttggtttacaatcaattttaaagctacatctgtataaaatttctgtataaaggtgtatttcttttttatgagtttatggctatgaaaacagctattttgttacagctggctgtttttataagtgtatcacaattttctttatgcagaaatgttctgactaggagtggttattgactgtaactacacaattaaaattgtttgtatcgtatgacatggtagggtttgtctgcttatgtgaagtaactaaaggagtcaaaggatggccctctcatttaggtgcatgttaataacttgttatttcactgattttaaaaagagcaattgacaagttacttgaaacactgtaaatttaaatcacaaacacatgctcatttttaaataggtatgaaatttcacaatgaaaataacctgtttggttaacattttgcttaataagtagagataggatggtcaaaagactctccgacaaaaacaaatccagtctctagcagttatgttgttagaatggattcatctgtgcttatttcacaatacttcatttatagcaatgcttttccttaagctaatgtataaatatttctaaaggccattaatagtaacaaaataagtaggg

SEQ ID NO: 261 - protein, 757 aa, Homo sapiens; identical to SEQ ID NO: 259

SEQ ID NO: 262 - DNA, 65028 bp, Mus musculus
  misc_feature (1)...(65028): n = A,T,C or G
gcgcccgccctcgtcgccggaagtgtccgcatcgggggccaagcgagctctgggctcttcccaggtcgtcgttagcgtcggtgacccgaagggagtcccgccctgtccgggaagctggcatctaggacgagtagggctgtcggggcggagcggcccgagccctcctggaatcaagttccgtacagcaatatggctgcgtcctggaagtagaaagcgcgggtttgtctccgataggatggaggccaggacccaagcctatgaggcggcgtgaggttcctgacgttaggagaggctgtcgagtgtggcggtggacgagcctgagggatatttaacatcaggcttcctcaagtgctctggattcccgccgcccagcctcggaacaacaagcaggcgttactagttcccggatggtggtggcctgtccctgggctaaagtgtagattcctggctctcggcattattgtgccgttagctagttttgagctaagcagtccttttttgagtttgaggttccctagcggtcacagtgactcctcactttacgtctctactgggaaaccaaaatctcaggtatcacgaagatctccatcaccaaatagtagtcagcagatatattagcaggcattatatttcagactctgtaagcggcagttcatttacttcttgaaactaatggcattagaacataaaaatgatcgttttagtcgggcgttgtggtacacacctttaatttccacgctctggaagcgggggtggggtgggggtaggttgtgggggaatctctgaccatcctggtttacctagtgagatccgggacagctagagcaacatagacactatatcaaaacaaaacaaccaacaaacccaagcaaaaccaccccaaacaaaacccacacgtacaaacaactccaaaaactaaagagataattttgaggctcagtgaattcaatgactttagtttgtatgtggggcagggtccacacccgagagagtcttgaatttgaggccagtttgatggacctggcatacaccagggcaacctagtgactctctgtctttaagaaacaaacactattctgcagtcagttgcataagaaatttgactataaatgctattagacgagcctttaatttattttttattcggttttctcttaaggtttccactacattataataaagctatatccagaaatgcaaaacatatcttaagtgaagataaaaatgttctgtaaaacctagttactggagtgtggctcaaacagattataaatcttgaagttttgacctagcaaactagttaagttgtgaacttctgattactattcatgctgcacttggtttggctagagcactcttttaatcttactgccctacaactgataaggattaggtagggcagggatctgagaaatggagtgacttcctgtggcaattgtagtttgaaagcacaacagctgtctttcctttcattcctgtggccctctctaaatagatttatatcatttaaaaaagggtaaattcttgtaggtaattactatcctttgacttgacaagacactcaccttttaaggatttagtgacttgaatacttggaccatgtggactcgtgccttgactcaaggaccaaaaaaggaccatagagggcacccgaagaaaggaggatcaaactaagaagcatctttggctaagttggctgaaaaatttgaatgaccaattctgaaattaaaagacatttaaagtatcgcatttttccttaaaggtggtatgtacacactcaccttgtatgtttaaatataaaacctacttgtgtgtacaaagtacatcatcgatatacaggacagtaagaacttaattacaacattggtatcaaacccaggacccgcacgctgagctatactcctagccctggttgtgattctttttttttttttttttttttaagatttatttatttattacatataagtacactgtagctgtcctcagacacaccagaagtgggtatcagatctcattatggatggttgtgagccaccatgtggttactgggacttgaactcaggaccttcagaagagcagtcaatgctcttaacctctgagccatctcgccagccctctggttgtgattcttgattatcaggtttttgtttgtttggtttggtttggttttatgagaatgtctgtggtgcatcatttgcctcctgggtggttactggatcatcttgtcatttcattaacaaagtaaactgtcaacttccccagtgtcaagagcgtttttgtagtaaaaaacaaccccacttcttctgtctacatggattctcttcagctggatcccaggtctccttttggagcttctgctacatgctttgctcctgactccactactgtgtcgggcagtgaggatggaggaagttgtgaaatgatcacccaaaaatatgttttccaatctgagctatttaatgtcaccaaaccttacataattccagctgttcactaagagcaccaacaaagtaacaaaaacgaaaatctactgaatgaggatgaacaagagggctctgtttctgttgggaaagtaggaagtgttaagcgtctttttttttttaaacatgaaacaaaaaaatttcattaagtatctcaaacatcttcccattttcttttttttattattattttttttattacgtattttcctcaattacatttccaatgctatcccaaaagtccccccacatgctccccccacactcccctacccacccattcccattttttggccctggtgttcccctgtactggggcatataaagtttgcctgaccaatgggcctctctttccagtgatggccgactaggccatcttttgatacatatgcagctagagtcaagagctctggggtactggttagttcataatgttgttctaccgacagggttgcagatctctttagctccttggatactttctctagctcctccattgggggccctgtgatccatccaatagttgactgtgagcatccacatctgtgtttgctaggcccccccattttctaagtataaaagagttaataatgcagaaggtgttagcatgtccaagagcgattgtgggttgccctccaactcactgcctggctgagaatcacaggctttttatcctcctgtctccacttcccaagtgctggggttctcagcaggtgccgtcagtcacctttaatcatactttctaacatcctgctattttaaacaacacattgcatgtttcaaaaagtaaacagaggtcaggagaggtggccctgctgctgaaactcacagtctgagtttgatcacgagggcccacttggtggaaggagagaactgcctcctggaagttgtcctctaacctttgcctgggtgtcgtggctatgcacccctccccacagtgcacaatgaatgcatgaataaataaatggattctcaatgcttgtgagaaaacctaaaagaaaacaagagtcttgtgacctcagatgcttgaaaatcatgaaattgttcttggaatgtgcttttgtgtccctctcaggtgtagcagatacaagggaatttattcatcacgactggactttgttacttgtttatatgcctttatggaaaattatgtttttaccatatcctgcttgtcaacctcatttggcttgcctttgtgattgtacctgttactcacgtgactcttaaccctcagaatataaattttccaatactctgataaactgataaactgataaacttggctatcacatgagagattaatctgcctcatcaattggctttcttctcccaggtgtcactgccaacaagagtgggaaatagttaactgaatgtttttacacctgtttttgcttttaaaatttctatgaaacaatttccagttattcagtggcttttagggaattgtaaaggccttgttttaggaataggctcctataaataaagtttgagagaagggtgtttttggaaagttttctagtggtaataggaaagcttctatggaatatacatatttataaggtatgtgtgtgtatgttttttaaagatttatttatctattacatgtaagtacactgtaactgtcttcagacactccagaagagggcgccagatctcattacagatggttgtgagccagtatgtggttgctgggatttgaactcaggatcttcgggaagagcagtcggtgctcttaactgctgagccatctctccagcatatgtgtttgagtatatactttggggcagttttccaggcatttgagtctgatacagtggtacacagttgtaattggaacactttgggaggtagaagcaggaggaacaggagctccaggccacccttggctgcacagtgaggttcatggtcggctcaggctatctgagatcctctcccaaaaagccaaacacccctcaaaaacaacagcctccccccaacaaaaatagatatgtgagcatactctacaggatcaaatggtgggagtagggtttttctttgcttctaccatgttgaccataggccctggggattgaactgaagttgtccggctcagcagcaagcaccttcgacatacgctttaatcttttgggtgtgttccagtagtgcagaggtgatcgtacaaactccctgtagatactgtctcgttaggggtaagaatgaatgattgttcatttggcaaatgtgtgagctccttccatctgtgtttgtgcataatgatgaagcaagatgagcacagtgcctttatctattgtacctcagaactggttaaaaaatgagggaagcatgctaagagttagagtaaggaagttactcagagtaacctctgccactgtgggagatacctgaaatgctgtcagaaatgcatggttgtttttttttttggacatgtttttccttttcaacaagtatgtattgattcatctacatgtgaaacacagaaaagaaaacctcagaggtatcactgtcactaattcagaccaccaagcatttgactttagtatgggtaagaggttgggttggttgtttgtttgtttggttggttagttttcgagacagggtttctctgtgtagccctggctgtcctggaactcactttgtagaccaggctggcctcaaactcagaaatccagctgcctctgcctcccgagtgttgggacgaaaggcgtgctccactatgcccggctgtttgtttgtttttaatgacatgtaactgtagttaggctgtcttggacccacttaggctgtcttggacccactgtgtagaccaggctgttttaaactcacgtccctgcctctgcagtgctgtcatgataggtgcatgccaccatgcctgacaaacgtcccatttttaatgtggaaggtacagatcagcatatgtaattaatacgatcataatgaaactgatcatttctgatatgctaacgaagttacctagctagcctactcttacatctttttatgtaattagtcaacatgtattttaggctgttgagaatttgagactatgtgagtagcaatcagcaatgaaaagaagttatggctctgtgttcctgctctcatgctctgttgtgtggtgtagtcaggtgcagaatattgctagtaacactggcttgccttataaccctcagatcaagtctgaaggcctttaaacatttgcatttatttattgtgtgtgtgtgtgtaggtgcacttgtgcaatggtttgcatctggaggtcacaggacagttttcaggagctctgttcttgcacaattgtggatctggtgataagtatcctcttgccagcattctaaacatcatttaaaatatgttaaaattgacatttttccccctgaggcacttttgctatgttgctaatgttttctttgaacttgaccctcctacctcctggctgttgggagtataacaatacttaggatctgtctgtctttcctccccttcccccaccccccacttttttttttttttttttttttgaacagggtccaggtagcccaggctgttctggaatccactgtgtagcagaggatgaccttgaactcctacccttcatgcccctccattcatttcctggttttgcaggcttgagatgccatacttggttttaagatttctttcttgcctgcttccttgcttccttccttcctttcttcctccctcactccctcccttccattctctttctttctggtttttgatttattaatgtgtgtaagtattttacctgtatgaacctctgtgtactgtgtgtatgtctggtgcctgcagaggacaggagaaggtgtcagatccactgcaactggaatcttagtcatgagccaccaagtggatgctgggaactaagcctgggtcttttgcaagagcagtactgcttttaagcactggtcttttgctacagccctagattttctttgatagcttgtagatggttcatgtcagaaataaagaaagttgagagaagatatgtcatatgcatataaactgatgggtaactatggcaactgcttatgaagaactacagttcttattccatgggcactagtacactttgcattgattttgatctcaatggaacttcttacctttaaaaaaatagaaacaatattaaaaaatgtagtataaaactaaaatctagcaggtttcaaaatgtcagtattgtgatagactataacattatttttttttctcatcaccctctcttagaaacgtaaaagatgggctggcgagatggctcagcaggtaagagcactgactgctcttccaaaggtactgagttcaattcccagcaaccacatggtggctcacaaccatccgtaatgagatctgacgccctcttctggagtgtctgaagacagctacagtgtacttacatataataaataaataaatctaaaaaaaaaaaaagaaacgtaaaagatgtgttgctttcaatcaaggcgaattggatgccatggagtatcagacaaaggtaggactaaaatattgatcatgcaggaatattagtgtgaagtagcattaaaaaaagaccaaaataaatacaacagtatcttagaaataaagaacttgttttggttggagttagaatttgatagtgctttattgttttttctttgtaatgaacacgttaagccaattttattaataccatgcatgcttctatcagctcaggtggttggtggctgtgaccttgtgttgttggttgagttcatggaagatgtttcagtgttctaactttctcatgcttccattcatgtgttgaatttagttcaacaacaacagctgagcgtagactgttctccacctgtatatctgtacatatgacatgaaaacagagggttatctgggggtaagaaggggaccagtgccaggagagtggaacgaggctgttttatatgcgaggtcagcagggtaatgtgcttttgcagagtcagacctgctaaagattgcatagactgaactagagcttttaaacagtctgcacagtctctattttcagtattggaaatgatgtgaggatgaaatatataacatggggaattatgaaaaggatgctgacaatttacagtaggaaaaacatccctgaaaataacaagaaaacctccaaaatattaaacatcagagtaagtagactatagcaatagatggacagcagcatagagttagcctgcagagggccagctcccatgatcatatttcatacatatgtgtcattgctcatattccacccccannnnnnnnnnnnnnnnnnnnatgttgctaatgttttctttgaacttgaccctcctacctcctggctgctgggattatagcaatacttgggatctatctgtctgtctttcctccccttcccccaccccccactttttttttttttttttgaacaggatccaggtagcccaggctgttctggaatccactgtgtagcagaggatgaccttgaacccctacccttcatgccctccattcatttcctggttttgcaggcttgagatgccatacttggttttaagatttctttctttcttgcctgcttccttgcttccttccttcctccttccctccctccctcccttccattctctttctttctagcttttgatttattaatatgtataagtattttacccgtatgaacctctgtgtaccgtgtgtatgtctggtgcttgcagaggccaggagaaggtgtcagatccactgcaactggaatcttagtttttagccaccaagtggatgccgggaactaagcctgggtcttttgcaagagcagtgctgctcttaagcacgggtcttttgctacagccctagatttcctttgatagcttgtagatggttcatgtcagaaatgaagaaagttgagagaagatatgtcatatgcatataaactgatgggtaactatggcaactgcttatgaagaaccacagttcttattccatgggcactagtacactttgcattgattttgatctcaatggaacctcttatctttaaaaaatagaaacaatatttaaaaatgtagtataaaactaaaatctagcgggtttcaaaatgtcagtattgtggtagactacaacattattttttttttctcatcaccctctcttagaaacgtaaaagatgtgttgctttcaatcaaggtgaattggatgccatggagtatcatacaaaggtaggacaaaaatattgatcatgcaggaatattagtgtgaagtagcattaaaaaaagaccaaaataaatacaacagtatcttagaaataaagaacttgttttggtcagagttagaatttgatagtgctttattgttttttctttgtaatgaacacgttaagccaattttattaatactacgcatgcttctatcagccaggtggttggtggctgtgaccttgtgttgttggttgagttcatggaagatgtttcagtgttctaactttctcatgcttccattcatgtgttgaatttagttcaacaacaacagctgagcgtagactgttctccacctgtatatctgtacatatgacatgaaaacagagggttatctgggggtaagaaggggaccagtgccaggagagtggaacgaggctgttttatatgcgaggtcagcagggtaatgtgcttttgcagagtcagacctgctaaagattgcatagactgaactagagcttttaaacagtctgcacagtctctattttcagtattggaaatgatgtgaggatgaaatatataacatggggaattatgaaaaggatgctgacaatttacagtaggaaaaacatccctgaaaataacaagaaaacctccaaaatattaaacatcagagtaagtagactatagcaatagatggacagcagcatagagttagcctgcagagggccagctcccatgatcatatttcatacatatgtgtcattgctcatattccacccccactacctttcacctttttaacccttcttgctagtcccctcctccctccaagttttcccccttcttccttcatgatgcatacacacacaacacaattaaataatgatatgcatatatatatgtgtatatatgtatatatatatatgtgtatatatatatgtatatatatatataatcaaatctacactctgaataaaaaaaaccctgcattattttgttcccctttcgcccagttttcttttggtttgaacatttggtagatatattcagattgctactatagaagtcatggaatagttagattatatattgaattcttccccccccccccgagaaactaccattgtgctctttatagctgccactaacagtgcataaaggttccagtgttttcaccaaatcattgttttgttttgaaattgccatcctaatgtatatgaatgtgatcttgtgataattttgtgtatcttggcattttatatttttacttccaatgtgagaaaaatgttttctaatatctcctttgatttcatctttgacctgcatgaattatttagaagagaactatttcatttgcatttgtggttgatcttagtattttttttcttgatttccaacttaagtcatttggggtttaaaaataaattctagttctgtaaaagagcgttgttttgtggaccaggatatgaattatcttggagattgtactctgtggggttaaaaagaatgtatgttcggtaacttctggatgcagtgctcctatgtatagtattgaggactttggtatctgtgtgatttttgtgttgttaattgtgtttttgtgttagttgttctactcttactgggtagtgttgcaggatgtttgatcacacggtgagtcctgagactgtgctgtttactggaaaacctgtttctaattgtggtgtggctcagccctcgcacagacttttaatctgagagctttctgcttattgttatcaggattaaataaagtcaaccataggtcaagaagtggaacaagcaaacagttgacagagagtgaacatgggaaaataccatagagcgtaagagaaaggaggatgggtagagagatacacaggaagtagaagggagggacattcatgttgaagttaggtcttggttctacctctcagtcccatgtgcccagaaataagactcagcctcaaagtatatttacatatacctttgccatatagctaggctcttctcagactagaatcataacttatgataacccatttattttaatctacattatgtcctgtggctggttccctgtgctcaggtaccaagtgtctgtctgctcacatcttcccaggaagatctcccacctagctctatcctagaactctttttcttccctggatgtcctagtggtaggttttaaaagatgggtttcgaacagtgtgtatgtgagtatttctcacatattgagagatgtgagatgtggttcccagcactcctgtgaagactaagattttagcaagtgaacgagatggtggcagaagatatggagtgtctgggccaggacagagaactctgtggctctgctttatgttcacaggtgacctttgttccccgtatcctacaagaatgttgtgaggcttttctgtgcagagcatacgtggtagttatctctctcctcaccacatccagatgtctgacagaaacaacccaagcaaggaaaaaaacatttttggctccaagtttcagcatttcacatactgattgtcacatttcttagctgtgagtttatgcagtgtgcttcattctgtagacttcaaaagtatgctgtcagtagtcttagagtctcattatactataaaatcaatcactctacacttaagaaaggtggttttggggctggtgagatggctcagtgggtaagagcacccgactgctcttccaaaggtccagagttcaaatcccagcaaccacatggtggctcacaaccatctgtaacaagatctgatgccctcttctggagtgcctgaagacagctacagtgtactgacatataataaataaataaatctttaaaaaaaaagaaaagaaaagaaagttggttttgaaaataatcagatattcaaagtacagtagaaatttaattatttgaaaaaaatttaaatttaaatcaaattaaattttattttttgtatatagatattttgtctgcatactatatgtatatgcctggtgcctttggagaccagagaaggtgacaggtctcttaaaattggattaagggtggatgtccacgattatgtgggagttgggaattgaactcagattctcttcaatagcagccaatactcttaaacggctagtctatctctccagtccctggaaaatgattttaaaaccaatatcattttaatgtacttcaaacattttttttgaacagatcagagagctgattttggatggatcttcccagttaatccaagaaggtctcagaagtggtttcctttacccacttgttgaaaaacagcatggaagtagcagacacataactttaccacttgatgcctacagtttaacagagttatgtgagatggcaaaacatttgccttccttaaatgaagtggagcttcaaacactacagttgattggaggtgatatgtctgttatagagctggatttatcctcacagatcattgaaaacaactccaccttttccaaaatgattactttaatgggacaaaatacctgttgccaccacaaagcagctttcttttgtttgacatttcttgtatgcagccactttttatttttttttaattttttcgagacagggtttctctgtatagccctggctgtcctggaactcacattgtagaccaggctgtcctcgaactcagaatctgcctgcctctgcctcccgagtgctgggattaaaggcctgtgctaccaccgcccggctccttatgtgcattctggagaaccagcccggattagtacatttggtagcctttacctgctgatcatcttgctctttaaactttgttgtcttaacagtatttttatttgtgtgtgtgtgtgcatgcacattcaagcacatgtgtgtatgtttgtgtacgtgtatgcgtgtgctgtaattttggggaacatgtttagtttttgtttttgaagtattctgcgtattcagaccagagctttgcttatgagagtgtgggctctataggatgtcctcagtctccatgtttagctcttagactcatcatatacagagggtgtttctgaaattgtgcttttgatttcaggtagtaagacatttgatgcaattgtgattgatgcatcatgggagaacaaatcggctaaaagaaggaacaggtgtgtgggattgtattctagaactgcagttccttgttcgttctggttgagtacactttagacgtgatgtctgttatctgaagccactaacatgctcccatcacatgctcccatcaaaagattaagttcctcaattctaggtccttgaactggaggtgatctgtgtgtctctatatattagttctccataactgatgtaacagtgtctgcagctgtcactgaggcctcacatcactcagtgacaccaaggcttccatttgcctttgcctttgttgaagtttgaaacttagacctgtgccatccttgtagtttataaccacgtgctgggtgggagttcacctagctcttcctctgtctgtatttttagtttaggtcacctcagggtgagctcggttaggtactgggatggcctttacttttagtaacatccttataacttgacaacacttttcctcctgcttctaatgattgcttccaggtacattttctcctcagctttcagtttaccagtcataataattcctgttttgttgtaaaattagactgaagttcttctttaagagttatctttagcttacttaggaatatgcttatgatgtgtgtaagagttgtgcaaagaattcatgtatctattctgagtatgtatgtctttatatttttatgaagtaatatagacttgaagtatggactgaaatataaaatcttgaaataagagaaagttatgaatcaccatgtgggtgctggaaattgaacccacatcccctggaagagcagacagtgctctaagccacttagccatctctccagcccccaagtaagagaaagttactcttaaatttttggtgtaaagccgggcatggtggcacatgcctttaatcccagcactcaggaggcagaggcaggcggatttctgagtttgagaccagcctggtggtctacagagtgagttccaggacagccagggctacacagagaaaccctgtcttgaaaaacaaaaacaaaaacaaaattggtgtaaatgtaaaagaagcagaggtgctgcacatcttcatcatcatgtggttgtcaagtagataactgacattaatatgaagctcctatggacacattagtgtcatctgtgtttattcagagctcaccagttgtggtagaaagcatttgtagcatacagaaacagtaatcatgttctgtgctgaaatgtatgccctcagggtccagtggttcctctgtgactcataactgcgctgtaataacaggtaggaagttctgtgaaactttctgacagattgttgagtctaaggtgattttagagatgaatagttggttttaaaagtgggttcagttgtgaaaactgtgccttcaaaccttgtagttgagctagctatggcagtacattttagttctcttggacacttaaacctaggtataaagttgctgtgccctgtgataaatctatccttaaaattttgagacaccagagggagtgtgaaaatttccttagttccaaacagtccagttaagcaaagttaaggaatgaagccattggaaacatgtcagcacagagctttgacctaacacttttcctacggtgacagaagagtctctgaaagtcttccctgtgagaaagggacacctgctgtgctgggagtgtgatggtggatggcaggagcccagggggcacacagtctgagttctttcatttatctgcttaataagaaagggttgtcagccatttctgactcctttaatgtagtgttacctacatcagaaaccagatgcttgagcctgccctctgggagactcatttttttttctaagtaagtagagttgcacacgtttcttcagagttgattgaggaatgaaacaaagcggaggtagtgggaaggcttaagtccatgcgttcctagcctagttactgatcagaggaaattgacaaaatccccattagatgcagcttacagaaggaaaggtgagtttgccccatgcatttagagatgtcagtccatcttattaggaaaggctggcacctcctttcacatctttaggagcatgcagcagcagacaggaagtagagagcactaggttgggaccctggggtgggcttagccttccaagatacctcacccctcctattgatctatttcagccagccagtctccacccttagggctctctcgtctttagaatagcaccacaatccagactgaacattcaacagtgagccagcagacgtgctgtctcatcattggtgggggactgtccagggttaaaacaatacttgggcctacaagatggctcactggcaaatcacaatctccacccagcctgacgatctgactttagttcctgaaattcacaggatggaagcaaagaactgactccttccaattgttctctgacctccacacacatcctacaataggcacacatctatatcaatgaacaaacaaacaaattttattttaaaaagcctgatatatccgttcttcttcctcctttcttcatctctttcacgtcccttgtcttcttttcttttgtataatccaagaatgcttacaggtttatagtgaacaaccacaggggttaaagatgcagaagcaggtgagtgattggcattacaggatgtcagagtatataaatgagaagacagtgttggaaggataaactttagtagagaatgtcatatatttccctgtagagaaggtgtgttgatctagatagatgaagtatataaagagggggggagataatttggtaggtgaagagacctggtggcttttattttaactaaagtctgagataacttcacctgccaaggcatgggcagaggacctgaaaagcggtaaggattttacagtatttaaccatggatagataaaagaatctatgattgttttaagaacttgagaatagattcaaagtttcttttgctctgtgttttccttcacttcatttctctgtatgaagaagttgaattccattgcggtattggtatgtacagggggatacgtcagtgacagagtatgtgctttgcatgcacaggccctgcattcagttcctattgtgtgcatgtatatgtacatgcacacatcacatgcatgcatgatgacaaggcctagcttatgtaattgggatggggtgtgggaggctgagtgtagttgtttgtgttggcagattaacagttgagtgtacattatatggttgtgctttgaagttgctcagaatagtgtcaaagttttcctttgaggtagagggatctcagagattcgacacactgaatattgagagtgaggacaaaatgtgttcattgaggaaggtttggtgctagtgtggctggtaaatgtacttcttaaagagaaggggaggttttgtcaaagttgaaagagtctagaagcaataatgggacattagaatacagtttgtgtcatctccatttgtatggggaatgttggagaaagagttgtatttgtttggatatttatagagcaagttatgtggtttagccagacaagtttctttgatattgttaatggccaggaggtataagacaatgggcctataagatgagacagagtatgaaggcttgagagagcccagtggaaccgattaaacaggccaaaggagtgcagtagtagacggggccttgaaactgtaaagggaacatgaggttgtgtgaaatcataggtgacctaggggtcagtggtgtgtgcaagacatgaggcttacacacttgaggcttacacacttgagacttacacatttgagacttacacacttgaggcttacacacttgaggcttacagtgaggcaaggctccttgctgaagtcatcccactcttgcatccctggcctcagagccagtgcttcttttgtgtcatttggttattgggacatcagttagtttcaaacttactctgatggggctcatgtgaaacacaggatgacgaaatccagacagtatttgtttaattctgaatgagaaaaaaggcatattagatgtggtaaaattactgaaatgcaaatcatatgaaattaaaaaaacaaaagccatacaccttggcaatttaaaattaggaagatgggaaagttggtacatgtgtaagtacagtgagtcaccaggtgtcagtgggactccacagttagccacatcagtgggactccacagttagccacgtgggagcggctcccaggcctttgtatttgtggggtcttttccctgcttacatgtctttcttggggtgaattttattacagtttttttttgttgttgttattgttcatttttaggtacagtagtttatcaccacagcagataaagcgaatgcctgtccctaagtggctgctgctgactgtctcattgttacttgggtgaccaatgggcagaaacatctgtgttttgtgaaggaggagctatatccttcgtggtctgtggaagttgttgcagagtggtactgggtaaaagtgagttcagaagttagcttgtctgttagctcagcatcactcttcactcccaggaagatgctgactcttctcggtgtgtccgcggcactgctgtcctcctcaggctctgacaagaactgtccatgctttgtatctgaacaccggtcttcctgctctcaaggtgtttatcccgtgtctctgtagtgggctcccaaactgctagcctgtttttttttttttttttttgaaacaaaatcttaaccgttcagttttaccagtgaagtcttgggagccagatgctagggcgaaggcctgctagctcagagagacagagaaagcacccagctgaccttcctccttagcagtcatcccacaagaaatcccctctctcacaccatctcaaaaaacctctttcaaactatgtgtctctctctatcagtcctcctgactccctcttactctctgtggtttttttcttaataaccctatgttcacttcctatcaactgattgcttgctctgcctcttgacctatggttgactttatttaatcctgtatacaatattcaagcagaaagctcttgaattaaaggatgattttttccagtaaataacagtcttggggtggatggaatatcctgcaactgcagttgaatgaataggaagttagggctgccttgcctttattctctcctccatataccaaaatctcattgccctttgcattatccatagtttctacctatttatggggatgaggacaaagattagtaagagcactgtggagaggacgggaaggcgcagggaccaagaatctttcattctctggtttttttcgccttgatacagggtctcctgtaacccacagtcttgaggttgctatgtagccaaggatgaccgtaaacctatataatgatggttagctaccttccaggcttccaggttccttctaggtttattttattttggagataggatcttgctaagttgccaggctagaatttatagcaccaagagccagcctctgcaccaggtcccttctacctcatcacctatcccactctcttccctgactaaactgtgactctgaaggctttagttttaactacttggtcacatggctggtaaccagtgaatgtcctttggtcgaattaatgactgagttagcgatggcctggtttccaggaacaagtaatcataaaaagtagaggttgtttatgtgcgagatgacaatacaatatatttaaagtatccatgctatgtgagtgttcaaacatactgtatagctacattgtccagtatggtagctgccgtgacttgtagctctccagtacttgacttgtgcccttcagatagagaggtactgttgagtgttaaatatgtgctagacttgaaagacccactgtggaggaaaatacatcatgatacctttaaaactgattgcatgtggaaattctgttttagacatgctagattaaatgcaattaaggtaaattaccttgcattctttttttttttttttttacttctttctaatgttactactagagaatttaaaattatataggtggcttgcatttgtggctcatacaatattttttattggacaatactagcctagaggtttaataaccactttttgctggaggaaactgtataataataatggttaaaaaaataatggttctccttggttccttcctttcagatcacaaattcaggagagtttgtgttcccattggattctcctcacaaaaagccttatgaatgtcttatactggagagagttaaagaaaaaactgctttagcattaaggtaagaaaagcaatttttcaaaattatatgaatatgggcttttaaaattaatacagtaatcactgattttctttaatttttatacttttgaaatctgaaaagtatgttatataataaataaaaatttatattagcttttgttttatcaaggctatagtagttaatataaaaaattacattctaaaaatgtttgaatttttaaattgatttctctattgattctattttcaaatttattactagaattaattatttgaaagacaaaagaaaaatcaatgcaactgtagcatataattaaaattaaaaattatcctgggctggagagatggttcagtggttaagagtaccgactgctcttccaaaggtcctgagttcaaatcctagcaaccacatggtggctcacagccatctgtaatgagatctgacgcccttttctggtgcatctgaagacagctacagtgtacttagatataataataaataactcttaaaaaaagattattttaaaaagttatcctttaagtaacagttggttcttttgttgtgttgtaattaggaatgtagatgtaagaacgcccctggttccagatcagaagttgattgtcagtgtgccctgtgttcttcactcacacaaaccgcctcttaccgtatgtttctgtgaaacagaactgtcagaattggaaactattcagagaagggttgaatttagattgaatgctctgtacgcttatgaattggatgtttgttttaatattctgaaatgttgtagaaaattcacagcagaatttatgaaatcgagcacaggttagtttacatcaccttagattttcttgactctctgtgtccctccagttgtggacgtgacaggtgaaagccgttaggtgaaagacgttagggcctgcagttcagtgagtggccttgtattgccctcagatttaggattcagagccagaaaatcccttgcttgttctaaaaccaggagccaagcaaataatggcagtgtctaggaccctctgaatgtagtaatttttttcttctgaagacagactgccattttgtaacaagggcagtcagctgctgatgctgccgttccctccagctgagtgctcagggttacactcctcattgggagtaactgagcagcagatgggtgggaagggctggccctgggcagcggcttccatgtgtcccatgagtgtgagtcgtggcctagctgctctgcaggttgtctgaactcttcccctgccaccctcattccaagagtgagtaacaacatgtagtactgcagagtggcaaggactgctttcattgcatagagtgtatttaaaagtcaaccaatgctcacgttttcaaatttgagtttggtcatggaagtccttgagattctgaatttgatattcaaggtttattttttagataacttcttcagaaaaagactttattaattcgatcattactacttaaaaagaaaggcaaatacaaaacaaacaaaaccaccaaacagcaagagaaggtctataagctaccactcaagagagctatgatccgcttatcatttttacgtttgcaggacataattcatgagctaggaaaagaaaacataggaaagtgaacttaagggagttggggtgagtcattcatgttcatgtacaaagccaggccggtatgtgtgccagcaagcccctcaataggggcagagagaggcgcgtcctagagagccccctggccagccaaatgctgtgcctgtggttcagtgagagaccttgtctgaagggagtacggcagagagccacgagagaggatacctgctctggccttggcaggcacactatggtatttacatactctgtgcctgtatcagactgtagagcacagatacacatgcagacacaccacaaacaagaggaagtatactcagggtttctgttaccttggataactttacaagggagtccttacagtacctttgagaaatatccatatgtgtttgaccattctttgtcctagaaggatcctctgaaacctcacctttgggactgcaaaattgctactaatgcattggtctgtgacctggatgaaagtgaactttactgctccttgagaaaaaaatattaaatatcggttgtactttcaggaaatctaatttgtatacttgaattttgtttatcatttggtatggaccaaagcttagtgcataagccatttgtcttagggtttacagtttgctgttaaagatttacaaaaaaaaaaaatctttaaaatctcaagcctttattctgaaataaattttaatctatttgtcatttcatttaaaatagcataaaaatgtttaaagattactcttagctgggtggtggtgtcgcacgcctttaatcccagcactggggaggcagaggcaggcagatttctgagttcaaggccagcctggtctacaaagtgagttccaggacagccagggctatacagagaaaccatgtctcaaaaacaaccccccccccaaaaaaagaagattactcttaagagaaaaggtttaggtatcagagtaattgtggcttcatagaatgagttgggtagagtaccttctgtttctattttgtggaatagtttgtgaagaactgggattagatcttctttgaaggtcttatagaactctgcactaaacccatctggtcctgggctttttttggttgggagactattaatgactgcttctatttctttaggggggactgtttagatcattaacctgatcttgatttaactttggtacctgtgaaagatcctgacagaatgtaaaaggtcacagaagccctgaaattggcaagatagatttcattgctagcagaattagtttcactgatttagaaaaatagaggtgcacaatgctctggccactcctcaaacctgtgtgtctgccaatgttctgaccaggtgtgtgcccaatgctgcacctcactgccaggtgtttgtgatattggttgctggcaaagagtcaggaaatctccccagcaaccatagtcggggccaatccggagtgctgcaccttcattagactctttctttgtacccctcccatacccatttcttgaggaatcaatcattttagaatagatattgtttatatctggaaatttcttactccccccttctcctcccccccccccgagggcctataaaaactgggtcctctttcccctcaaggtcgactcctctacccctgcgtgggatatgttgtccccagagctctggctttccccgaataaagcctcatgtggtttgcaacaagctcggtctattgtgagttcttgggtgtccgctattgtcctgaggcctgagcgaggggctcctctcagagtctttcacctggtatctgtctagaaacttgtccatttcatccaggttctccagttttgttgagtatagccttttgtagaaggatctgatggtgttttggatttcttcaggatctgttgttatgccccccttttcatttctgattttgttaattaggatgctttccctgtgccctctactgagtctggctaagggtttatctatcttgttgattttctcaaagaaccagctcctcgtttggttgattctttgaatagttcttcttgtttccacttggttgatttcgcccctgagtttgattatttcctgccgtctactcctcttgggtgaatttgcttccttttgttctagagcttttaggtgtgttttcaggctgctagtgtgtgctcgctccagtttctttttggaggcactcagagctatgagctttcctcttagaaatgctttcattgtgtcccataagtttgggtatgttgtggcttcattttcattaaactccaaaaattccttaatttctttctttattccttgcttgaccaaggtatcattgagaagagtgttgttcagtttccacgtgaatgttggctttctattatttattttgttattgaagatcagccttagtccatggtgatctgataggatgcatgggacaatttcaatatttttgtatatgttgaggcttgttttgtgaccaataatgtggtcaattttggagaaggtaccatgaggtgctgagaagaaggtatatccttttgttttaggataaccgcaatacctctcctaggcatatatccagaagatgtttcaactggtaagaaggacacatgctctactatgttcatagcagccttatttataatagccagaagctggaaagaacccagatgcccctcaacagaggaatggatacagaaaatgtggtacatttacacaatggagtactactcagctattaaaaagaatgaatttatgaaattcctaggcaaatggatggacctggagggcatcaacctgagtgaggtaacccaatcacaaaggaactcacacaatatgtactcactgataagtggatattagcccagaaacttaggatacccaagatataagatgcaatttgctaaacgcatgaaactcaagaagaacgaagaccaaagtgtggacactttgccccttcttagaatttggaacaaaacacccatggaaggagttacagaaacaaattttggagctgtgacaaaaggatggaccatctagagactgccatatccagggatcaccccataatcagcttccaaacgctgacaccattgcatacactagcaagcgtttgctgacaccattgcatacactagcaagcgtttgctgcaaggaccctgatatagctgtctcttgtgagactatgccggggcctagcaaacacagaagtggatgctcacagtcagctattggatggatcacagggctcccaatggaggagctagagaaagtacccaaggagctaaagggatctgcaatcctataggtggaacaacaatatgaactaaccagtaccctcctggagctcgtgtctctagctgcatatgaaacagaaaatggcctagtcggccatcagtggaaagagaggcccattggtcgtgcaaactttatatgcctcagtacaggggaacgacagggccaagaagtgggagtgggtgggtgggggagtgggtgggggagcgtgtgggggatttttgggatagcattggaaatgtaaatgaaataaatacccaataaaaaaataaataatttaaattttaaaaaaagagagggaaaaggtttagtcttgcccttagtctattaattgcagtttgactgtaatgccagtagagggcagcacaaacacattttagagtcaaaaacatatcaaccccaagttgtatttgtggggaaaatctgaatggtggggaaaatctgaatgattcaatatagttaattttcaagctttgcttatgcagtaatatacaacaaacatttctagtactttttgttttatttttagtactttttgtttttgagttcatgtaagtttagtgtatgtattttagcttagacaggtacaagttaaagctattagaaaataactcaaagattttttttttttgttttttcgagacagggtttctctgtgtagctctggctgtcctggaactcactttgtagacccggctggccttgaactcagaaatccgcctgcctctgcctcccaagtgctgggattaaaggcgtgcgccaccactgcccggccagatttctcttttaaaaagagtagaacaggtgaatatttcagtttttaaaacagacagcaaattagagtcaaacttgtcatggctgctctgctattcatgtcaggaaccagaggaccaagcacctgctcgagagcagtaccactgagcctacactggctctgacttaatgcttttcattggcagatgaggagcgagggctgcaatgcccacatactgactctctgctttaaaaataaaaccaaggccacacctagcttgagactggcttaattgttgcccctgctctgccctccatgtgggagttacctactgtgtccatcccagttctcaaactcatcccccctggggtcccaagtctcccctttcaagcaacccactctagaggcagttcatcatttgggaaggacactcacaatgtagcctaggttggcctttaactttaatcttcttacactgggttccaggcatgcatcaccataccagaccctagatgtaaaccctgaaagaatttttagtttcaagaacacatgaggttaaggcttttctactcatatgattcaaaagactcttaattatttcaaaggaccagcttacgttttttttccttttctttaatttttttaaaaaatactatttctatgtatttgggtgtttgtatgtatgtatgtatgtatgtatgtatgtatgtttgtatgtgtgtatgtatgtatgtgcactgttatgtgcctgatgcctgcagaggccaaaagaatcattggaccctctggagggatggttgtaagccaccatgtcctttagaagagcaacctgtgctctaaactgctaagccaccctcagccctgggcctcacattctttgaaggagtttctacgtcctctcacttttcctatcatgcaccaccaacttgttgcaggctcggggtttcccactggcactggttctgaagtgactccgagacttaattatttatgaataaatgcctaggccataagttttggctcatttcccaactaacttataacttatataatctgtttgttctagtttgtgtctgccacatggttggttacctctcctcagtttcatatgtccgtctcctcttagtccaggtggccgaccttaactgctcttggatctttcccagaatcctttctttctctgccagatgtcctaccttctatttcctgcctcagctaacaggtgatgcttccacacagtacataagagattctctctacaagttgtcacatccttggaagtgctaaagcactgtgtgcacagttcccagtttaccaatatcttgcttcatcctcaatacatgcttgtgaagatacagctaagatgagggagcaggtcctcgggataactggggtggctggagactaagaactgaattctagcccagcgtggtggcgtacacctttaatcccagcactcgggaggcagaggcaggcagatttctgagttcgaggccagcctggtctacaaagtgagttccaggacagccagggctattcagagtaaccctgtctcaaaaaacaaacaaacaaacaaacaaagaactgaattctatttgggttccttacttaaggtactttctgttgtgccatttgctaatggacctgagatgtttactcattttcatttttaaaaattgaatgcttatgagtgtcttgtttgcatgtatgcatgtgtgctacatgtgtgccttatgtcagcaaaggccagaagatgatgttggataccctagaactgtagttacaggtggttgtgagctgccacatgtgtgctaggaatttgagcagcaagtacttttaaccatagagctgtctctctatccctgaacctgagatcttaacaacagtcgaattagctcctactcaaagggctcattgtatgtatgtttagaatattttttacattattatggaaacataccttttcagtgtacttcagcatcacgtagcatcagtttccttaagttcctgactcagtgtttcttgttagagattttataggtgaattgatagcctgagagaggttgaagatctaatgggctggtaacacttttgtctaagccattaacattaccatgaccttggttttatctactcagtcacattttaaggaagttctacaaaacactgagtacaggtagctaaaagggggaagattccacaacccaactcatgttgtctgttaatctctggatgtatggaccaacccaaaattccacagagagtcttaattaccagttcagttactagtctacttgagtttgataacaagtcagaactgtatggtgctctcatactatatatataaagcagattctgaattggaggggtgggactggcaagcgttgattatgcaccagctatatcccaggagtctcaggaaggcacgggcatgacaaaaggagcatttagggctgtgaatggaagaacgttgccctttgctcactaaaggccactttatttcacaccttttgagctagcatgcgtgggctctttctcctcttacacacttgtgcacaagggaagaagcacccaggtccaaggcgcgagcagagaggcagggagggggaacggcaagcagcccctggtccttcagggcagcccagtcccctcgtcctgtccggggctcctcaaccgctccgcacagccagcgttcgagggaaagcgcgaccgcatcaagatacagagagctggagcggaataacggcagaaggcggaggcgacccggtcagcgaggggcgggggcggggcgatagcgcaggccccgcccttcggcggttcccgtgctctgattggctcccgcggccgcgcgctcccggccctccgcttgaggttcttaggcgggttttgcggcctgcggctagcgacccagcacgcaaccgcctgaggtagatcgctgaggcggaggctgtggggccgctcgctcttcgccggcctgcgcaggtaccttcacctgcccgcccgcccgccggggcctgatggcggggttctgggtgtcgcctgtgccctccctctcgctcccacagtcctgcgtgaggaggcggggacgcctcagccccacatccccgcggcctcgagcagccccgccggccccaagggccgggcatcccggaggcggggacgggaactggcggtgcggggcgagaggagggagaccgggcagtgcggctccggcgggtggcgcggggttggtgcgcggtggggagcgaggctcggcctcttcacggggctgagggatgagtcctgccgctgtgtcccgtgtcccacgcccccggcccgagtcctcccgggctggagttctgagctgtcgcgtctcatcgcgacacctttagccactttctccaaaagtacgaaagttttcctgcctacctgccccctgtcgtcagcgattgactgtcagatgctcacacggagaaactatttctaatatatatatatgtgtgtgtgtgtgtgtgtgtatgtatannnnnnnnnnnnnnnnnnnnnnnnnnnnnnnnnnnnnnnnnnnnnnnnnnnnnnnnnnnnnnnnnnnnnnnnnnnnnnnnnnnnnnnnnnnnnnnnnnnacacacatatgtaatatatatagtaaccactagccatacacatacatatgatcctgtcgccagagtttcttcagatgcttacagaattcagctgtatgtaccagacaaacagaaccccagacctcacacacccggacatcgtctttatgaattttgttgtgattttttttcccaatgttgggtcgaatgcatgccactgagttgaaggatctttaacttttatgttgtgagacttttccttcagagatccaaatcgatcaatatctgctcaccctagacagggcattcgtgacagagcaaagtagggattccacccaagtccgctttggtgaagcccgggtttacaagggtatctgtgggagagggcttactgacagatagagcctgtgtggctcaagctgcgtccctgaaaagtccacccagctcaggggaagccctgggaaagctgccgtccttactgctttagaaccttggacaggggcctgtcgactcttgggagttgtttatttttctgagtcttgtttcgttacttcgtcttaagcagcttccctttaggacagaatgtgtcttgtttggagacaatcagcgagcttctcttatttccccgttcactctttctcttgagaaatgcctcatcgttttttcacttgttctttatttcttccctcttgcattagaactcttactcattgatgcatctaaacaaagagctaaatttaaaaaaaatacagcaaagtagaatttgacacaggctgcagtttttcttcgtaagctcttaactgcacaaactttgattcagtctttatgaacttcagtgaatctctatttgggaatttcagccatttcctttccctgttttctcaagtcttagatgaaataatctgatacatgaagtttgcattttcttattttgtttcaatataaaaacattgtttaaaagtcacttaccattgagtaaaacttagctcctggacaatgtagcacagtgttctgcattctgatatgtctgtcttacctctgaatctagccctgccctggtcctttttgaaaaacttaatgactgtttggttttttgttgttgggtcgtccccccccccccagaagaaaggcagatgaaggaatcaaaagacaaataattgtagaactaattataatttccatctattttggttgttggttagttctgtttgtttcgctttgagttgtccatgctggtctttgagatatatgttgtccacgctggtttcagactgaagatacagctgtggctacagatgctgtgactagcctggtctcagactaaagatactttcctccctctccctctccctctcctctcccctcctctcctctccccctcctctccctcctcctcctctcccctctccctctttctctccnnnnnnnnnnnnnnnnnnnncctctctctcctccctccttccttctctcctcctctccctctccatcccttctttcttcctttctacaccacacacacacacacacccctacctcttgcattcctgctgccttctaaggccaggaaagggcattgaatcccctggaactggagttggatgcttatgaatcactatgtgagtgttgagattcaaacctgggttctgtggaagaatggtgagtgttcttaactattgagccatctttctaggctctctgcctaattctttataatctaaccctacactggttaatacagtaaccactagccatatgtgaccattaaacacttgaatttgtcccggtacaacagaaaagtttgatttttacttaatttaaatataaaatgaaaggagtgtaaaatactatcctatataatttttttttgttattgttggtttttttttcaagacagggtttttctgtatagtagccctggctgtcctggaactcagtttgtagaccaggctggccttgaatttacagaggaccgcctgcctctgcttcccaagttatgggatcaaaggcatgtgccatcactgcccagcacgacttcatttttatatgactgtatttcaaactatttactaatcagcatcaaaactgagacatgtataaggcattaaaaatctaccagacttaaatgatttagtatttcattaatgatttcaaaatgatttcattaattttatattgattagatgttaaaattatatgttagctctattgtattagatatacaaaaattaacttcctttttttttagcgctgaggattgagcccaactcttgtgtgtcctaaacaagtagctatagttccagccctcgtgggtttgtttgtttggttttttttttagtacagcttaaaaaatataaaattatggggggctggagagatgattcagtggtgaagagcactgtctgcttttccaagggatccaggttcagttctcagcacccacattgtgctcacagctgtctgctacttcaggtccagcacatctgaaattctcagacatgtgcaagcaaaataccaatgcacataaaataaaaacaaacacaaaatataaaatatggatatgactctcagattgaaggtatccagctagtttttatattaggtatagcctcacctccagcaggaaagcttttaagagtcaggagagaaaatctgtacataactctctgaatgccaagggtagtgtggctgcctgggtcactgtgagtcatagatcagagggtctcattaggatcttggagttgttctcactttatttattcatttctcgattccttattattatgaaacaattcaaccaaaaggtaatattaattgtaataatatccactagtcaccaacaaatcccaaatagtaatgaacactcatattgttgaataatgacagataactttcatttcagacttacatagcactatatattaatatatgcttatagtcagccattcagataggatggtaacaactttaaaaattaaattactttagagctgggcatggtacatagctttaaacccagattcaggaggcagaagcatgcagatctcttgcgagtttgaggccaacctagtctatctaattagttccaggccagccaagggctacatattgggaccctgtctcaacaacacccgccccccccacacatatgcacatcaatttgtaagaaccctacaaagcacatgtgccatttatttgctaaaacttttcagaaaataccaataactgcttattgaatatggagactttgtgacccagaaaaacttaccaggaaagaaggaagaccacaaaaaaagaacaaacaagtttccgatttgattttgagttccagaataaccaaagcaaaatggacggagagggggtatttactcagaagcagcagagcatttctgagtactgtaagagcagtttctaacatgatccagtgttacaactaacattttaatagcaaaatcaacatttgatatgactgcatctgatagtatgcagttagtttttatatagaaatgcatgatgtgatcaataatcttgtatttttatttttataggaatcttgggaagctaaaatgcggcataatcagatgtattgtgagacaccacctactgtcactattcatgtaaaatcaggctcaaataggtcacatcaaaccagaaaacctattagtctgaaacgtcctattcttaaagatagttgggaagcatctgaaaacaatgctcagaataacaaatctaagcggcccagagggccttgtctaatcatacagcgccaggaaatgactgctttctttaaattatttggtaggtgtaaaacattttgttagtctagcattcttaaatatcgaaatgtaaatctattttgtcagttatttacagtgtatttatttgtgcggggttggggaatgcacacatccggcatttttgtggaggtcagaggacaacttgctgtgagtaggtcctctccttccatcatgcacgtcctagggattggacacaggttgtcaagcgtggtggtaagtgcttttgcccaccaagccatcttactagccctcttttgtcattttataatgaaaatattcaaattgatctgtttaggctatttaaatctaaatgtcaagtgtgtattttgagcaattcaggaaacaaattttgtttgacctgaaagagtatagagattcagatgaggtactaacccagtttgactatgcccagcgttttccaagacttttatagctaaaacaaagcaaaataggaacattgatcaatctagaaagcttcaatcttattatttggaacattgtgaaaaagtaagaacatttatcaacatgttcatataatgaggtttaaattgaatttttattatataggactcttttgtttatacatttattaacagacaaatagagacttctttgtagtatttataccagacaaaggagcctgttttgcatgcatggcagcaaggtagacattagaataagggatagtgttgatgtttcctgataagaaatcaaataataccacacaacccacagtcctccttgtttatagaagaaggctatgtgcattcaaacaaacttggtaagatataaagaatatcaaaattaaaacatgacataaaatatgtaaggaatataaataagttataaagatttccccatcagaatagagaatgttaacatgtttccatttctcctaattaaaaataaaattattacccacaaacttttctttactcccctgactttgttttagaaagggtctcacctaggccaggctagccttcaactctttatgtagccacggatgaccttgagtttctatccttccaccttgacctaccaatactgggatcaacaagccaaattcctattttgttagtcatctccagcccttaaccacaaactttttgaatatttttcactgtcctaagaaaacacctgattctactattttagctaccttgtgaaatagaaacagaattaacaaaacgaattctcagaaaaatcaatagttatccctacaattttccaaatattaattacaattttataatttataacatgcaaaatgaacataaagaacttttgccttgttaataaaatgaaggggatttacttatattctgatagttttcaacaattttgagattatctatttaatgctttcgaatcaaaaccagagttgtttttgttttttgttggtctttgttgtattttctttttgtttttgttttgagacaggtctcaccatatagcactggctagcctggagtagaccagaccagccttgaactcacagagatcttcctgcctctgcttcccaagtgcagattaaaggtttgcaccaccactctgggatagatattattcttgattttgttgatcttgcaatcctaatcaattttcccaaaattaaatgctaattataaatctaagtaaaatttgaagttatttatatatacatggttatatttttgtttgaataataagtagactagagaggaattaggaggaaaggtccactccacccctcccccacaaatcctgttccttgagaggagaaagtaatagaaaaataatacccttagaacagcatttcttcaaagatgaattatcttgcaccagattccatttctgcctcttaaaattgacactgcaaaagaacaaagagctaacaacctgttggatactcaggaaacaaaatatattattctcctttaaagctgagcatatacataaataaacatatcatcagatgggaaatgcatagtccttgcaatgatatagatactaaaaaactaacaactacaccttagcaaacagctttatttaatttctaaacattacttttaaatgtcccaatttagaaattatttcttcaaaaggaaacctttttaaaaaagataagtcaaagttatcttttgttatagatgatgatttaattcaagatttcttgtggatggactgctgctgcaagattgcagacaaggtaaactaaaaacagtgtaaccctaaaccatcactgtcgtggtactgggccattagcattttgtgagctacagtgagaattgttgccttcattacagcgagaaaaatagctaacctgggttctttcttcagagcaaaattcttttattatccttatttgtatgtgtgtgtgtctctgtctgtcatagcatgtatgccatagccagtatgtgaaagtcagaagacaatttatagacagagttggttctctccttccaccacgagggacctaggaattgaactcaaatcatcagacttgacagcatgtgcctttaccactgcgccatctcactggccccaaagcagaattcttacacttaatttttaccaaatttgtctggaaacaagaatcaatagagatttcatacttcggtgggggaagtgcaagggtagagtgtcactccagcctcctaagagctgggttaacagacatatcactgtgctcagctagattcaatacattgtggttagaattactacttttaattggtgtggagaaaaagatcttgagactcattccattaaggaagtcttctgtaaatgtgaaatatttcataagtaattcagtcaaaaaatccattgtcttttaaaacaattttattactattttaataggtattaagttgctgttgctgtaatttataatagtacaaataatctcttattccatgttggcttcccttactgctagatcaaagccttagatcagcactgttacattttttgagaaacagtatcgacaaatgaaaattgagaattactctataaaacaaatggctttggggatggaaatatagattagcagtaaaaagcccttgttgctcttccagagaattcaagtttgcttgatctggctgcttacaactacacacacacacacacacataatttaaaatattttaaaaatatggatcatcctatttcgggttagtatacaaagaaatgaatttcattgtgacattttggttttttgtttttgttttttcgagacagggtttctctgtgtagccctggctgtcctggaactcactttgtagaccaggctggcctcaaactcagaaatctgcctgcctctgcctcccgagtgctgggattaaaggcgtgtgccaccacgcccgtcattgtgacatcttgatccatgtgtattattattcttttttcccctggtttaactatttaacactggctggtttaatacttttcttgtagacttgaactggaagatacttacctgcctctgcctccagagtgatggaattaaaggaatgtgccatgatgcccatctactttatttttattcagacttgtcactcattatcctcttcctggtaatcttacaggataaaattagtttagcatgttctctgttagatatcaaaccccataaactgcctaatatattaggaatagtgatgataaatgcttttttgtggacatatttcaatatttgtttctatgtttttgagtctgctgaatagttgtcattttatttttgtagatacctatttagataatgggcagtcatatatcaagttcagtaacagttaaaataaaaataaaggaatgttcagaagaatagcttgtgatttcatagtaaatgtcaaaatgaaggctatttcataaatgtgacaaagataaaaatgtttatttttttttaatttgggaggctggagaatatggttaagagcacttcctattcttccagaggacctgagttcagtttccagtacccatatcaaataactcagagctgcctataactccagctccacagctgatgacttccgtcttcctcaggcttctacactcatgtgcacacatctcccccccccccccacataggacataaataaaaaccaaaatctggggctggacagaaggctcagtgcttaagatcactgactgctcttccagaggtcctgagttcaccaggcagtggtggcgcacgcctttaatcccagcacttgggaggcagaggcaggcagatttctgagtgcgaggccagcctggtctacagagtgagttccaggacagccagggctacacagagaaaccctgtctcaaaaacaaaaaacaaaaaacaaaaaacaaaaacaaacaaacaaaacacccaaccaaacagccaaacaaaaaaaaaccccagaggtcttgagttcaattctcagctcataaccatttgtaatgggttctgatgccctcttctggtgtttgaggacaataaataaataaattaattaagaaagaaaactaaaagagtattaaattcccaaaaactagggcaatagatagttatgagccaccatttgggtgctaggaatcaaactttgtgttctctggaagaatagtgctgttagtgactgaggcatctctgcagcctctggaaactaatttaggaaaattaaagtacatacaacgtataataaaaacaaagaccttccatgtggctcttaaaaataatcaatgtgactattcttgtttcttctctggaatgtaaattattttgaggtaaagctgaagcatgctaatgtcttatcataacatttgataatttggtgctggtgggatacatacaactgcatcggctggtaaagccgatgactaagatgatcccaggtttcacatgtggaagggaagaagggaacaggcttccattgttctctgatctccacacctgacatataacatacatacataaataaagatatataagtaagtgtaaaactatatctccaaaaatgtaaatttttaaaacaatcaaagtatcacttttctttaaattttttttttttattttatgtattcaccattgctctcttcagacaccccagaagagagcatcagtcttcattgcagatagctgtgagccaccatgtggtttctgggaattgaactcaggacctctgcaatagcagtcagtgctcttaactactgagccatctctccagccccaaagtatcacttttcaaataaacagtaattatataatcaaatactcagtttctttagaactgagtaaacagtacagtggcaaacagtacagtttaagtgctttaatgttggtgtacagcagggggcagtgtttgaaaagtaactaacccagaattcttgactatattatttcaaaaatcctttactcagaaatgaagggaagccctggaatcatcaagatagtgaataagtatgagagagaaaaacaatattcattttgtaacttgtttcaaatttgaaccattagatcatcttggcatatattctaataagctaattgtgtgtctttgtaataagacatttaaaatgtgttttctcagtgaaaattaggccttgctatacagttttaaaactattggtgaatttccatgaaagatgtttggctacaaaaacaaaacaacaacaacaacaacaacaaaaatcaaaaaagatgtttggctactcactgaactatttcaacttctttataagtttgaaatttaagatagaaaaaaaaatggagttttagttttaaaatgcaccagctataaaaataaattagaaatcctcttagctaaacataataaattattggtaactgtaattattggcagctcaaacgattcaagtggattaactctggggaccaaaaaataagtactcaggtgactgtatacagataaatatttaagggttaaagtcaactattttatagcagtgatattagagaaagcaaaccattaatactaatttctaacttttccttgtagtatcttttggctatgacctttgtttatttcaagagagctaaatttactataaatgagcataccaggataaatttctttattgctctgtaagtatgttttctactaaatgagttttattggtcattttaatatatgtgacttgtaatttaaagcagaaatgttaaaattttatggctattgttaataggccgtcttgtgtgggaaaattatgtatttttcactttaataggatagttttatgttcttttcattggccttacattacatgccaaagatttgttgttcccacttcaggttacaatgtgtcttttacattttttacagtgctctcatataaattcctccaacacacacactttctctgtctctttctgtctcggtctgtctgtctctctttctctcacacacacaagcacatgcacacacacattgggatttttgttttgtttctttttcttttttttaatgatctctcattgtagccctggctgtcctggaactcactctgtagtccaggctggccttgaactcacagagatccactacttctacttcctgagtgctgattaatggtgtgtgccaccacatccagcaacagattattctctttaaaaaaaaaaagatttattagctgggnnnnnnnnnnnnnnnnnnnntattagctgggcgtggtggtgcatgcctttgatcccagcacttgggaggcagaggtaggcgaatttctgagttccaggacagcctggtctacaaagtgagttccagggcagccagggctacacagggaaaccctgtctggaaaaaaacaaaacaaaacaaaacaaaaaagatttatttattttatttatatgaatacactgtagctgtcttttgacacaccagaagagggcatcagatctcattacagatggttgtgagtcaccatgtggttgctgggattgaactcaggacctctggaagagcagagggtgctcttaaccactgagccatctctccagctccaactattttcctttaaattgccagttagtatgtaataaaaccatcatcttacttttataatgtgagcctttgtggaaaatattttgcatatgttctttgtagtctgtatctaaaaggagttgtgcatacttaatacttccatgttcactgatggtgtcatcaaacactgaatattgtttatattccagattttctgttgatatcacattaattagtcttagctttgctatctgttaaattgtttctaataatgtgcttctctaatttataggcataatttagttaggaaaaatataatttcagagctggagataaaacttggtgatggaattcttgcctagtatgcagtaagctctggggtcactcctcagcactgcccccctcccaccccaaaacagggtttctttgtatagacctggctgtcttaggacctgttctctagaccaggctggccttaacttcagagatctacctgcctctgcctgccgagtgctgggattaaagatgtgcaccaccactgcctggcttcattcagcactgtttttgttttgttttggttttttataaggggaaagcttaaatttaagagtacattttggaacttgtggtgtgccaggaagtagagtgcttcccttatatacatgaagccttgggttcagttactagcaaccccccctcccaaaccaaaaatgaaaaagacaaagaatatcctttttctaccctatacttggatacaacgatgcagctagaatgtatgtacataattttaaatgttaaattagggaactgtataaaagcattgcagtattggggactggagagattggctcagccattttaagatggctgctcttctagaggactggggttcaattcccagcacaaccatcaaatccagtgaatctgatggcctcttctggcctctgtgggcactaggcacacatatggttcacagatatacatgcaggcatgacactcaaatgcataaaaatgaataaataaaacgatattggagtatcacaatagctgtcagcattgagaaataagttttatttaactcaacatctatttaattcagaatcagaattggtaaagaaattaggccagaagagcttgatctatgattaattagagagacattttccagaacataggaaaaatgagctgaatttaacatctggtgatgattggtaaactggaagaatttaatagtaatagctaattctgaatggtatgtataaatcaccacatcttatatacttatacttttagttttcttgggttttgttttttgtttcttcaagaaagggtttctctgtgtgtagctctggctatcctagaactcctgtagaccaggctggcctcaaacccacagagatccacctgcctctgcctccagagtgcttaaagtcatgcaccacctcagcccagcacatttaggcttcttatgaaatacatttcttttctctctctctctctcttttttttttggtttttttcgagacagggtttctctgtgtagccctggctgtcctggaactcactctgtagaccaggctggcctcgaactcagaaatctgcctgcctctgcctgagtgctgggattaaaggtgtgcgtcaccacgcccggctgtgaaatacatttctaattcctgttttatagacaaggaaatactttgactttatagacaataaagcactttgaaggtcagggaaattattaaggaggccagctattgtggtatacacctatactcccaacatgtaggaagctgagatgggagcgtgcgtttgaggccagcctgagcaagaaaaaaaagcagagatgcaaatgcatgtatgatatagaaatgcatgtatgatattctcaagagcaaaactcagccttaatgctgttaattttccatttatatgtttcaatattgtaccatattcaataccatactattctgtagtttttctccacctaagaattaaagacaagccaaaaatggctttagtgtaaatccatgtagaagtatgaaattggatttgtttcaattgttttgtggttatagccattaatgtgctatttagcttttactgtgtagttatctttgaagactgcattgcatattgtattatattatattttaggtaacctgaattataatttccatcctgtgtctaatcatatgtagactcagtatctcttttcattaagcctctcttagccacagttctaaagctcacaatttctttctatatagtcatgtaattttttctttcagtattcttgtaacacctgaatttcttcttcttgttgttttttaaaatcttttgagacaagtatttgtagcctaggctggccccaaactccctgtgtagccaaggatgatcttgacctgatcctccttcctgccaatgccgaggtgacaggcattgcgaccatgccagcagtactccttcatcctcccacatcctctcctgcatttattagttacatgctctttctcctttacctagttatcgaatgagttcaagtccagccaaagcaacttagaaagatctttccttaaaagaaaaggtaaaaagaggaatggaatttagttggtggtaaaacacttgcctaatatgcttgagatctttagccttcctttctatctaactttaagccttttaaaaaatgttgttagaacctacttggaattagatgaacttccttgacttaaagatacctttcaacaaagaacccttagaaaattctagctactatccttcaagttttccctatctcctctgttagcttccattgaaatccattaaatatgctgttatatgctgcattctgctttccaaatctgtttaataatttggagttattttgcccaaacactgacagattttaatgtgtgtaggtgtttctgtctaggaatttacacactcgatagcccattcctgtaacactctcagtatgcagaaggctgaggtagaatgaccctagatgtagcttggactacacagggaattccaggctagcttgagctttgtagaaagatcctgtcttagcccaccccacacacccaccagatgcacaggcacgtgacttaagcccagcactcagtctctgtgagtttgagccatcctagtccacacagcaggttccaggtatccaagacatcatagtgagaccttgtctaacaaacaaacaaaaagaacaagaaagaaacctttgtacaatgtctgcaccctgggcatcaaggacatgaaggaaaggtattactgggtgggctcaaggagtgaaggtagagcccttgccctctgcccctgaatgctcacattccttctgaacaggagagtagacataggattcggaggaggggacgataaagagctcccaggttagtggtacagtggcagtatatatgaaggatcttgtagtcatggcctgagttaaggaactacattattgtttggtgtcactgctgcagggtagcttgtggcttgtgtatcttcaatgggaaactttgaaccatatataagcttcatgctactcaggatctgacacaggcaacaatgactgtttctagccttttgcctggaggatacaaaagaagcagttagattcacataaatagttgatagtactcaatgtagtggcaaccaccatgatgttacacattttgtatatttgtttctctgagctacattttggatatttcttaaatttatctactattacgaatttgatttttctatttgttatgtattttatgtatactatttttaatttttcatatatatttattacctgtttttttttttttaagacagggtttccctgtatggccctggctgttctggaactcactctgtagatcaggctggcctggaactcagaaatccgcctgcctctgcctcccaagtgctgggattaaaggagtgtgccaccttgcctagccttctttttttttaaattaccttattttacaaacatattagttatctttatttgagtatgtgaatatgtatatgtgtgagtttatatgcaccatttacaggctggtggctggaaaggtttgaagagggtgtgagattctctgggttggagttagaggtatgaggtgccagatatgggtactgggaactgaagccaggtcctttgcaagagcagcaatcactcttcaccatggagccatctctccagcccatagactgttatttttgtattctgtttaaattttgggttctgctctgctcatgttgtcttggttttttttttttgtttgtttgttgtgtgtgtgtgtgtgtgtttggaatgtttttgttgtaaaagtgacttatggagcctgaactgtttctgattgggaatctcttccattattaactttattcatgtattaatatcttacctcatttttgttttgtggaacagagtctcatgtgcctcagtctggaatcaaactcactatatagctaaggatagctttgaactcatgattccactgtctggactcctcaagtcctgggattagagatgtgtgccaacacactagcttaatatgtctttcttttctgactgcttttaaagatttttatcaatatttttgagcaattcagctatggtgtgccatcatataattttcgtgtggtttcttgtttcttattcatttattattcaactacaaggacagtatcaatttatctacatttttgagtataaaggatagttatagtaagtgggtggagagatggctcagtggttaagagcacaggctgctcttccagagatcctgagttcagttcccagcacccacatgacagctcacatgtgtctgtaactccagttccagtagatctgacatcctcaaacacacacatgcaggcaaaacactaacaaacataaaataaggataaattattatattaaaaagttataaatgttttggtgtcctcctatgtatcagttgtgggttggctttgattgattattctcctcatggtttgtgtttttctgctgctttttatgtctggttcccttcaagtatttggcaaaatactgacttccaaatgtgtatgagggagctgtttgaagatagcccaaagaaagtttaaaaaaagagaatacctaccttacagtcattcatctataattataaacggttctcagccagggtaaaaaagccacagttcctggaatagtaagaaaaatagtctagaaaagtcttgatttgggaaggagctaactaggtccagattgaacactgtttacagattcatctacaaagtcagaaatacctcaagagagattgtttcaatgtaacttacttgcatcccagaacaaagttcaaaatttataggattacagagacacctagaaggtgcaacaaggtatacaattcattgtatcactgcttctgttacgcattttagatatgagtatcctttatgtattggtaagtctttcttttttattattattatctattgttcttgcccttacccatatctgttttggattgttgatccaatttgttaggtatctggctaatacggttgaagaagatgaagaagaagccaagtatgaaatttttccatgggctttagggaaaaactggagaaaactgttccctaatttcttaaagttaagggaccaactctgggacagaattgactatagggctattgtaagcaggcgatgctgtgaagaggtgagtgtttaaaatcactttttataatctatcgtcgtttatataattttccttgatttatttattttagtttggttttgttttttttcttccttatttggagatagattcctgcaattatcccagcctgccttggaactcatagtcctattctgttcccttcagttttaggataaaagtatatcatgacactatgacctcctacttagtttttaatgatctatgtctgtctttatgtatggagatcactagcctcggtcattattatgactgcaacttttatattttgtttctgtttgaattttatcacatttattcaaaattgtaatatccatttttcagaacagactacttctatattattcttattgtactgtccccctcctcccatctaaaagatcaccagtatcctggtaaaatgtttgtggatatactaaagcatcttattattataaaacaagagttgaataataatcactaaagtatttgaattttcaagttttcaacattgacgccaacagcatggttatataaattaaataaatttaagtatgtctaaaatccatacctcttttctcaaagaatatattcttttgcgagaagttgaggtctcatgaattctcccagtaatcctcccacttcctcttcctgtaagcggccagagacttctgaggatggtctgctactctcttaatccagaaaccctacaaaatcatgcaaatcaagaggtcaaatcttcctcactctaagaacatccattaaactgcccaggccatcaagggtatcatacctgaaaagtaaccaagtatctgaaagatgttactttaaagaagcagtataaatggtagagttggtaggtgtgcccaggctaaacagtagtgctggacacagggtcgttggtcaaaaatgagtgctgaatttttgctgcacatgcttaaaagtccatagagtaatgctgaacttaaggatttagatgtagattctccagtcgttgagcatacactgtgaacaaagcacctaaggtgtggacaaactcccagagcttatggctggatacgtgagctttccctgccttgatgagatgatcctcactgaaaggaacaaattgtctcaaagccagaagaggagggtgcacaaaaagaaaaagatatcccagaagaaactgaagcaacaaaaacttatggcatgggaataaatttagcataaaataaatgcagataaaagttttaaaaatgcattgttttcttttttaaaatttaatttttttaaattttatttgagacagggcctctatagccctggctatcctagaactgtctatgtagactaggctagctcacaaagatcatagtgtctttgtctcccaatacatgggactaaaggtatgtaccttcatgcccagcacattgttttcttaatgtcagagtttattaagatacttttatttataagtaagttattttaaccaaatgtttttattagtattttagacaacaaaagttatagagtaaaatcaagtgaaagcaacaactattgtcaactcttgtattactgtttcagaactttgagaaatgtaaactagataattctgtaattaaatcctacccagctaaataaccatagaacaaaggagcccaaactgatgaactgattttgaacttgagtaaagactttagctgcatgtcacagaattttccccagaattagtgttgttaattataattgttaataagagaagatacaattatgcatatttaaattcggattattgactcttggaggaactgcaaggattcagaaataacagagggcagaaaataaaagaaagactatatagcaggccaagactatacaaagttaaattcaatgggaaaagataaaagttgcctatacaaggactctaaaattaatgtactgtcattcaaactgaactcaatccagttacatgatattgaaagaaccttgtaagttatggctctctctactgcttgtgtgcctttgatatgtctctacttgggtcaatgttgtagtcctttcctgtaatctcagtactcaggcgactgaggcagagggatctaaagttcaaggtcaacttggactatatagtgtgaccctgtctcaagaagaaataaatggcagttacatagccacttgccaactctgagaatgacagagggctctatttaaacactctagttttctccaagtgcatgctactctgcttctgttcccttctcttccattctctttagaactgttaggtaaagcctcttctccactgttcaacagaacgttgtcaaagcctcctgatagctttatgttgccaaagcatagactagctttagttctcagtcctcgccttagcagcctttggcacacttagttctctgctactgtgccttcatgtgcttcagtgagtattgggattgagggtctccccacgtattgtcagccccctttcatctcgctagccttattaaggtgtctgagagctcagtcctgagagcttttcttgccttgactggaattaacttagtaatgatcttgttcatcttcaacacattaactatgagggactggagagacggcttagcactttaaaaccacttgctagttatccagaagaccagagttcagttcctaacacccatatctggcagctcacaaccacctgcaactctaactcctaggaatctaactcctaagagtggcccctagaggcatgtgctcatgcacataaaaatattttcagaagacttgaacatagagatctaaaggtatcttctaagtgcagatctgcatatcagattgcttgtttatcccattgtctgactgaacccttaaacttggcatgtgtaaaagtctattcctgattcctatacacaaaccaacaaacttgcttttttacactcttctatatattagtaaagagcagctccatccttctaattgctcatgtcacaaaactgtatctttggctttttcttcccccttatatccttgctttcaaaactattcaggaggctagagagatggctaaatggctaaaagcaggtctgctcttccagaggctcctagttcaatttcatggcttctcacaactgtctgtaactccggtttctggggatctgatgcccctttctgacctatgtgggcaccagacactagacatacaagtggtgcaggcacacatgcagccaaacacccttacacacaaaaaataaaatttacatttaaaaactctagcatcctactatttctagcatttctaccactatttatcactggttgccttaattgtcataactttgcaaacagtgttttctgaacatagaatgtaccttagtggtagagtgtttgccaagcatacacacagccttgggttcaatccctagttccttaaaacaaaagcaacagagtttcataatcttctctcctataggctgctctttcagaactcctggaactagagttgtagactgttgcaagccatcaggtgggtgctgggaataaaactgagtactcctggaaaatcagttcagtgctcttaaacactggtccatctctctagtccccaccccaagctctcagtagcttcccaccttttatagggtataagacaacattggccttgccgtctgtacctcctttctcacttgcttctccattgtgctcttttctaacccattgtatgcagtcttccttccagctacaccagcctccttactgctctcaactgagccaggcatattcacagtgtaggatctttgcacttgccattcttaatggaaagcatggggatctttttgttttttgtttttcaagataggctttctctgtgtatccctggctgtcctgtaactctcttttgtagaccaggctggcctcaaactcacagagaactgcctgcctctgctgggattaaaggcatgaaccactactcctggctttttctttcattctttcctcttttttctttctttttgtaggcatggggatctttccactggtctttctctctcttttatttattttttttttgggggggttggtttcgagacagggtttctctgtaaccctggctgtcctggaactcactctgtagaccaggctggcttccaactcagaaatccgcctgcctctgcttcccaagtgctgggattaaaggcgtgcgtcaccactgcccagcacactggtcactctctacggcagccctaactgtggctgatacacccagtgacattcaactggagaaaaatgaccccctctttcccagtaagcatcaactacaaggatcctcttggtttgaggtgggactttgtgtttacctctgagtgctggaattttgtctggcttgaatccacataggtttgaatactttgaggctaagtagtaagatatgttgttagaaattaggcatcctaaacatttgttaccgaaatcctggtactagcatactgtcagtcaaaataatctttagccttatattctaattaagttaaagtggaatagtagctaccaatgtgcttataatagtaatacgtatttgtggtattcaaatttatagtatttgaattagtatggctcctataggcgtttaagtttgagcattagtctccagttagaggaaatgttttggaaggattaggaagtgtggtcttgttggaggaggtgtgtcactggtacgtcattgaggtttcaaaacccagtgctatttccagttcaccctcactgcctcgtgttagtggatcaacgtatgagctcctagttcctgctctagtatctttcttgtctgcctgtggccatgatggtcatggactctgtccctctgcaactgtgggcccccaattgaacactttatgagttgtcttgttcataatgttttattccagcaatagaaaaggaactaagactatattatgactcaatatgcattgcttatcctcacaaagatatctctgaggatggaggcatttttcctttatagctgatgagaccatggacccaaggatattaggatttacttaagcccacccaaagaagtaccagagccacatcttgactggctgcatatgtaatgacttctcactgtcctgttttctctgatatctagcttccatataaacttttcaatagtaacttagaaaattcatttgtatcttatctggggaattaaaaagcataactattctatttctcagatttaaaaaaagtatcattaaatcatgacttgtctttctgttactattgttaaagaacatatgctccctttttaggtaatactgagttttgtgatttgttgctttttcttttccttctttcttttttttttttctaatttagatagggtctctctacatagccttggctgttcaggaacttatttactacataggccatgctggcctagaatttacagagatcctcctgtctctgcctcccgagtgctgggattaaagcatgtgccaccacgcctggcccactatttttttttttagaactattgtcaataaccagattaactgcatggtgttctattaggctatgtctgctttttctcacttgagctctattttctctttggatccagtttaatgaattatttaaaaaattttttttagacttaaatatatgagtattttacctgcacattatgtatgtatgtatgtatgtatgtatgtatgtatgcataccacatgtgtgcctggtgcccacatcagaagaaagcattaaatgctctggaactggagacacaagtatttgtgagcttcggtgtgtgtgctaggaacccagtccaggtccactgaaagggcaacaactgctcttaacagctgaactctctctccaacccccatccccttagtgtgttcagctcccttgaatatttgttggaagaaagatggtcaataattgtatgcaaataaaaaatacacactttctatatgtacatatacatacatagtgtgtgtgtgtgtggtgtgtgtgtgtgtggtgtgtgtgtgtggagtgtggtgtggtgtggtgtgtgtgtgtgtgtgtgtgtgtgtgtgtataaatggcttctctggaaagaatgaagactatttccctaccaattctgaacttggcttcttacattattactttttagacatgttcctttgcagtggaattaatttacattcatgatggcttaatttctacactggtccacatattagagagggtgcctatccactgagagagactcgatccccctgcctttcaaataacacagaggatagcagttgcttatagggaaagatttttctttatgctgctttgtgcactctggtagagttgctacagtaacatcatagctaacttctgttaactactactttatttcacattgataaattaggaagcaatagtattgggcagaataagacaatgaaggtatgcaaaagcgattctctattgggaatgtgctggaaatagctaaacttgctagagtttagaaaccagattgcagtgcttcagaggtgacgccagtgttagaaatgctacaaaattctaattgtcatgacttagtagtaagctggctatagcatatctggaaatatgaatactttgacttctttttgttatttttatccttttaatttccctttctgtcttattactttacagggttcaaaatcacaaataccactttttgtatcttagatttttatagaaatgtatagcttatatacatatatgtacagctgacatgaaaaaatacagctgggtatagtggcacatgcctttaatcccagcatgtgggaggcagaggcaggtggatctctgtgagtttaagactaatcctggtctccaggccagccaaggctaccaaagaagatcctgcctcaaaatgatgatgatgatgatgattttaaaaataaaagcaccaaaaatataaagggaactaatagggagggtaaggagcaaaaaaagtgagggtagctcagggtgggggtacacttaaattacattacttctgtcttagggttttactgctgtgaacagataccatgaccaaggcaactcttataaggacaacagttgattggggctagcttacaggctcattatcatcaaggcaggaacatggcagcatccatagtgcagaaggagctgacagttctacatcttcatctgaaagctgctagcaaaatactgacttccaggcagttaggatgagggtcttaaagcccatgcccacagtgacatacatacctactccaacaagcacacacctccaaatagtgccactctctaggccaagcatattcaaaccatgacattccactcactggcccccagcttggtctacagagcaagttctaggacaaccagagatacacagatatgtcttaaaacctaacaacaaaaagagttctttctcatcaaaaacatatataagtccttatacataggctcctaaaacagcttctctaatgctgccttcccttgtccctcccaggtccccagtatagctctaaaatttcagaatttttaaacatttttaagaaatcactagtttaggcaaatagtatgactgtttggctttcattttaggattattataacttatcacttactgtggatcattgataactacagctaaagactttgacttaaatctcattgttttggatttcataaggtcaatatattatacttttccttatcttgacttcttaaatggctatcatttgccagatgctaattatgtggtaaggattttacatgtaatattgaatctcaaaacaatatttgtggtagttagcaaccccattttatcaatgaagtaacagaacctcagaaaggttaaataatttgctctgtagcatatatagtcaacaagtggtagaaccaggataagaaagtctacaactaaagcccacgcttgatttaaaaaccttatgacaatgcctgacagggagaaatcttaagtgctttataaaatgtatcctttcctcacaactttctaaaagtatactcttgtctctgtgtaacaaataaggaaactgaaggacaaagaagttaatctacatgtttttaaaaaataacacatcccttgatataactgtaaatattttaagattagcctaacatagttaagagcccattttttaccaacacatacaaaagaattatataatgttttatactatattattatcttttctaaacttagaaatatttgaaaatttaaaaataaataccctgctacgctccattaatcccagcagtcaaaggcagagactgagtttgaagacagccaggtctgcatagagcaccttatctcaaaaacaaactgactgactaaataaatagcaactgagaaggttgcttcatttatattatctacttgaactaatttagatactttgtcaatattaatattaatgatccaagaaatcactctacagaaaatgctgctatggatgatttgatgttgctgatttaaagtttgtaacttaagtatttctattgttctgggaggggctgttttttgtctgttttgttgttgttgttgttttcctaagacaggatttctctgtgtagccctggagctcaattctgtagaccagaccagcctagaactcagagattcacctgcctctctgttgagatgaaaggtgtacaccacaacagcctttttccccccttttttttaggtaatttggctgttattttacaatttctgtactttactcaattttaaaatgttattaaattcacaaagtaaccttttcactataggtcatggccattgcgccaacccattacatctggcaacgagagcggtctgtgcatcacagtggagctgttaggaactacaacagagatgaggttcacctgcccaggggacctagtgctacaccagtggattgctcactgtgtggtaaaaaaggaagatacgtgagactgggactgtcttcatcctcatcttcctccagtgacacaggagagctaatggaaaaaggttctcaggaactacacagtgcattctcagtggacacggcaggtgaccctcctcatacctattctcaaggtatggcttaatggcaggtagactaatgcatgctctctacctactagaccttacaggcagggatgcgtagtttacataactgcgttgcatttgtattgaaagttttcccccttcaagttaccactttttatcctatctatacccatgttgtgctagcctacacacactaaaaaggattgtaacatatattaaacttcacctcactatgctacgaggtccaactattaaggcttgaagggtttctatgacatgtttattttatttaaaaatgttttcaagaaaataaatttacttctaatcaccatccaactattggtttcttctctatacttttctatttctaacaaaattaggccatattttagccaggctagctttttttatttactatgaatcattttcctatgtcatttagtgtttgaaaaccttattgtgatatgtgtaatttatttgcatatatcattgttgagttctaaatgattacttagaacaatgatatattaactagaaaataattaaccataaatacaaactatgccataattttcaaattatctttatgtgtagtatttccctgtcattttttttttgctagatttgaaacagtactaaagtactctgcaatgggatcctgtttactccttacagatttccctcatttgaaaaacagatttcactaggcagtagtggcacacacacctttaatctcagaacttgagaggcagaggcaggagaatttctgagttcgaggccagcctggtctgcacaatgagttccaggacagccagggctacagagaaatcttgtcgaaaacaaaacagaaaaagaaaaaggaaaaaaaaaaacccagattttttttgtagactcttttatcatagaaaaaaaaaaaacagacctacatcagtcagatttttactactttatctttaccatattcctatgagaaggacaatgactactgaagtgtcactaaaaggggaactaaactccagtccagtggcttccaaccttcctaatgctgtgacattgtaacacagttcctcatgttgtggtgactcccaaccataaaattatttttgttattacttcataactataattttgctactgttataaatcctaatataaatatttgtgttttctgatggttgtttgggggtcatgacccacaggtggaaaaccactgctctagtcccttggcagtagagcatagctcctgttccttttactggacacagtatttgcttaacaaatttcactggcagtatagtctcttgcttttcaacatctccaagcacattcttttagtcatacacatatttgacaataaataggctaattattaactcaactataaagtgtcatttgttctccctcttctatctcctaggttttttttttttttttacttttacattctttgagctgggcttggtggcgcacgcctttaatcccaacactcaggaggcagaggcagggggatttctgagttcgaggccagcctggtctacaaagtgagttccagaacagccagggctacacagagaaaccctgtctctggaaaaaaacaaaaacaaaaaaaagctcctttaattcataatacacttaatatccactaccactgaaggttaagtattgttatctccacatggcaaacaaggaaaccaaggcttatgttaattctcataaggcttgtagagtaatatttggatcctggtctggtgactggagcctgaattcttaccaattatactctactgcctttgataaaaccctgcttttatcagtgaaaataagctgtggtaggagtcgttaagaagactgctaaaggagtgatggaaacaccaagagccaggttccttctggaatgcttgtagaataagttaggagcacattttaacaatttgaacctgtatttcagaaaacagcagagaaatcattgtgttttcttttgagcagcccctgtagatatcattgcagcgtgtagatagattgctaggccttggcacccactaggggactggagtgaatgcagggagtaaggggcttcctagtcactatctgaaaaagctgaggcagggcatgtgtcagtgggtaagggcttcctgctaagcctgatgtactgagttcagttctgggtggaaggcaagannnnnnnnnnnnnnnnnnnnnnnnnnnnnnnnnnnnnnnnnnnnnnnnnnnnnnnnnnnnnnnnnnnnnnnnnnnnnnnnnnnnnnnnnnnnnnnnnnnnnnnnnnnnnnnnnnnnnnnnnnnnnnnnnnnnnnnnnnnnnnnnnnnnnnnnnnnnngaaacatggaggtcatgtaattgtgtacgaagcacatacacagggagtgaggggttgggggaagagagagagaaggaaagaaggggagggagagagcaagaaagaaagagagaataaatgtatttaaaaaaattaaagcaagcccttgagtgattataaacaaaagtaaggcactgatataggggaggtgtagaagggactgtgcttttaactgtttattgatgaaattcccaatttaggatttatagatctattttaggaagcaacagttttgttttgttttgttctgtttcttgagacagggtctcactacagttttttgttttgttttgttttgttttgtttcttgagacagggtctcactatgtagttctggctgtcctggaacttccggagatccccctgcctctgcctcctgaaaactgggattaaaggcatgtgccaccatcacttagaggagggaataaatatttatccaatagttttcttgtgaatcttaaggttaaccctaaaagcatttgttagtgtcagagggcaaacaatataaagaaaaactattgctaggtatggaagcaatgccttgggaacagcactcaggtcaaggctggagagccccagctggaagccctttgggagctaaacgtctatttcctttttaaaaggggatgggatacactggagagacatcactggattggatggtctatagtcaccaaaaactcattccaacattttacaagaaagacacacaaggagctggtcttggctccaggtctttgttacaatttatgtgatcactgttctacctttcaaacaaaagaaaacaactttctttcttccatccatcctaacctcctttcccttctttttttaaaatacatggtctcattgtataatactgggtggctcaaactcactacatagaccagattggcctcaaactcatagaaatctacctgcctctggggttaaaggtgcgcaaaatcatgactaaaatggtttgattgcttttgttgtttgtttcaaagtaacatgtaccaaaaagcaattttaacacaaaaatacctataacattttaaaaacaagacgtcagtttgacaagatagagggaaacactgtcaactactttgggggtgacattctttaagaagtcagaggtatcacgactatgagtattatactagtccttttactaatcacatctaaaaagctcaatacccccaagacattttgaaatggctaatattcattttactgcagaaaaactcagaaaagttacaccattaccagctaaagcaacagcaaacaatgactgctttatctacacgtatgtgtgtttaccatgtgatttcagtgaccatggaagctggaagaaaacataggatcccttagagctggagttgcatgtggttgggagccaccatgcatcatgtgggtgctgggaattgaacccaagccctcaggaagagtggccaagtgtttgtaaccactgagctatttctccagaccccacttttctactttttgctttggtattggtgtttgaacctagggccttatatatgctacacttaggtctttccttcaggttataccttcaaagctgtaacacacttctatagttactctatgctgcttctgcctcagggcacctttgctagtccaagtgaaacatggacaaaccctatctgcaaacctgaggtgttaaaataaagataaagggaaaaatacaacaagccttacctttggcattgacaggcacagactagtctatatgttagataacccataactaaataatttttcttaaaagtaagtcctgtttttgaacttcattttgtgtcataatgtcattcactgttctggtcacaatcacctgtttgaaatcttggcacttaactgctaatgtaacttttaaaagtattagtttttttttcttcattccagcttgctcctaaatgaatgagacaaagactttaagatgtatttaatcaagcttttgatacataatagctgaactaatctattccaatcctttaaaataatctggctacctcccagcccaaatcctcaagatacttgcagtttagtgttcatctggctctctctgctccaggtgactttccatggcctctccgagaccctctcctctagacaaatctttccctcccttcccctctcttcttctccctctccttccatctccttttccctccccccttctccttttctctctccccttccttggctgggatcagaaatccagccctataatctcctctgcttagccattggctgatcagctttatcgacagattagagaataaatggggagcaatgcttacacaacactgagacaggaggttcttagaagaagcattacaatgtcatgtctggattgcaaccagatatgggggcagagaaatcaacagttgaataatacaaggataatctttacacagtgcacagtaacattatgcctatacttaacaaagatataatcagggctaaagatagcactcagtggaagagcatgtttggcaggcactggacaatgttcaagccccagaaccaaaaaataaacagagcaggtgacaagggtcaataatgtgatcaggaatatgctatatgagcaacatttaagagaacaaaagattacagaattataaactcggaactctggaggttaaggacagaggattactctatgttctaagccagccaacactatagagaaggaaccctgtcttcgacaaacaaatgaataggctacagaattctgtgtaagagaaagttggtaagagatttccagaacaaataacatatgttcaggacagtaaatgagcactgtgtttgcagagactagcagatgtaagggagagagtggaatagcaaataggaatttgaaaatatagatgatcacaaggtagtggtggtgctcgcctttaatcctagcactcagaagcataggcaggtggatctctgagctggagggtagcctggtctacagagtgagtttcagagcagccatggttactcagagaaactccatctcttcctccctccaccccgccccaatacagattgtcttacactgaatcaatagctaatctggttctttctacaagtagtctttgcatctgttccctttacactcttagtcatatcatatgttctactataactaagtcaatagatgaaacaatacatgatccagtgtgcacttaaagccaccagcaaacttactgatcatttactggatgggaagggtagaggtggagcaagtctcctagaaagcaactggaagacagttgtaaaccagatcccccaagatctgagagtgatagatacaagagggccagacacacacaggaaactaacaggaaggcaggcatgtggcacacacccatagtcgcagcatctgggatgtagaggaccaccaggagttcagggtcatccttggatagagaaccaatttgacgccagcctgagctgtatgagaccgggaaaggagagaggaagtaagctaacactagtcagcatctgtcctctgtatgattttaatcctaatccttgggatggtgaggcatgaagaccattagttcaaggttagtctgagctatagggagtgaaatgctgtcagatagcaggggaggacatctggcccataccgagattgtaaacatattgagaaaggccttaaactgtgtctcgatgaactacttaataatacatgctaatttaccattcaactcaaaattaagatgggcacaatgatagagaggtattgttcaattcattatccatcgaatacaatatgctaagcagaaagtaagtacacttagtttgaaatgaaacaggttaaaggataacattttcctctgcctttaatccatcctcttcttatagacacttaggacttgacaattaatgggtgtcaaagctctagttatagatagtacagacaatataacaccagaatagctccccttctcagtcagtacttaatgcagccagaatgtcctaaccaaacacaaatctaagtagattacccttaattaaatccttcaatggcacctcaggggctttgttttgttttgttttaagatagacacacttgggttggggatatagctcagtttgtagagtacttggttagcattcactaagcacaggattggtcaccagtattacataataacgtcagagtgactcacacccataatcccagcatttaggagatagaggaatcaggagttcagggccatccaggcagtggtggcccacgcctttaatcccagcacttgggaggcagaggcaggtgatttctgagtttgaggccagcctggtctacaaagtgagttccaggacagccaaggctacacagagaagggccaatctcagctacatactgaggttatctgagaccttgtctttaaaaaaaacctaacaaacaaacaaaaaaagacaaactctttagaaggcctctaaggtcctccatagcctgatcaatgattctaatctctttctgatcttcctgcctctacctcctaagtgtatttgaccactctcagcttcccattctccactttttaaccccactttctccttctagaatcctcctttacaatatagccccctcttaatttcatatctttaaattattattattgttgacaggatctcactgtgtagccttggctatcctgaagttgctatgtagaccaggttggcttgaactcagaaatacaactgcccctgcctcctgagtgctgggatgaaagaaaaatcctttccatcatactcagttgggtttgctgttgttttattgttctttgttttgtttagtttttgatttttgtttttggtaacccaccaagtttaattaggtttgcttacatgttctgggcttggggttatttttttactggagcaagggcaccttactagtgactatgctcctgaggaaaaatgattctcctctctcgcctatctatgctagaatattgatggtttggatcgtgtgcagggaaacccagctgccgtgggtttgtgagcaccaggcctatgtcatttgtagagggtttcacagaactttgccccttatatcctttccaccagcctttctgaattgtgaatgtgagtaatatacagatgtcccatgtagggctgagcattcaaccatcttgtattctcagcactttgaccaattatatgtttctgcattaaccactgcccactgcaaagggtttctctgaccaaggttgagagtactaacctaggggttgaatgtttggaaagcagtttgacatcatgtccatttagcaaaacaacagtagtaggttctccctaaagccaatgacttctccagtcttgggctagaatattctcaagctggcctgggactcatggcagttctcctgcttgaacctcctaacagatgtgagctaccatagacaggatcattttaaccaggttaaaagaatgtcagacttaatgacatacatcaaatgatgggagaaatatgttaggaacagggattattcatagataccagttatattgattctgatattcttttaacctggttaaaaaggttctatggtaactcacacctgtaattctagtgctaagaattgccatgagttccaggacagcctggaaagtgagatcctgtctcaaaccaaaccaaaccaagattcgagtataagaaaagagattaaagagctgttacatcttgaaaccaggtatggtaggacatgcctgcatcccggcactgcaaggttttggagcagggtggcaataccaggaacgagtcccctcctgtggagtggaagtggttgatgacccccttagcaatcatgccaccagttcaccagtgacacagcctgttttcaagtccggtaatattataacactcagggttcactgaggtgtcagaccattgctgagtaggtttcttcttctgcagcttgccatagcactcccctccagaattgtgaaagctagccaacagagaagcatctacagctaaacaacaaaaaactgtacaactatataaaaatataaccttgaagatgagttggttgaaaaatgaataaagttttttttttttttccgagacagggtttctctgtatagctctggctgtcctggaactcactctgtagtccaggctggcctcaaactcagaaatctacctgcctctgcctcccaagtgctgggattaaaggtgtgcgccaccaccgcctggcgaataaagttctttaaacatatatgttattagaaaatacaaaacaactggtaccgatgaataattcctattcctaattcacacgtgtaaagtacatttttcacatcatttgatatatgtcattagtcctggtggcctttaaacatggttaaatgattctgtctatggcatttcacatctgttattccagtgctcaggagactggagcaggaggactgctattagttccaagacaccctgttccaggcctgcctaagttacagatgagaccctatctcaaaccatatcaaaccaagatttgagcagactaaaaagatttaagaattgttacaccttgaagcaatgtatagtaggacatgcccgtatcctgacactctagaggctgaggcagaagtatcaatagttgaggcctgtctagaataaggaataagaatgtctcaaaataacactatatatagctggacatggtagtttatgtctataatcccagcactctgtagaggggaaagcaggaggatcaggagttcaaagccagcctgcgttatattagatgttatctttaaacccaacaaaaataaaaaccaaccaaacaaaaagagttattaggtcttgagggcaaaccctattaatagtatgatttacaatgtaccaggttcaaggtcctggcttcagtacccagaaccaaaagcaacaacaaagttacatctttattataattttaaaaattatattattcccatcagttctcccctactatttactatagccctggtgtgtttgttgttgttgttgttgttgttgttgttgttgtttacggtgtgtgtgtgtgtctgtggaggttagagaacaactttcaggagtcagttcatgtcttccaccttgttgaggcagtttgctgccccacgcagtccaagctagctggccagactgcagattcttctgtctccacttcccacactgctataggagtgttgggatcactgctataggagtgttgggattgtagatgcccattactgcatccagcttttaaaaacaaaaacaaaaaacacatgaattctgggtatcaaactcaggcttgcagagctagttagtggttttacacactaagccatctccctgagccctcctcctcctcttctttcttctttttcttctttcttttctctctctctctctctctctctctctctctctctctctctctctctctctctctctctctctctctcaacagggtttctctgtagagccctggctatcctggaactcccctttgtagaccaggctggcctcaaaatcatagatctgcctgcctgcctcccaagagctgggattaaaggtgtgctccactaagtctggctccttattttttaaagttccacataagaaattaaaatatgtactaggttcaggcagtgatgaatgcctgtaagtctagcacttaggaagctgaggcaggaatatcaagaattcaagactagcctgggctatacagtaagatcctatctcaatctttttgttgttttgtttttgttttttgagatagggccttgtctaccctgatcattctgctgcttcctccccaacgctggggtcaaaggcaggcttaccacttctgtctcaagaaagaaaggaaaaaacaaagataaagaaaaaagaacagtaaaaaagtattttaaaatacacaaagttttatcttaaaaaatacatacaatttaccttaaaatgcatattttatttcagtagccaatgaccatcaatcaaacaaagaaaatgaaactaattttgtgaagaaaaacaaatccgtggaatggtttgcagagagtgaagaatgacaaggctcaactaaagcaagctggagtcacagctacagaatggcaaaccaaatgcaagagaacgaaaacgggactgttacctagttgcacaatggcctttagcttctgttacttttcaaacacatgtaaaagtcatacaaatcatagtaataactaaacataccaaaataaggtaaaaagactttctgaagtagtgactaataatagtcagttctaatttgatccttctttgtcttcagattcagtgctgtcatctcaggtaccagttcaggtgtggtctgaacttcctccaccagcttaaaaggttaaactagaagacaaaagagctagtttaaaagagagaacagttaaggtcataacactgaattaatgaaaaaaaaaacaattaatatattctgaaaacagtactgacatgtgcgaccactttaccagtgaataagtcaagcaatgcagggacatggtctgtgtggaaaatcagaatgtgactcttctgtaacagaaaatgcacactgtacaaatgttttacagtttgttcacaaaaagtgttgaaatgttaaacactgtcccttttctgtaagctttttctcagaacttgttttttaagcatttttgagattgtttggctagttactatcagaaacatttgtcagtgattacacagtaactctacagatgggcttataaccaaacggagaagcctgtttcataaatcaatgtatcgaaaacccatttcatggcctaaataatgtgtacatatgagtacctaaacttgtttcttggaagaacttcagcaatgttgtaggagctagaaaaacaccatatttcattttctatacaataaataaaaaataaaaccct

SEQ ID NO: 263 - DNA, 1325 bp, Mus musculus
gcgcccgccctcgtcgccggaagtgtccgcatcgggggccaagcgagctctgggctcttcccaggtcgtcgttagcgtcggtgacccgaagggagtcccgccctgtccgggaagctggcatctaggacgagtagggctgtcggggcggagcggcccgagccctcctggaatcaagttccgtacagcaatatggctgcgtcctggaagtagaaagcgcgggtttgtctccgataggatggaggccaggacccaagcctatgaggcggcgtgaggttcctgacgttaggagaggctgtcgagtgtggcggtggacgagcctgagggatatttaacatcaggcttcctcaagtgctctggattcccgccgcccagcctcggaacaacaagcaggcgttactagttcccggatggtggtggcctgtccctgggctaaagtgtagattcctggctctcggcattattgtgccgttagctagttttgagctaagcagtccttttttgagtttgaggttccctagcggtcacagtgactcctcactttacgtctctactgggaaaccaaaatctcagaaacgtaaaagatgtgttgctttcaatcaaggtgaattggatgccatggagtatcatacaaagatcagagagctgattttggatggatcttcccagttaatccaagaaggtctcagaagtggtttcctttacccacttgttgaaaaacagcatggaagtagcagacacataactttaccacttgatgcctacagtttaacagagttatgtgagatggcaaaacatttgccttccttaaatgaagtggagcttcaaacactacagttgattggaggtagtaagacatttgatgcaattgtgattgatgcatcatgggagaacaaatcggctaaaagaaggaacagatcacaaattcaggagagtttgtgttcccattggattctcctcacaaaaagccttatgaatgtcttatactggagagagttaaagaaaaaactgctttagcattaaggaatcttgggaagctaaaatgcggcataatcagatgtattgtgagacaccacctactgtcactattcatgtaaaatcaggctcaaataggtcacatcaaaccagaaaacctattagtctgaaacgtcctattcttaaagatagttgggaagcatctgaaaacaatgctcagaataacaaatctaagcggcccagagggccttgtctaatcatacagcgccaggaaatgactgctttctttaaattatttggtaggtgtaaaacattttgttagtctagcattcttaaatatcgaaatgtaaatc

SEQ ID NO: 264 - protein, 132 aa, Mus musculus
MEYHTKIRELILDGSSQLIQEGLRSGFLYPLVEKQHGSSRHITLPLDAYSLTELCEMAKHLPSLNEVELQTLQLIGGSKTFDAIVIDASWENKSAKRRNRSQIQESLCSHWILLTKSLMNVLYWRELKKKLL

SEQ ID NO: 265 - DNA, 1881 bp, Mus musculus
gcacgcaaccgcctgaggtagatcgctgaggcggaggctgtggggccgctcgctcttcgccggcctgcgcaggaatcttgggaagctaaaatgcggcataatcagatgtattgtgagacaccacctactgtcactattcatgtaaaatcaggctcaaataggtcacatcaaaccagaaaacctattagtctgaaacgtcctattcttaaagatagttgggaagcatctgaaaacaatgctcagaataacaaatctaagcggcccagagggccttgtctaatcatacagcgccaggaaatgactgctttctttaaattatttgatgatgatttaattcaagatttcttgtggatggactgctgctgcaagattgcagacaagtatcttttggctatgacctttgtttatttcaagagagctaaatttactataaatgagcataccaggataaatttctttattgctctgtatctggctaatacggttgaagaagatgaagaagaagccaagtatgaaatttttccatgggctttagggaaaaactggagaaaactgttccctaatttcttaaagttaagggaccaactctgggacagaattgactatagggctattgtaagcaggcgatgctgtgaagaggtcatggccattgcgccaacccattacatctggcaacgagagcggtctgtgcatcacagtggagctgttaggaactacaacagagatgaggttcacctgcccaggggacctagtgctacaccagtggattgctcactgtgtggtaaaaaaggaagatacgtgagactgggactgtcttcatcctcatcttcctccagtgacacaggagagctaatggaaaaaggttctcaggaactacacagtgcattctcagtggacacggcaggtgaccctcctcatacctattctcaagtagccaatgaccatcaatcaaacaaagaaaatgaaactaattttgtgaagaaaaacaaatccgtggaatggtttgcagagagtgaagaatgacaaggctcaactaaagcaagctggagtcacagctacagaatggcaaaccaaatgcaagagaacgaaaacgggactgttacctagttgcacaatggcctttagcttctgttacttttcaaacacatgtaaaagtcatacaaatcatagtaataactaaacataccaaaataaggtaaaaagactttctgaagtagtgactaataatagtcagttctaatttgatccttctttgtcttcagattcagtgctgtcatctcaggtaccagttcaggtgtggtctgaacttcctccaccagcttaaaaggttaaactagaagacaaaagagctagtttaaaagagagaacagttaaggtcataacactgaattaatgaaaaaaaaaacaattaatatattctgaaaacagtactgacatgtgcgaccactttaccagtgaataagtcaagcaatgcagggacatggtctgtgtggaaaatcagaatgtgactcttctgtaacagaaaatgcacactgtacaaatgttttacagtttgttcacaaaaagtgttgaaatgttaaacactgtcccttttctgtaagctttttctcagaacttgttttttaagcatttttgagattgtttggctagttactatcagaaacatttgtcagtgattacacagtaactctacagatgggcttataaccaaacggagaagcctgtttcataaatcaatgtatcgaaaacccatttcatggcctaaataatgtgtacatatgagtacctaaacttgtttcttggaagaacttcagcaatgttgtaggagctagaaaaacaccatatttcattttctatacaataaataaaaaataaaaccct

SEQ ID NO: 266 - protein, 333 aa, Mus musculus
IAEAEAVGPLALRRPAQESWEAKMRHNQMYCETPPTVTIHVKSGSNRSHQTRKPISLKRPILKDSWEASENNAQNNKSKRPRGPCLIIQRQEMTAFFKLFDDDLIQDFLWMDCCCKIADKYLLAMTFVYFKRAKFTINEHTRINFFIALYLANTVEEDEEEAKYEIFPWALGKNWRKLFPNFLKLRDQLWDRIDYRAIVSRRCCEEVMAIAPTHYIWQRERSVHHSGAVRNYNRDEVHLPRGPSATPVDCSLCGKKGRYVRLGLSSSSSSSSDTGELMEKGSQELHSAFSVDTAGDPPHTYSQVANDHQSNKENETNFVKKNKSVEWFAESEE

SEQ ID NO: 267 - DNA, 39432 bp, Homo sapiens
  misc_feature (1)...(39432): n = A,T,C or G
ccctcagctgccttcgcggcgacgacacacgcgctccccgcagcgggctctgggctgagggacctggcgagggaggcagtggccgcgcaggttggggctttggccgccctccgcccggcggcgtagcgggtgaaggttccaggggaaggacgggcagggccgataccggaggctgctcccgaagctcggccgtctgctcggagggagggccctgggcaggcgctcccgtctccacgtgtgcctgccgcctttattgtgggaggaatggagatttggggggtctttttgataaatcctacctccttatgtcccattaaacacctctttttgtccccaagatcgtctgccccagaattttgagatctgagctgctgtgtctcagtaccaggcccgtagctcatttctcagaattcacgaagattctcttacatgacatccagtaggactggagggcccctagcctcaatcttttaaaaagccttatgccgagttgggcgaatccttgaggccaggattcgagagcagcccacagcgaaaaccccgtctctacaaaaaaataatgaaaaaaaaaattaaccgggcatggtggtgcgcacttgtaatcccagctacttgggaggctgaggcgggagaatcgcttgaaccctggaagcggaggttgcagtgagctaaaacccgtctctacaaaaaataacttaaaaaaaaagtatcctggcatggtggcgggcgcctgtaatcccagctcctcgggaggctgaggcgggagaatcgcttgaacccgggaggcagaggtggcagtgatccgagatcgccttatagctggggttagctggttttgttttcttggcaaggtgacgataagtaatactggagtgcttactatgtgtcaagtgttttacacatgattttatttaatatttaaaactgatttactggttaaagaatatgggactttgatgtcagttctgcattcaaattctagctttatcacttactatgagcctttgggaaatttcttaacttctttaagcctcaaatttcttatctagaaaataaggataaaataatacctaccacacagagatgttttgagaattaaatgagataatgcatgtaacacattcatcagtgtctggcacatattctctgtgtgtgactgcattcataaggaagttaaggcttacttgcctgtcctgactgagttgccaatggatattgctattaggtttttcatataggcaaatgaatccccagacaacttctgcttgtttcatattatggctgggaaccaccaccctttatatcaccccccagagaagaggttatttcagatgcctctagaatttttgtgatttacttaccaaaaaaaaaagaaagaaagaaagaaagaaaatcccaaacatcctattcaagtatgaatcctggtatgatttttttaatgttcatggagtccatataaaaattcactgaaggaggccgagcatggtgtctcacgcctgtaatcccagcgctttgggaggccgaggcgggccgatcacctcaggtcaggagttggagaccagcctggccaacatggcgaaaccccatctctactgaaaatacgaaaattagcggggcgtggtggcaggctcctgtaatcccaactactcaggaggctgaggctggagaatcgcttgaacccaggaggcggaggttgcagtgagccgagatcgagccattgcactccagcctgggcgacaagagcgaaactccgtctcaaaaaaaaaaaaaaaaaaaaaattaaaggattttacctgatgagcacagtttctcctacttctccttctttccctatctcttgcagttcctaaaatggctcatatttttaatttggttttcgttcctttcctcttgcttgctctataagaactctcattctcttagtatatctaagtgaagagcaaaattaaaagatacccttaggtagaaattgaccaagactagcattgatagcttctctccttcagcttgttgtatgtaccttttctgccagtgtttgcttattaaagacaatgaagctccacttggggaatttcagacattttcttctcattcagttttctgaaattgtatgggaaatatcccaacacatacataagggtttagaggaatagtgtaaagacgcctactgtggatatattttacctttttgattgatagaaaatttgcattatattttatgatatatccatggttgttttaatataaaagcactattttaggttacttagcattgagtaaaacttatcttctggaatatgtgccacagttattttgtgttctggtacattccacccaagtctagccccaacactcaaatttgaagcagaattcttagccacggtactataccactgataactccatactagaatttgagaatcctgagtactctttagtttcttctatctagattttttttttttttttgagacggagtcttgctctgttgcccaggctggagtgcagtggcatgatctcggctcactgcaacctccgcctcccgggttcaagcaattctcctgtctcagcctccccagtagctgggactacaggcgcctgccaccatgcccagctaatttttgtatttttagtagagacggggtttcaccatgtcggtcaggctggtctcaaactcctgacctcaggtgatccgcccacctcagcctcccaaagtgctgggattacaggcatgagccactgcgcccggctcttctatctagatttaaggctgctcttactttgaaaaaaatatgcagatgaggcctccagctgtctcccagatgaggtgggcaggaaagagcagaacgttcttactcaagtctcaaggctcaatttatcacctactcctctttctatggagtttataacccgcaccccaagtacataattgccttcaatttggcaggactttaggatctaggaagaaagatgggatgagaggagcaattagataagtatattcctctgcctagttcttcaaaatgtagccctgcgctatctaatatggtagccactggccacttgtgtctattaaacacttgaaactgaataatttaatttttactttaaaaactgaaggagcatatttttctcctacaaattacttcatttttaaaaataggactgcatttcacttttactgttgaaaaattagtatcagaacagatttgtatataagcatattcatctaaagtaacaaaaaaaagaaaaaaagattgagatatgctgtaagaggaaaatacgcagcagatttcaaagacttagaatgtgaactatctcactgatttttatattgattacatgttaaaatggccttttggacatattgggttacataaactttattattaaaagtaattttatctgttttgttttgtaaggtggctctaaaaatacaaaattacatatgtggcttacattatattggacagtgctgttctaacctcgctaaatccaatcttattttccagtccttccttcagaagggaaatttctgagggtcaggaaggggaatctgtacctcactccttgaacaccaaggaaggtatggctgcctgagtcactgtgaggttgcattcagaggttctcagtagggtcctagagtagtttcctgtgttgcctattcatacctcaatttcccattatcctagaaatatttgaccacaaaaataatactaagtgtagtaattatgtgaactaatcaccaccaaagaaggtgatgattatgtatattggtaaatattgatagattaactgtctcagattttattagattatgacaacatacattcatatacacttataatcagtcactcaaatagctttgtcatacacttacaactttaaaaattagaacaggccaggcatgatggctcaagcccataattcccacactttgggaagctgaggcgagaggatggcttaagctcagcagtttgagagcagcctgggcaacatagtgagacctcatctctacaaaaatttaaaaaataagccagatgtggtggcatacacctgtggtcccaactacaagggaagctaaggaaggaggatcacttgagtccaggaggtcgaggctgcagtgagccgtaatcatgccaacgtactccagtctgggtgacagagcaagaccctgtctgaaacacacacacacacacacacacacacacacacacacacacacacgagaaaaaaaggaaaacagaaaagtaagtaaaataaaaattagaccaatttatgaaaagccttcaaagcacatctacattttttgctagaattgctttcaacttttcaataaataccaataaatgcttattgaataagtgaattttataatatatcaaggaatttaccaataaagagatatggggttttgtgggagggggggtgctttgtaatttaatacttgataatacattctggaaatagttgtccttgtttataaaaaatttgaggtggcatataacaacaatataataaaattatgtcaattcaagcagaatagaaaaaattagaaaattagccggaaaaaagaagactacaaataaattatgaagtcagcatcatttctataattaactttcaaatttggtcgagttctgcagccaaagcaaaatggcatacagtatcttcttatttgggaagaggatgtccgtttgttacccaaaagaagcatagcttttcctagcgctgaatttcaaaagcaatttttaatgggagtcactgtcacaaataacattttaatggcaagtttagtaacattttatatgactgcatatggtagtatcatccagttagttgtttatatatgaaatgaatgtgtgtgatgaataattgtatgttttatttttacaggaatattgggaaaccaaaatgaggcacaatcagatgtgttgtgagacaccacctactgtcactgtttatgtaaaatcagggtcaaatagatcacatcagcctaaaaagcccattactctgaagcgtcctatttgtaaagataattggcaagcatttgaaaaaaatacacataataacaacaaatctaaacgccccaaaggaccttgtctggttatacagcgtcaggatatgactgctttctttaaattatttggtaggtttaaaatattgtaatagtggtaattataaagtactaaaaacctagaatgtaaacatctaaatgtttttattctgatcaaagaggatatcattatttttgtattaaatttcccatctccaaccaaatttgtttttgttttacttagtctttttttttcaatgttgggtttttgtttgttttgtttccttatggattaaaaattcatactcatctagcttctagactacttaaatccagatgtcaaatgtaaattctgggcaattcaacttcatagcccatggcatgagttttatttgacctaaaataaaatactacataaagactcaggtgagctaactgacccagtttgactgggcctaaggggtttcccaggactttctctgctaaacccaagaaaactaggaagcttggtcacactagagaagtttcaggataacagtttgggaacattgttaaaaattaactatgctttatcatgtccatataatgaaactgagtttgaatttgtttaggttatgagacagtgctactttgctgataatttcttaacattggcaaaaagaaacttctttatagtactgtactcctaactaggaaagagagggaatttttttttttgaggtagggtaataaggtaaacagattagaaaaaggggtaggatagatgagttctgaaaaatatttggagtaatgaatcaagtcaagtagatgctacagtctggtagattgtagcttgcttgtttctagaggaaggtcaggcgcattaaagcaagctagttacgatttaaagaaaagcaaaatgaaaagatgaaacaggaaaaaatgtaaggaatataagtagaaaaagatataaagatgcttccccatcagatttagaatgttaataaaagttccccttcttttcattaagagcagaacaaaattattacctgcaaacttttttagtacccaaaactcatcatcagaaacacgggaaaatacctggctgtaccattttaggtaacttaagaaattataaatagagcctgggcgcggtggctcacgcctgtaatcccagcactttgagaggccaaggcaggcagatcagctgaggtcaggagttcaagaccagcctgaccaacatggagaaaccctgtctctactaaaaatataaaattagccgggtgtggtggcacatgcctgtaatcccagctacttgggaggctgaggcaggagaatcgcttcaacccgggaggtggaggttgcggtgagccgagatcgcaccattgcactccagcctgggcaacaagagtgaaactgtctcaaaaaaaaagaaagaactataaatagaattaatgggccaggcgcagtggctcattcctgtaatcccagcactttaggaggctgaagggggcggaccacttgaggccaggagttcgagaccagcctggccaacatggtgaaaccccatcaggcgtggtggtgcatgcctgtaatcccagctacttgggaggcggaggcaggagaatcgcttgaacctgggaggtggaggctacagttgagccgagatcatgccactgcactccagcctgggtgacagagcaagactctgtctcaaaaaaaaaaaaaaaaaaaaaaaaaaggctggatatggtggctcatgcctgtaatcctagcactttgggaggccaaggcaagtggatcgcttgagctcaagagttcaagaccagcctggggcaacgtggtgaaaccccctctctacaatacaaaaaaaaaaaaaatttatctgggcatggtggtgcatacctgtagtcccagctatctggggggctgaggtgggaggatctcaaacccaggaggttgaggctacagttgagccaagatcacgccactgcactccagcctgggtgacaaagtgagaccctgtttaaaaaaaggaaaaaaagttagcaaggcagaaattcttattctcaggaaatcagtagttattcttggaactttccgtatgactacattgatgatattttagtgtacacaaatgaatataaagaagttatgcctttttacttaaaatgaagaagaggagcctggcgtggtggcatatgcacctgtagttccaggtactcaggagtctgaagccagaggatcacttgagcccagaagttcaaggcccacctgggcaacatagtgaggccctgtctctttaaaaaaaaaaaaaaaaaaaaagagaaagagagaaagggggaatggaaaaacagatttttctagattacattctgacaactattaatgtattttgagattatatattttagccctttagaattgaaatattttacctactttctagatgttattatttttaacaatgtgtttgtttgttgatctttttatcctaatagttttttcaaaatgttaattataaataatgaattatgaatcctttttatatagacattttcatatgtatttgagtaatagaaagtggaatagagataaataggagagaagaatgcaaaactaaaaatactgttggatattcagtaaaccaaacacttctaccattctccaatctgagccatatgttaaggcaaatcagatggcttgatgaaggataaagcagtagtttttcgtacagtctttgcaatggtaaatacaccaaagaactgaaaactccaccttaggcaacactggttcattcatttttgttttatttctaagcaccatgtataatctcttgacatagaaattaattcttcaaaaggaaacattctgcttttaaaagacaagttatagctatcttttgttgtagatgacgatttaattcaagatttcttgtggatggactgctgctgtaaaattgcagacaaggtaaatttggtaacagtataacaattaaccagcattataatgtaactgaaccattagagctttaatgagaccttataagaattttctatcttattagttatgattaagaaaagagctagtggccaggtgcagtggctcacacctgtaatcccaaaactttgggaggctgaggtgggtggatcacttgaagccaggagttggagaccagcctgggcaacatagtgagacccccatctctaaaaaatttaaaaattagccaagtgtggtggcatgcacctgtagttccagccacccagctgaggtgggaggatcacttgaacccagaagttggaggatacagtgagctttgatcaattgtgccactgcattccagcttggacaatagagcaagactctgtctctaaacaaattaattaaatttaaaaattaaaaaaataagagctagcctgcactgctccttcaaagcagaagctttacacatgaatttctggaattagcatatagcatagattcagtctatacttaaggaattgtagaatattattgattacatttaaatgaccttaaatttgtatttgattgaaaacagaaatcaaaacaggtgtggcagctcatgcctgtaatcccaacactgtggaaggccaaggcgagaggatcacttaagcccaggagttccaagaccagccttggcaacatagggagacctggtctcttaaaaaaaaaaaaaaaaaaaaaaaaaaaatatatatatatatatatatatattttatcctgaggcaggaggattgcttgagccagggaggtcaaggctgcagtgagctgtggtaccaccactgcactccagcctgggtgacagagccagaccctgtctcaaaaacgaacaaaaaccaaagaaccacaaacagaaaatcagtatagacttaatacattttgatcagttattaccttttatcaggctgtggagaaaaaatattctgagatttactttactaaggtagtctgcattttagtattttgtaagtcagagaaaacaaatctcagtaatttgtagggtaaaattagtttaacatgttgtttaggaatcagtgtttcataaaagaatgtctgacttacacactgggagcagcgatgtttctatattctttagattttgttgaatggttaaaatttcagctttgtcgctcatacctgtgatcctagcgcttggcatgctgaggcgggcagatcacctgaagtcaggagttcaagaccagcctggccaacatggagaaaccctgtctctactaaaaatacaaaaattagccaggtgtggtggtgcgcacccatagtcccagctactcgggaggctgagacaggagaattgcttgatcccagaaggcagaggttgcagtgagccgagaccgagccactgcactccagcctgggcgacagatcgagactctgtctcaaaaaaataataataataaaataaaatttcagctttgtatttttcaatttttttcttttagaaaaatatttctcgtgctaagaattttcagctttgtaaatgccattttgtaccaagcagtcatatttgaaaattaagcgtgactttacatcactactagccaacagtaaagggaatgagtggaaggttagcttgtgattaaatacaaagtactggggtgaagatttttatttaagcttaagatgacagggatacactagaagaaggtttataaaattttttaaatttcattttggaaaatttaaaacatacacaatttgaagtaaatagaatagaacaaagagcctccatatgcatctcatctagctacaatagatcaactgtggctgttcttgtttcttctaatgcctctcaccaaaaacgattattttgaagctgatcccagacatcctaacattttatccataaatatttcacaatatatcactaaaagttaagagctgttttaaaacaattacaatgtcatagaacttttaaaattaacagtaatgctgtaatatcaaatatacaattcatgtggagttatgatgtgattttttttttttctttttcttttttttttttttttttttgagatggagtctcactctgtcatccaggctggagtgcagtggcgtgatctcagctcactgcaacctccgcctcccgggttcaagcaattctcctgcctcagcctcccaaatgtctgggattacaggcatgtgccaccacgcccggctaatttttctgtatttttagtagagatgggggttttaccatattggccagcctggtcttgaactcctgaccttgtgatccacccgcctcgacctcccaaagtgctgggattacaggtgtgagccactgcgcccgtcaggaagttttaaactttatggttttaaggtgcagtaaagttgttgtgcagaagggggcagtgttggaaaagtaactacctggagtactgtcttaacacgatctcaagagtactttactggaagttactgtgaaaacttggtatcacctttgtggcaaatcctgttacaataggatgaataaatgtcttacgagagataatctgatacattattataacttgtttttaatttgaacagacagaacctggcatatgtgctaataatcaggctagagatgtatctttctaataatacatttaaaacacattctccccatgaaaatacagccatgttattctaatttctgaagtcatttggaaatcattttaaaaagttattttaaaaagtgagtatggatgtctgtaactaaaagggtttagaaaaattatatatacacatacatacacacaaatagagatagcaaacatggcaaatttggtgcatctaagtgaggatgcatggctgttcattttgctgttatttcagtttctgtataggtttgaaatttaaattagataaaagtgggattttagctcaaactattggcaataataaaatttaggagtccattctagtttataatgatataataaatagtcaagaattacttttcactgttcacatggtggattacaggaatccaaaaattaagtacacaattctataataagtaacactttattgttttagcttattcatcagaaaattttaaagttaactattttaaagcagttttatttatgaaagcaaaacattaatattaatttttaacttttttccttatagtatcttttggctatgacctttgtttatttcaagagggctaaatttactataagtgagcataccaggataaatttctttattgctctgtaagtatactttctactaagtgattgttgtgttatctattatatatattacaccttatttaaaacagaggctatttaaaaccttatgtatatctttgaataggccttcctgtataaatgctgtatgttttttactttaataggatatttttatgtttttttcacttatcatgctatatgcctaagatttcctttttatttatttatttatttttgagaannnnnnnnnnnnnnnnnnnnnnnnnnnnnnnnnnnnnnnnnnnnnnnnnnnnnnnnnnnnnnnnnnnnnnnnnnnnnnnnnnnnnnnnnnnnnnnnnnnnnnnnnnnnnnnnnnnnnnnnnnnnnnnnnnnnnnnnnnnnnnnnnnnnnnnnnnnnnnnnnnnnnnnnnnnnnnnnnnnnnnnnnnnnnnnnnnnnnnnnnnnnnnnnnnnnnnnnnnnnnnnnnnnnnnnnnnnnnnnnnnnnnnnnnnnnnnnnnnnnnnnnnnnnnnnnnnnnnnnnnnnnnnnnnnnnnnnnnnnnnnnnnnnnnnnnnnnnnnnnnnnnnnnnnnnnnnnnnnnnnnnnnnnnnnnnnnnnnnnnnnnnnnnnnnnnnnnnnnnnnnnnnnnnnnnnnnnnnnnnnnnnnnnnnnnnnnnnnnnnnnnnnnnnnnnnnnnnnnnnnnnnnnnnnnnnnnnnnnnnnnnnnnnnnnnnnnnnnnnnnnnnnnnnnnnnnnnnnnnnnnnnnnnnnnnnnnnnnnnnnnnnnnnnnnnnnnnnnnnnnnnnnnnnnnnnnnnnnnnnnnnnnnnnnnnnnnnnnnnnnnnnnnnnnnnnnnnnnnnnnnnnnnnnnnnnnnnnnnnnnnnnnnnnnnnnnnnnnnnnnnnnnnnnnnnnnnnnnnnnnnnnnnnnnnnnnnnnnnnnnnnnnnnnnnnnnnnnnnnnnnnnnnnnnnnnnnnnnnnnnnnnnnnnnnnnnnnnnnnnnnnnnnnnnnnnnnnnnnnnnnnnnnnnnnnnnnnnnnnnnnnnnnnnnnnnnnnnnnnnnnnnnnnnnnnnnnnnnnnnnnnnnnnnnnnnnnnnnnnnnnnnnnnnnnnnnnnnnnnnnnnnnnnnnnnnnnnnnnnnnnnnnnnnnnnnnnnnnnnnnnnnnnnnnnnnnnnnnnnnnnnnnnnnnnnnnnnnnnnnnnnnnnnnnnnnnnnnnnnnnnnnnnnnnnnnnnnnnnnnnnnnnnnnnnnnnnnnnnnnnnnnnnnnnnnnnnnnnnnnnnnnnnnnnnnnnnnnnnnnnnnnnnnnnnnnnnnnnnnnnnnnnnnnnnnnnnnnnnnnnnnnnnnnnnnnnnnnnnnnnnnnnnnnnnnnnnnnnnnnnnnnnnnnnnnnnnnnnnnnnnnnnnnnnnnnnnnnnnnnnnnnnnnnnnnnnnnnnnnnnnnnnnnnnnnnnnnnnnnnnnnnnnnnnnnnnnnnnnnnnnnnnnnnnnnnnnnnnnnnnnnnnnnnnnnnnnnnnnnnnnnnnnnnnnnnnnnnnnnnnnnnnnnnnnnnnnnnnnnnnnnnnnnnnnnnnnnnnnnnnnnnnnnnnnnnnnnnnnnnnnnnnnnnnnnnnnnnnnnnnnnnnnnnnnnnnnnnnnnnnnnnnnnnnnnnnnnnnnnnnnnnnnnnnnnnnnnnnnaaaaaaacaaaaaaaaaaaacaggactagaagaaactgatttcttttttctttttcttttctttctttcttttttttttctttctttttttttttgtgacagagtctctctctgttgcccaggctggagtgcagtggcattatctcagcttgctgcaacctccacctcccaggttcaagcaattctcctgcctcagcctcctgaatagctggaactacaggcgcatgccaccacgcccggctaatttttttttgtatttttagtagagatggggtttcactgtgttagccaggatggtcttgatctcctgacctcatgatacacctgcttcggcctcccaaagtgctaggattacaggcgtgagccaccgcgcccagccaaagaaactgatttctacttgtattcaggagatatattttccagtgcacagggaaaaatgaactcaaaatttaggatgattgctaaatataatagtattaggtaatactgagtactatgtgcaaggcaccacaaaaaattttaatgtagtattaactcatttaattttccctatgaaataaattttttattatccccattttacagatgaggaaactgagaggaagattaagtactttctaagaacaaacaagttagtaagcagcaaagcaggggcacaaactcaggagtggttatcaatgaccaaattcagccatcaaccactaagttaaattgctgtttatatatctcagtattgtattgtatctatgttgatgcaatatttattttgtgttttttttttacctgagaattaaaaacaaaccaaaagaagctttagtttaaatcttactagatgcctgaaattgaattcgtttaacttgttttataaagttattaccagtagagcactattgagtttatgcaatacaattatctgtaaggttgtactgcatgttgtattatgtaagctccatattaaaaataacatgaattataatttccattttaagactaatcatactttttgtatggcctcaatagttctcctcgttaaatattttctcagccatagttctaaagctcaagttcttttcctttctatacagtcttataatgtttcctttctatgtattcttataagactctgaacttctattatcattcttccacattacctttcacaattatttgtttcatgcttacttgccttctttacttaattgtaggctccttatgggcaaggaacatataacattttatttcatctttcaattactaacatataggaggttcttaattttttttttgagacagggtctcactctgtcacccaggctggagtgcagcagcatgatcttggctcactgcaacctctacctctagggttaaagtgatcttcttgcctcagcctcctgagtagctgggaccacaggcacatagcaccacacccggctaattttttattttttatttttttttaaagatggagttttgccatgttgcccagactggtctcaaactcctgacttcaagccatccttcccaaagtgctggaattacaggcatgagctgcacacctggccttctggctgcttttaagacctctttttctttggtgtttggcactggtttctttttaataacttacttgggatttggtaacctttctgaagattaaggattgatgtttttcgtttttgttttttgagatggagtcttgctctgtcacccaggctggagtgcattggcaccatcttggctcactgcaacctctgccacccaggtttaagcaatccttccacctcaatctcccaagtagctgggactacaggcacagaccaccatgcctggttaacttttgtatttttagtagagacagggtttcaccatattggccaagctggcctcaaactcctgacctcaggtaatccacccgcctaagcctcccaaagtactgggattacagacgtgagccactgagcctggcctgaagattgatgcctttcaacagacaactcagaaaattctatccactgtctcttcaaatatttctcttcctctgctatctcctttttctccttttgaaaccaattaaacttgttatgcctcgctcggtcttccccatcacttatctttgaaattttctttttctttctttctctcttttttttttttttttttttttttttgagacagtctaactgttgcccaggctggagtgcagtggtgtgatctcagctcactgcgatctccacctccctggatcaagggatcctcccacctcaatctcccgaatagctgggaccacaggcattcaccacaacacccagctaatttttgtatttttttgtagagatggggtttctccatgttgcccaggctgggtttcgaactcctcagctcaagcactccacctgcctcagccttctaaagtgttgggattacaggtgtgagccactggacccatccccatctttgctattttcttttttcttttctttcttttttttttttttttttttaagaaggagtctcgctctgtcgcccaagctggagtgctcagctcactgcaagctccgcctccgggttcacgccattctcctgcctcagcctcccgagtagctgggactactggcgcccgccaccacgcctggctaatttgtttgtattttttagtagagacggggtttcaccgtgttagccaggatggtctcaatctcctgacctcgtgatccacccgcctcagcctcccaaagtgctgggattacaggcgtgagccaccgagccgggccaatctttgctattttctatctgtgtttctttgggctgcattttagatcatttatttagacttatctctcagttcactaattttatcttcagcttatgtctaatatgctaatttcattataaaattttccatttataaaagttctattttcttctttttcaaatatacttttccatgtatcgtattatctttactggaaatagttattcttacgttctgtgtctgttccattactttcagatttcagggtctgttactgttcttggtaccttgttcccttatgtgttttgtaatatttttattgtaagttgcctgtttttcttggaaagtcatctgtgagacttgtactatttccaatgagaaatctaccccatcctaatcatggtgcctgtgttatctaatggtttttttttctctgagtacttttaagatttactctttatcactggttttgagcaatttgattgtggtgttcactggtttaattttcttcatgtttcatgtgctttgaggttcattgaacttctttgtaggtttatagtttttattaaatttcaaaaactttcagctgttactccttcaaatgtcttctgtccacctcattttctgtctgccctattcagattacagtgcattgaaagaatccttcattgttattgatactggccttcagagtctccaattccgcctgtttcttgaagtcccacatcaaactgatgctgtgtttattttttcttatttttttcttttttcttttttctttttgagacagagtctccccgtcacccaggctggagtgcagtgttgcaatctcggtggctcactgtaacctctgccttccgggttcaagcgattctcctgcctcagcctcccaagtagctgggattacaggcgcaggccaccacgcccagctaatgtttgtatttttaggagagatggggtttcactgtgttggccaggcagatcttgaactcctggcctcaagcaatccgcccaccttggcctcccaaagttctgagattacaggagtgagccaccacgcccggccctcatcttgtgtttatgatttttgtttcttttttctctgtgtatttcatcttgaatactttctattgtgtcttcaattcacagatgttttctctgtaatatttaatctgccattaatcccaatcagtgtatttttcattgtacacattgtagttttcatctctaaaagtacattttcaatatgtctacttaactttttgaacatacagaatagttataactgttccagtgtccttatcttttatgtcaaccatgggtatcagtttggggttgattttgattagtcgccttatgatgagtcatgttttcctgcttctgtgcatgcctggtccccatcaagcattcagcagaatgctgagtttcatatgtgtataagaaaattacctgaatctgaggaaagatgttaagaaaagattaggaggaatactgcctaacattcacatacggctgcaaatagtggctgttcccaccagccaggctgaaaagattcataattcatggagcattgagaagagtactcaggaaggtcttgcctcagtagtgaggaataactagccccagactgaacattgttccagatccacctaaaaaaatcataaaagcaacatctgaaagaatcagactatttcaaagtaactaactgcatcccagaacaaagctcaagatttgtaggaataagaaatacctagaacccaacaaggtaaaattaactacatgtatctctatttttgaactgcatttctttaattaacgttgaacacctttcatgtgtttataaaccacttttatgtcttggtgtatgtgaactacctgtttctgtcctttacccatttcttttttgggttgtgatcttctttgttaggtatctggctaatacagttgaagaagatgaagaagaaaccaagtacgaaatttttccatgggctttagggaaaaactggagaaaattgttccctaatttcttaaagttaagggaccagctctgggatagaattgactatagggctattgtaagcaggcgatgttgtgaggaggtaagaattttaaaatgctttatatatgtaatctttgttttctgtttatcttattatccttgttttttaacgtgcttctaatgttttggtattctgggtttttttttttttttctaatatgtggagtagaccattgatcattaccatgaatacaacttgtgtattacaatgttgctgtcttattatcaccataactaaaaactgtcaaccgggcaagccctgctcacgcctgtaatcccagcactttgagaggctgaggcgggtggatctcctgaggtcaggagtttgagaccagcctggccaacatggtgaaaccccatttctactgaaaatacaaaaattaggctgggtgcggtgtctacattctgatgggagtgatccaataaaataaaaaatgtgaaatgctggaaaggggacaattactggaatgtgatgtccttgagaaagcacgaaaagatgagatctagcgcacaagtatagggaatggatttggataggagcaaagatcgttctttcacagtaacaaagggaaggcagaatataggggtacgcatgtaggtaggatagacgataagatgtgagcacgtggacagtctgttctactgcttctcttttctcagtaaaagagagtaatgcatgattgttgtaattgaagtgtgaggacagagatgggagatattagaagtgtactagattttttacttcattacatttacaggttattgtttagacaatagataagcaaataaataattacaaattttattcagtgctacagaaagaaacaaagtattgtgataaggataatggaattcaattcatttaaataaggtgacctttttgaaaaggaaaaacagttccattattttttttaatggtgccaaattttaaannnnnnnnnnnnnnnnnnnncgggatcccggcgggcgagcggggggaacggagagaaagcccggctccgtacaaggcaaacgggggggcacatctattgtcagaggcagcctacgtctatagtaagtgccgttttttttttttttttttgagacagagtcttgctctgtcacccaggctggagtgcagtggtgcgatctctgctcactacaagctccgcctcccgggtccacgccattctcttgcctcagcctcccaattagctgggactacaggcgcccgccaccatgcctggctaatgttttgtatttttagtagagacggggtttcgccgtgttagccaggatagtgtcaatctcctgaccttgtgatccgcccgcctcggcctcccaaagtgctgggagtacaggcgtgagccaccgtgcccggcttatagtaagtacttttattttagtgtatttcttctgtctaaaggatcatcaatatattgaaaaagggtgatatgaacaaaccaaaatatcttatttaggattacaataacactggagttgaataataatttctgctcaataaagtatgtgaaatttcaggttcccaaaattgaaacactatttaacacatatattaaatggtatacaatttaaatattctttaaaatcataactcttttcacaaagaatatattgtttccttaatgccaaatcttttaggataaatcagcaagacactaaaaatttaataatcagttattttaccaaatgttctggtttttaataaagtcactatttcaaaccacagaaaaattctagagtagaaaattaaatggaaagcagtggtcactgtaagctctagtattagttaagaaaaatttgataaatgttgatatacttgcaaatcttaagatttgatagaattaacttattcattaatatacattgatttagtgagcacttagtaaatacataccagaaactatattatttcttttaatttaaaaagggcaggcaggcatggtagctcacacctgtaatcccagcacttttggaggctaaggtggcctggatcacttgagtccaagagttcaagaccatcctgggtaacatggcaaaacactgtctccacaaaaaatacaaaaaattaggtaggcgtggtggtgcacacctgtagtcccagctacttgagaggctgtggtgtgagaatcacctgagcccagaagattcaggctgcagtgagccatgattatgccactgccctccagcctcagcaacagagcaagaccctgtcccaaaaaataaaaataaaaaaggcttgaagcaaaaatagcagtattacatctattaattctaggcagtagggatatggatgtttgttatattattcctaatgctttttcataattttaaaatttagcaacatttaaaaaaattaatggaacttgtttttcctcttcaaaaaggtcaccttatttaaatgaatttaattccattatccttatcacaatactttgtttccttctgtagcactgaataaaatttgtaattatttatttgcttatctattgtctaaacaataaactgtaaatgtaatgaagtaaaaaatctagtacacttctaatatctcccatctctgtcctcacacttcaattacaacaatcatgcattactctcttttactgagaaaagagaagcagtagaacagactgtccacgtgctcacatcttatcgtctatcctacctacatgcgtacccctatattctgccttccctttgttactgtgaaagaacgatctttgctcctatccaaatccattccctctacttgtgcactagatctcatcttttcttgctttctcaaggacatcacattccagtaattgtcccctttccagcatttcacattttttattttattggatcactgccatcagaatgtagaattgctctaagatatccatcaataaaaacaaaaacaaaaactttatcccccagctaccactacatttctctgctttgcctcccttataaccaaactccttgaagaattgcttgtattctatctctacttctgttctttccattctgtttgaacctgttatataaagtatttttcctatcattctgtagaaacttgtcaggccaccaaatatctctatatggccaaatcccaaggttaatttgtattcctcaatctactcaatttagcagcatttgacactatccctcatttcttcctgaaacactgtcttcacttggttttgaggataccaggtttttttcagtcatttttgccagttccttttcacctcaccaacttcattagagtgccccagggctcagacttaggatctcttctcctttctattggtattaacttattaggtgaccccattcactctcaaggctttaacactaacaactaataatttcttccaattccagatctgcataccaaatcgcctgttggtattttttgtctaattgatacctcaaacttaacgtgcctaaaattgaactcctgactccttgacacagacctccagatttgctcctcctgcagtcttccacatattcataagtagcaactctattgttttagttgctcaggccaaaaaattatttccatttacccttctttttcttatatttgtaccttgaaaaaatatccagcatcctaccatttctcaccacctccaccactaatactatacttttattgtcacctcttgccttgattactggcataagtttccaaatagtctctcccacccccaccttttttttttttttaaagacagggtcttactctgttacccaggcagtagtgcagtggtgagatcatggctcattgcagccttaacctcctagactcaagcgatctcctgccttagcctcccaagtagctgggactacaggcatgtgccaccatgcccagctaatttattttttgtagagatggggtctcgctatgttgcccaggccagtctcaaaatcctgtgcctaagcaatcctcccaccttggcctcccaaagtgctgggattgcaggtgtgagccaccatatgcagctataatctattcttcatacagctgccagagtaattttttttttaggtaagtcaaatcatgacttctctactcaaaagcctccagtgtcttccagccttacatagggtaaaagagaaagtccctgtcatggtcctacatggtctatcagccctcctcccttatctctttgatttcatctcatatctttgctcttccactcaagctacaccggcctccttacctcaaagataccagttacactcccatctcatggtctttgcacttactattcccataacctggaatgttgttccccaaatatcagtatgcttcacttcctaactacgttcaggattctgcttaaatgtcacctcagagagacctttccttatcaccttatatagagtagtatctccctccatggaatagaagtgtccagaaatataccgtcacaattatgttcaattgaattttgacaagggtgccaagaaaattcaatggggaaaatgtagtcttttcaacaaatggtgctatgacaactggatatctacaagcaaaagaatgaagccgaacctctggtttataccatatataaaaattaactcaaaatggatcaaagacctaaatgtaaaacctaaaaccataaaactcttagaagaaaacataggggtaagtcttcgtgaccttgaattaggtttcttagacatgataccaaaagtaacatgtaacaaaagaaaatataaaatagacatcatcaaaattaaaaccttttgtccttcaaaggataccaagtgaagagatgacctataaaatgaaaaaaattttttgcaagtcatctatttgataagggtcttgtatctagaaatataaagagctttacaacttaataataaaaagacaatcaatttaaaaaatgggcaaataatccaaatagacatttctccaaagaaggtatgcaaattgctaaaacacacacacacacacacacacacacacacacacttgaaaagatgttcaacatcattagctgtcagggattgcaaatcaaaagcacgatgagatattacttcacacccactatgatggctataaacaaaacaaaaataaaagtattgaagaggatgtggagatactggaaccctcatacacttcttatggaaatgtaaaatggggaagttgctttgcataacagtctggcaattcctcacaaggttaacatagagttaccatatgatccagcaagtctagtcctggctatatatgccaaagggtaaaaacaaaactatgtccacacaaaaaactttaacatgaatgttcatagcagtattcataatagccaaagtacaaacaacctgaatgtccatcagctgatagaatggataaacaaaataaggtatatccctacaataaaatattacttggcaattaaaaggaatgaagtacctggttcaagctacaacgcagataaccttgaaaagattatgctacataaaagaagcctgtcacaaaggacgacatattgtatgattccatttatatgaaaggtccagaatggacaaattcaaagacagaaagtagattagtagttgttatgggctgagagaagggagaaaatggagtgtgattgctttatatatagagtgatgaaaatgcttcaaaattgaccgtggttatggttgcttaactctgaatatattgaatatcattgaattgtacatttcaattgggtgattctaaggtattttaattacatttcaaagctgttaaaattaaaagtagttcctcccactattactctgtattccctttctcagttccaattttcctcatagcactcaaccatcatgtaacagactgctttttacttatttatcttgttaataaatttcctcccactaaaatacagattccaagagagcagggtctttattttgcatttgtttgttttgttttgtttttgtttttgagacagggtctcattctgttacccaggctgccagctgcagtgtgcaatcgtagctcactgcaaccttgaactcctgggctcaagcaatcctcccaccttggcctcccaaagttctgggattacagatgtgagccatagtgcctgacctttttttttttttttttaagacagagtttcattctgtcacccaggctggagtgcaatggcgtgatcttggctcactgcaacctccacctcctgggttcaagcgattctcctgcctcggcttcccaagtagctaggattacagctgggattacaggcatgcgccaccacgcccggctattttgtatttttagtagagacagggttttcaccatggtggccaggctggtctcaaactcctgatctcaagtgatccacctgcctcagcctcccaaagtgctgggattacaggcatgagcgcccagccttattttgttcttattctatctccagagcctagaacagtgcctggcacatagtgggtagtcaataaatatttgttgactgatcaaatgaatggaacttccaattctttttcataccttcttatccattaaatagggaaacaataaactataaaataattattcactgagctcactttgcactgccgcttactccagtggcagatagagaagctgttttttggctgttccaacaaggtacatttgaatcctgtaggcgtatagaaaaggtaactgcctagtagattttatcctgttctgttaagtgttcactggacaactactttatgaataacacaccaagttcagtgccctgggagtttattgtaaagaagtattatatcaccccattcccattcctgaaatagcaagacatactgttgaaaatgtaactgttctatacatttgttactgaaagcctggcatactgccaaacgaaacatttctttagtcccatatcctaaaataacctcaagttaagatagtagctacaaactagcttataataataatactttacatttgcacagtgctttacaaattatgacttttacagaaattatcacacaaatagctgtgggggtggtggcatcctcatttcacagctaatgaaactgaggaccgaggaggctgggatttactcaaaatcatagaagttgcagagccagaacatctaatgacttcctagtgttctcttttttctgtgacatctagcctccatataaacctctcatattggttagtttagaaaatgcatttatttcttgtcttgggaattaaatagccgcagtattccctccatttcacagatgcaaaaactgtggcttagtaagattgtgatttgtccatggccatgaagttaataagtagcagatactaataacttagtgctctttgaattatacaccactgacataagaaagaacatgtgctgtcttttcaaatagtgagttttgtaattgtctcttttctttttttaatcttggctgcaaagaagctaaaagccaggtattatccttgaccacatcaactctattacattttattactggcatgtctgctttccccttttagtcgaaatttcccttttgggtctaagctcaatgaaattttttccccttttttctcagctgcctcattcctttttggaaagagatgggttgtgattaaattggaaaatatatatagggcttctccagaaaagagtggactatttctttgtttattctgattttatcttcttacctgatgatcttatcaacaactcctttaaggtgggatttatttacattggtgatggcttaatttctaaactggttcacacattagggaggatgcctatctaatgagagagttagactacacttccagcccctttcatgcatcatggagggtagcaatttaatcaagaagtttttctctattcccgttaatactctggccaagatgccacaatatcatcatagctgagttcttcactatctattacttgattccagattaggaatttagaaagcaatgagataagtagtgtgttttgacagaataatccaatgacagtatgcaaaagagatccaatatagggaatgtattggaaactgctaaacttgctatagctggaaacaaggttgtgaagaaaattgatagcagtgctgaagaaaatgaaacagatgttagaaatgttaaaaaattataattatcattacctggtaaccagttggatatagggtacatgggagagggaactgtaagtttcaaatatatataacaggaagagtaatgggttccataatggaaatagggaagcctacagaagcaaactggattctttgggaagataaggaatttggtatatagacatgaatgtaaggcagtaactggatataattaaatgaatggtcaacaggtatggtaaaagtcattacgtataaatgatgcttcgagtatttaagagattcaaggtcaaagtaatattaatactttttaagaactttccaggcactgttctaagtattgcccatgtattattaactctcacaattcttagatctagctaggtaatcccagataagaaactaaggaacagagaggttaagtgacttcttcaaagacacacaataagtaaagcagcactccagtattcaggcctaggcagtctgactccagagtcagtgctttttttttttttttttttttaattttttcatgcctatccctgtctgctccccattcctccccattctcctccctgccagggagaggagaagctgactgggttggttttgacagtcagtgcttttaacacctatattatactacctcttgagatcacagacaggtagagtatatacacagaaaaacagagggccaagtatcaaattttaggaacactgacccaaggcaccccccaatcactaaaaatgacaaaagaataagataaagtaaaaaagggggatgtttctagtacatcaactgctactagtgtttcagagaagtccgtttcatagaatcacagcattgggggactgaaagtgacctattttctcatataaaagacaccctatggcccagaaagttgtgtaatttgcccaaggtcatagaagtaacggatttttttttttttttttttgagatagtttcactgttgtcacccaggctggagtgtaatggcaaggtgtaagctcactgcaacctccacctcccaggttcaaacgattctcctgccttagcctcccaagtagctgggattatagacatgcgccaccatgcccaactaattttgtatttttagtagagatggggtttcaccatgttggccaggctggtctcgagctcctggcctcaagtgatccgcacacctcagcctcccaaagtgctgggattacaagtgtgagccactgcacctgccagagtaacagaattaagatgaaaatctagctctcttgaccctggtagttttatttttaattcacttatcacagtaaaattctaattatatgattatatgtgtataaaatatatgtagacatatttaaaaataaccatgattgtgtattttcctaggtgggttagtatgtggagagactatgatgaacttattgcaaaaataacagtttttggctgagcgaggtggctcacgcctgtaatcccagaactttgggagggcgaggagggtggatcacttgaggtcaggcattcaagaccagcccggccaacatggtgaaaccctgtctctactaaaaatacaaaaattagctgggcatggtggcaattacaggagtgggccattgcacctggactttctaaatgttttgaaaatcactgctctaggcaattaataaggctctgtccagctctcgaatgttacagttctcatttactttgggtcattgatgactgtaactaaagacttttgcttagaatgcttagaagttttagatttcatgaggttagcacatatgtacagttccccagcttgacttaaataattgtcatttgccagatcctcactatgtgatgattttactcatctagtcctcagaataatcctgtgaagtagatgatatgcccattttagagatgaagaaattgagtcccagaaaagttaaataacttgcccagtattatacagctagcaagtggcagtgccagggtaagaaaccaagtgtacccggactctaaagcccatgttttatttaacaaaccttatagaacaatgcctggaagatagtgaggctttataaataatgcctcatctgatcctcgcagcaaccctctaaaatagacatttattatctccatgctgacaaaactgaggaacagcgaggttaaataacttacctatgttcttattcaccatatctcttgtcataattgcagacattttaagattaccataacacacatagctgggaaccttaattatttttatttttacttttattttttgagacggagtctctctctgtggcccaggctggagtgcagtgacgcgatctcggctcactgcaagctccgcctcccgggttcacgccattctcctgcctcagcctcctgagtagctgggactacaggcgcccacaaccacgcccggctaatttttttgtatttttagtagagacggagtttcaccgtgttagacaggatggtcttgatctcctgactttgtgatccacccgcatcggcctcccaaaatgctgggattacaggcgtgagccaccgcgcccggccaattaactttttttaacccaatacattccaaagttaagaatcacatattgttttggagtaactgtattatctttcccaaacttagaatattcagaattaaaaaataaataccctgacaacctggaagattgcttcagtcctatttcctgtttaaaataatttactttgtcaattattgtcttaaagatccaagcaatgagtcactttttagtaatattgccttatctggaagtgctttgttttttaaatcagcaatttggatttttatcttcactttagagacagttgttcttgagttataagttttgaactcaattttagtaaattttgaaatattactaaaattctaaaagttagctttctattataggttatggccattgcaccaacccattatatctggcaaagagaacgttctgttcatcacagtggagctgtcagaaactacaacagagatgaagttcagctgccccggggacctagtgccacaccagtagattgttcactctgtggtaaaaaaagaagatatgttagactgggattgtcttcatcatcatctttatccagtcatacagcaggggtgacagaaaaacattctcaggactcatacaactcactgtcaatggacataataggtgatccttctcaagcttatactggttctgaaggtatgatttagtaatatgccagaattagatttatgcatgttgtttactgagctctagtcagtcctttctggcggggatacataataatttatatactccaacaatatgagttaaattaatcttgaaactttctcccctttcagttactttttgtcttgtgtccatatttgttttgtggtgacccacctaaacagatttttaatgtgacctatgttaagttgaaaactaatgcaccataagcctcagtattttaagagcctgaatcatttttttgaaatgtttattttattcaaaagggtttcaagaagaaaataaatttacttgtaatctcaccttccaactattggtttccttctgtatacttttctaacaaaattagaaccatactatatatctaggcctgcttttttcatttatcacgaagtattttcccatgtcattattgagtcctccaaaaccagttttttttttttttttttttttgaaacagagtctcactttgtcgcccaggctggagtgcagtgggacaatcttggcttactgcagcctccgcctcccaggttcgggtgattctcatgcctcagcctcctaagtatctgggattacagacatgtgccaccatgcccagatagtttttgtgtttttagtagtgagggatttcaccatgttggccaggccggtctcgaactcctggcctcaagtgatctgccttcctcggcctcctaaaatgctgggattacggacacgagctaccgcacccaggccaaaacctgatttttaattctgacatggtataagtaccataatttctttatatatttcattttgttgggatttaagtggctttcagcaatagagtattaattagaaaagaaccttattagctgaaaaaatacaactgcaccataatttcactcaaattatttttatatatagtattatctgacatttcttttctagaaatgtctagaaatagtactagaataatattctactatcagtgatcctttttacttacaaagccttccagattttcacccatctcaagacagggtggacagatttttcatggtcctttctaattctatcatgagaaattaacacacctgcattatttcaaaattttacctatttgtttttaccacaaagatattaatagtggctactgaagctttactaaaggagaaactagactctaaggttcttgaaggtaggggttatgcctcagtcattgttccatttcttggccatagtaatcactcaacaaatttgcacgacagtatagtctcttccttttcaacaccttcaggcatattttttattatgctgaggcaagaggatcacttgaggccaggagtttgagaccatcctgggcaacatagcaagaccccatctatttaaaaaattgtcttttagcatccctcctttcccagcttcctttactctttgatccttataataggtaagctttactgaatgtttacaatgtccaaggcaatatataatgcattttatattcataatatcatttaatattcacagccaactttagggtgaatactatacctccactcagcagataaggaaactgaagcttagagaagttaaataatttgcccaaggagctggagtgacatgtgaacccaggtctctgactccaaactagagcctgaattcctaaatattatggtctactgcccttttgatgcaatcctgctgttggcagtgaaaataagctgccacggaagccttctagcagactactaaggaggtggcgaaagcattaagatctaagtccctgatgaaaggctacatgaagtgagctgggagagaattccaagaatttgaacagatatttacagaaagcaaaacagaagcagttatacatattttattcagaccaaccactgtaggtatcaacagtaataacactccacagtataggccttgacatctcaacaggaaatttgagtgcacctggggaagaaggggctgtgccagtcagtatactttggagaaaaaataaaggtctttgagggattgtggatgaaaagtggggtattaacttaggggagttgtagaaggaactgtgtgctttcatcctttcactgggtgaaagccatgatttaggatttataggtcctatacaggaaggaacaagtatttacccatagccattttattctgagtattaacccatggttaactgtaaaactctttgtttcaggatgtcagagtgtaagcaatataaaggaaaagtattgattgtacacatattttaccagtaaaaatatacattcattttcctccaatagttttaatggagagtgagctcactgggagtagaggggagagtgcaggataataggaacacatgatgctacaggagtgggataagtctctcactgcctaaacagctgctgatttagtgacctctactagcaaaattttcttcctccattccacctaagattggaatcatctgatagtatgtggttgcaaaaactgaattcagcattctccaagaaagacacaaaaagtttatgctctgctttagacttctatgcgaaacttagcatagatggtgatcagtgcttccacctttctttcaaacacaagcaaacaactcctcaatttgcaggtaaagacatgttttcctaccttaaaattttttttgttaaaaacaacacattcaaataaaagttttagataaacatgtttatgacatttattaagaacaaaatatttttcaatttgacaaggtggggtaaaaatactgtcaaaaatttgacttttggggccgggcacggtggcttgtgcctgtaatcccagcactttgggaggccaagagggggcggatcacctgaggtcaggagttccagaccagcctggccaacatggtaaaaccctgtctctattaaaaatacaaaaattagctgggtgtggtggtacatgcctgtaatcccagctactcaggaggctgaggcaggagaatcgcttgaacctgggaggtggaggttgcagtgagctgagatggtgccactgcactccagcctgtgcaaaaagagcaaaacttcgtctcaaaaaaaaaaaaaaaaattgacttttgggaaagatagatgaagcattcttttttttttagatgaagcattctttacatatttatatacatcacaatcaccaatcacacgctagatacttaatctcatttaacatccaaccccctaagaaatcttgaagtggcattattatattcattttactgatgaaaaaacaaactcagaaaagtcacaccattaccaggtaaaacaataacagaaacaagatgggaacccagttctatctgaatatataacatatttttataataactaaactactattgtttctccttactgtatgctgttgtaagctttatgacgcctgggctggtccatgtgaaacatagatatatattatgtattatctgaggacccatgagattttagagtgaagccaagggaaaaaaaaatatgccaagctttagccctggatcatatagggaggcatgtaacattacaactgttaaataatctaaaaccaagtaatttttcctcagaaataaatccttctttgaattttcttacttatttttgtcattaccactgttctagtcacccaggtttaaaattcttacacttaatgaaggtataattagggcatataagttaataatgtgataagggctgtgctaagtatatgatcaacattgaggagcacaaaagatttcagaattaattctgtggggtgagaggtttggtgaaggtttttcaaagtaagatattagctgggcattgactgagtcctgttttgcccagagaattaagggaagggccttctgaatagcagacagaagtttgaaaatacagctggtccttgacttacctatggttgctatacacattcagtggaaagctgtatcatggtctctcttgatgctgggcagaggcagtgagctgcagcttccaggcagccatgaaatcatgagagtaaacaactgattttcgacagtgtaccgcattgccagatgatgttgcccacctgtagcctaatgtaagcgttctgagcacactaaggtaggctaggctaagctgtgatgttcggtggttagctgtattaaacgcatctttttaaaaatattttttgctgggcgcggtggctcacatctgtaatcccaacactttgggaggccgaggcgggtggatcacctgaggtcaggagttcgagatcagcctgaccaatatggtgaaaccccatctctactgaaaatacaaaatttagctgggcatggtgcgggtgcctgtagtcccagctactcgggaggctgagacaggagaattgcttgaacccgggaggcggaggttgcagtgagccaaaatcatgcccctgtactccagcctgggcaacagagtgagactccatctcaaaaaagaaaaaaataaaataaaaacattttttaaaaatagagatggggtctcacattgcccaggctggtcatgaactcctggccttaagcaatcctccacctctgtctgccaaagtgctgggattacaagagtgagctactgtgcccagccaaatgcttttttcccccaccagccaggatcttgctctgtcacctgggctggagtgtagtgatgtgatcacagctcactgtagcctcaacctcctctgttcaagtgatcctcccacctcagcctcctgagtagctggcactacaggcacgtgccaccatgcccagctttttttttttttttctttttttttttgtagagacttcctatgttgcccagactggtgctggtctcggactcctgacctcaagcaatcctcccaccttggcctcccaaagtggtggggttacagatgtaaatcactgcacctggcccaaatgcattttgacttaatgatatcttcaagttacaagagtttattgggacataactccattgtaagtcaaaaagtctcgatatataaattttctctctgcatccaatgaattaccagcttatctggttgttctttcataatattttgtttctttctttgtttgtttgagatggagttttgcttgttgcccaggctggagtgcaatggtgcgatctcagctcactgcaacctccatctcctgggttcaggcaattcttgtgcctcagccttcccagtagctgggattacaggcatgctccaccatgcccagctagtttttgtatttttagtagagacagggtttcaccatgttggtcaggctggtctcgaactcctgacctcaggtgatccacctgtctcagcctcccaaagtgctgggattacaggcgtgagccaccgcgcccgacctgtctgctcattttctacgattaatcaccttatatatgtattactatgaaagctctgatttaacagttttttcctccagttaaattctcatagacaccactaacagattaacttaaaataccttttacatgaccatagaaacttcagaagttcccactgcctctgaaaatatgaagttcaaaatgaaagcctcccacaatcgcagaactatatactatgtatacctaaatttccctctagaacaaccaagtcaacagataaaacaatacatgacccttggctgggcatggtggctcacgcctgtaatcccagcactttgggaggctgaagcgggcagatcacttgaggtcaggagctcgagaccagcctggccaacatggtgaaaccccatctctactaaaaatagaaaaattagccaggcgtggtggtggtgcatgcctgtaattccagctactccagagactgaggcaggagaattgcttgaacctgggaggtggaggttgcagtgagctgagactgcaccactgcactccagcctgggtgacagagctagatgccatctcaaaaaacaaaaacaaaaacatgatccagtgtaggtttaaagacatcaggaaagttttagtgactatttactgggtataaaaggtagggcctctggaaggcattgggatgacagttttcggtcagtctcaaatctttagtttacaggacagccagacatagacatagaaggctaacattagaaggtatctgtcccataaaccagactgtaaacatacttattgtttggaggaaggctgaagaaagagcttaagctgggccttgattgactagaatggacaactaccaaagaaaaagaagagaaatagaagaaaactacacacacacacacacacacacacacacacacacacacacacacacaaagggaagtgaggggaaatgaatggatactgttaaaaaggtcttgttcaattcaacatctactgagcaccatgtgccaaacagaaacaatgtattctccatgaaacaggagccaagggcagaacttttcttggctcttaagccagccccttctcaaagtagacaattggggattgacacaaaataggcattcaaagcattaaatgaataacataatttcattactagctaaatagaagggtagaagaaaagggagtattccatgatggaattaaaaaatggacttcaggccacgtgcagtggctcattcctgtaatcccagcagtttgggtggctgagtcgggtggatcacctgaggtcaggagtttgagatcagcctggccaacatggtgaaaccctatctctactaaaaatacaaaaattagccaggcgtgggagcgtgtgtctgtaatcccagctacttgggaggctaagacaggagaattgcttgaacctaggaggtggaggttgcagtgagccaagaccatgccattgcactccagtctgggcaacagagcgagactctgtctcaaaacaaacaaacaaacaaacaaacacttcagagcttctatatagtcatgcgccacataatgacatttcactcaaggtgggactgcatacaggatggtgttcccctaagattataatggctgggcatggtggctcacacctgtaatcctagaactgtgggaggccgaggcaggtggatggatcacttaaggtcaggagtttgtgaccagcctggctaacatggtgaaaccctgtctcttaaaaaaatacaaaaattagccgggcgtgatggcacatacctgtaatcacaggtactcgggaggctgagaccggggaattgcttgaacctgggagttggaggttgcagtgagccaagatcgtgtcactgcactccagcctgggcaacagagcaagactctgtctcaaaaaaaaaaaaagaaaaagaaaaagaaaagaaaagaagaaggatggaaggaaagattataatggagctgaaaaattcctatcacctactgacatcatagacctgtactgcaacacagtaccttttctatgtttagatacacacatacttaccattgtcttataaatgcgaatggtagttagtacagtaacatgttatccaggtttgcagtctagaagtagtaggctataccatataacctaggtgtgtagtaggctataccacctaggtttgtgtaagtacactatgtaatgttcacacaatgatgaaactgcccaactatgcatttaacagaatgtactgccactgttaagcaatgtataactgtatctggaaatgttataaaagctataaaggcatcattattatataaatgttcagctagttacatacagaaatataccaccagaatactctgctcctgattcaatcacttgtctaaatgcagccagagtgattttcaaaacacagatctaaacatgtcaccccttacttaaattcttcaatggaatcccatttttcttaggatacaccaattccttcacgggcatatgagaacttgcatggcctcatccccatctatctatccagtcttttccactctaccccagcatcactttttattcccattttccctgctgtagttaattcctacttagcattcagttctcagctcaattgtcacttgctagggcaaagtcccccattatggttactcatagtaccttgtacttctttggggggaatttataacagttttagttttacatctgtgtgattaatgtcaagctctatcatagactataaactctaaaaaggcagagattttactttaaaatgtcctacgttctataatatgttatttaataaaaaatttacacacatgtataattttaaatacttctagcctaagagataaatctaggaatggtagcatttaccctccaaggcattactattttacagcccataaaacaggccgggcatggtggctccacacctataatcccagcactttgggaggtcaaggcagaaggactgcttgagcttcggagtttgagaccagcctgggcaacatgacaaaccccgtctctaccaaaaaatccacaaaaattggctgggcgtggtggcatgtgcctgtagtccaactacatgggaagctgaggtgggaggcttgcttgatcctgggagattgaggctgcaatgagccatgatcacgccactgcactccagcctatgtgacagaatgagaatctgtctcaaaaaaaaaaacacacacacacaactaaaaacctataaaacatctatatttaaacagagacctaatcattctaagtcactgtttatctgtaaaatatggataacctgaaagataagttgtccatagtaagtgaaaaacatatataaagttttcaaaacaatgtatggtatgtggtaagtgctaaataactggtgcctatgaataataagtcccatttgtaattaattcatgtttccaaaatgtattccccaaacattttttttttaagatggagtctcgccctgtcacccaggctggagtgcagtggcacagtctcagctcactgcaaccttcgccttccaggtttaagcgattctcctgcctcagcttcccaagtagctgggattacaggtgcccgccaccacaaccagctaatttttgtatttttagtagagacaaggttttgccatgttggccagactagtctcgaactcctgacctcaggtgatctgcctgccttggcctcccaaaggcgtgagccactgtgcccagcccccaaacatttaatttgtgtagtaacactgaataattctaatgttctttcaagctggttaaaaagattctgaggggataaaagagattcaagagcctgttacatcttttgttacaatttttaaggtgattatatcattcttaagtttccccccattatttactgtagcccagatttccttattattttttaagacatatacaagccattataagatgtatttaaaatggacagatacataaaatttatcttaaaatgcatattttatttcagtagtcaatgaccatcaatcaaataaaggaaagaaaactaatttcttgaagaaagacaaatctatggagtggtttacaggaagtgaagaatgagatggcccaactaaaccaatttggaatcattaactacaaaatgtcaaactaactgcaagacaagtgtcaaaatgggatgtttaagcagttttgctatgttatacatcttttagttgttattttcaaaattatatgtataagttatataagtcatagtaatagctaaaaatgccaatctatggaagcagtgattttcaatataaagttctattttgatatttttccatcttcaagtcagttactgtcatctggagtactcagttaagttgtggtttgaccttcctcaacttgacaagaaaagctaatttaagagaagaaaaacataaagtcattatattaattaaaagaaaaaacaccatttaatatgttctgaaaacattactcacctgtatgaccaggttgccagtgtactggtctagcaacatagggaaatgatccatatggaaaatcagaatgcgattcttctgttgtaaaaaaatatatgtactataagctacataaaatattttctatttttttcacaaaactgttaaaatatgagttactctctttattgtaagttttttctttatttatttccttgcatatgttttagagctactctgccagttattatacagaaactatttgtcaatgattatgtaataaacatatgattttataaccaaatggataagcctatatcataaatcaactgatacttgaaaacttgttcatggcctaaataatgtgtatatatgacaaagacctaaactcagttctttcaagaattccagcagcatcttagaagttgctttttggaatattagctatttgcctatcaggtcccattaataatcagtgatctaaatataaaacatccttaatacatttaaattatttcacaaaccaagctccttgtgacaagtaaa

SEQ ID NO: 268 - DNA, 2035 bp, Homo sapiens
ccctcagctgccttcgcggcgacgacacacgcgctccccgcagcgggctctgggctgagggacctggcgagggaggcagtggccgcgcagtccttccttcagaagggaaatttctgagggtcaggaaggggaatctgtacctcactccttgaacaccaaggaaggaatattgggaaaccaaaatgaggcacaatcagatgtgttgtgagacaccacctactgtcactgtttatgtaaaatcagggtcaaatagatcacatcagcctaaaaagcccattactctgaagcgtcctatttgtaaagataattggcaagcatttgaaaaaaatacacataataacaacaaatctaaacgccccaaaggaccttgtctggttatacagcgtcaggatatgactgctttctttaaattatttgatgacgatttaattcaagatttcttgtggatggactgctgctgtaaaattgcagacaagtatcttttggctatgacctttgtttatttcaagagggctaaatttactataagtgagcataccaggataaatttctttattgctctgtatctggctaatacagttgaagaagatgaagaagaaaccaagtacgaaatttttccatgggctttagggaaaaactggagaaaattgttccctaatttcttaaagttaagggaccagctctgggatagaattgactatagggctattgtaagcaggcgatgttgtgaggaggttatggccattgcaccaacccattatatctggcaaagagaacgttctgttcatcacagtggagctgtcagaaactacaacagagatgaagttcagctgccccggggacctagtgccacaccagtagattgttcactctgtggtaaaaaaagaagatatgttagactgggattgtcttcatcatcatctttatccagtcatacagcaggggtgacagaaaaacattctcaggactcatacaactcactgtcaatggacataataggtgatccttctcaagcttatactggttctgaagtagtcaatgaccatcaatcaaataaaggaaagaaaactaatttcttgaagaaagacaaatctatggagtggtttacaggaagtgaagaatgagatggcccaactaaaccaatttggaatcattaactacaaaatgtcaaactaactgcaagacaagtgtcaaaatgggatgtttaagcagttttgctatgttatacatcttttagttgttattttcaaaattatatgtataagttatataagtcatagtaatagctaaaaatgccaatctatggaagcagtgattttcaatataaagttctattttgatatttttccatcttcaagtcagttactgtcatctggagtactcagttaagttgtggtttgaccttcctcaacttgacaagaaaagctaatttaagagaagaaaaacataaagtcattatattaattaaaagaaaaaacaccatttaatatgttctgaaaacattactcacctgtatgaccaggttgccagtgtactggtctagcaacatagggaaatgatccatatggaaaatcagaatgcgattcttctgttgtaaaaaaatatatgtactataagctacataaaatattttctatttttttcacaaaactgttaaaatatgagttactctctttattgtaagttttttctttatttatttccttgcatatgttttagagctactctgccagttattatacagaaactatttgtcaatgattatgtaataaacatatgattttataaccaaatggataagcctatatcataaatcaactgatacttgaaaacttgttcatggcctaaataatgtgtatatatgacaaagacctaaactcagttctttcaagaattccagcagcatcttagaagttgctttttggaatattagctatttgcctatcaggtcccattaataatcagtgatctaaatataaaacatccttaatacatttaaattatttcacaaaccaagctccttgtgacaagtaaa

SEQ ID NO: 269 - protein, 313 aa, Homo sapiens
MRHNQMCCETPPTVTVYVKSGSNRSHQPKKPITLKRPICKDNWQAFEKNTHNNNKSKRPKGPCLVIQRQDMTAFFKLFDDDLIQDFLWMDCCCKIADKYLLAMTFVYFKRAKFTISEHTRINFFIALYLANTVEEDEEETKYEIFPWALGKNWRKLFPNFLKLRDQLWDRIDYRAIVSRRCCEEVMAIAPTHYIWQRERSVHHSGAVRNYNRDEVQLPRGPSATPVDCSLCGKKRRYVRLGLSSSSSLSSHTAGVTEKHSQDSYNSLSMDIIGDPSQAYTGSEVVNDHQSNKGKKTNFLKKDKSMEWFTGSEE

SEQ ID NO: 270 - DNA, 79405 bp, Mus musculus
  misc_feature (1)...(79405): n = A,T,C or G
gcggccgcactcgcttgcccccggatttttttccaacttgctctcttcgagccatttttttttctttttttctttttctttttttctttttcttttttggttggttggttttgatttgtcagatcccagaaaagtgactcctgttcggggctaaacggaactccaggtcccttgtcgctgctctctcttttggcgtcttacaacctcctcccactcctttccccggccccgcctcctcctgcaggttcctccccgtcacccccctcctccctcctcctcctccgcacctagccagccctctgcaaacttccacctgattgagcgggactctcggacctgcgagcactaaagacctttcacacctgcccgggcgacagagagctgcggagggccacagcaaagagagcggctgcagcccctacggggttaaggaacccaggtgctccgggtctcggagggccacggcgacaatgacagctgacaaggagaaaaaaaggtaagcgggagtcaaagctggcgaccgacttggtcccaggcattggcggaactgcgcgtggcgggcgcgacccggggcagtcgggagaggggtgcgagagttctcggaggctggaggaccgctgttgaggggctttgagtaagcgagtcggtgatgcctttagggacaaggagctgcggtgtcgcagtagagttgcaaagcggatagttccgagaccttgagacacggagagatggccctggaggtcaggggtgcttccgcggcgccttccaaagtctgtcgtccctggagcaccaagcttccctagcgagtgttttgaaatgtttctgggctgatgccctcgactcttagggtttccatgctggagcagtagacacgcctttcttttcctaagaccctctaggtctttccgagagcgttcctatgcgggctttgcgccccaaactagcatggaacagagggcaaagcgcaactctggggtgcgccctgaccgagaagccggaacactgtcaagggtcctgctccagacggcacccaagtttgttcaacccccttaaccttaccctacacctagactccggcagagagtggggagtgagtgacctggattgccctgcgggggcaggtgctctagtgtgcagagagaggaccgtgacacccggcggctccgagtgtctgattcttaagacgaagggcagccacgaaggtttgccctcgcgaacctttcggcactgggtgagaggcaactccgggcaactcgcgctgccctcgagcctccttcaatccgccccgcatctggtgacttgacacccagctctaggagctgaggtgggaacacactgtgaccccgccgcagacctgggtacattctcgtcgcctgcaaaagtttatagctggccgcctggcactttgctcctgtttcgatcggtgcgtgccgtgggttagagcttccagcactgcgctccgtggcgacttagctggggtgtccggaatggtacgcgtgaccgcagaatggcgcgagctgccagagatccgtggccagactggaaaagactggcggtgaggacccagccccgagcaaacgggctttttgtttgggcttccacttagggacatgagccaggaactgtgtatcctctggtcgaaagctgcagctcccacctcagggcaccgataaggagttgataaactccagcgaatcgcacccgtcctggcccggcgcccgcgccctgcgctggcggatctctagagggggaaggtattgagtccggttctagattccccattatcgcccaccaaacaactctgaggttctgtgtactttgagggtagagaaggagaagcaagagagagagagagaaaaaaaaagactaagattctagctcaaactgtaaaaccagccagagggtaatcacaaaccatcaaaaccgcgaagttggacggcagagtagccaggagcactttttgaacactttattactgccttgtctatgggtgactgtcgcatttgtccgagatgagacctgacagtaatcagtgtcaagtgtcatcttgctcttaggtctatcaatccttgggagagtcagggatcagtggggaaagctatttccatacccagcttgcagagactctttgccgagggctggcagggagtatagtcagagcctagaagaacgttgcataatgacactacaaattatccacaacagcggccactttaagaaccagtgtgacacagattgtgaacctcctaggaatcttcggcctgtagtgcagtgccccagtggtagccaggcccgcagggtgtgtgtgtgtgtccaaaaaacagggcaagcagtgtaggttcagtgtaggttcagacttccaaagcctgttaggataatggttttgagattctggttaaattgactgacttcttgggggcgtcaatatgtagttgaaaattgtgaagcagggcatcaaaagttaatgtcccttaaatggctgcccagagcttcccagagcgcctcaggaaatcaatgtgagcagcaagggttcccggattggtgataccacccactagtggttcaagggccggttcttctccaggggataactgagcatttgtatggttccttctggaaacagcccctccagaggccagaaggcttgttttagtcccaaacatccttgtgtgggtggatatattccttcatggtagtcaggagccagtcttttatttgttggctggttagcagactgggggagccacagcaagctctcttggagttctcatcaacccagcaggattcctgattctaggaagagccaagtgtggatgctctcaagtggggatttgtagaacaattaagataaatggaagtgaggtctttgggtggccaggaatccaagtccaggcacaaagctagactctgggtccaagtacctttcaggagtgcttctggtatttggtgccagggcaaagatgggcaaggaattggagatagctggaccttcaagttttctaactgtggctggcttctgatggcagcagatttaattgttcctctgttaaaatgaacccaaggtccatcagttttcccagccgaggagacaatgctggctgggcttcttgagtgaagcttatctcctaactagtgttccttcaacatttgacaacagtctaacctggtagagcagtgctgtacgacactatcagcctggcatttaaactgtactaaagatgactttcttagagttttggtttttttgttttgttttgttttttgggtttttttttttttttttgtttttttgttgttgttttggttttttgttgttgttgtttttttcagttttattgtgaggcttgaagattattttataagcaagtatgaaagccataaacatattttctctttctggataaggctcaaggaaggtaaaataatccctctcggtacaaggaaaattagtgctgataagaatcagaaagttggttcattacaatcagttagcatgtgaacannnnnnnnnnnnnnnnnnnnnnnnnnnnnnnnnnnnnnnnnnnnnnnnnnnccccccacccccgccatggcatgcctcttgccactgaggatttccaaaggattagtgcaggttcaccaattcaaccatacctccaccaccaccaccaccagacccctgaaccttcaagacagaggtttactttcctagataattgcaagagccttgttctgagctgaggcaggagagatgtcaaccagtcagtggcgctgctcttggtagttaaaaactttggggaatcggaatccaatggttgagtacctttcctttatttcagttaggggaaaacaaaaaacaaaaaccaaccaaacaacaacaacaacaaaagaccccaacaaaccctactactcgaggtataaaataaaaccaatgcaagcaccctcctggttcctggatgtagcaagttgctttgtgaagtagaggacattccacagctactagattgttgcctggtgtgattaggcaattttgcagggatgaaagcctgaactgaaaacaggctactttgtttacgttgtcaacaaagcctctctgctgctgtttctctgcctctgtgcatgtgtgcgtttacatggccctgcccagggttctaggaatctatgttgtttagagagagaaggaaccaagtagttaattcctagtgctgtagggcttcagccccctgggtttgaaagtgcctccttcaaggctgagccttttccatctttgaggaaatcttttctgtgcagcgtttacttgctttaaaaactgcaacaacaaagcaaaaacggtcctgtcctatctcaagataatagggtcctccttcgttttatcttgatgaatctttccttagtcctaaggaaagttttgtggtacacaaactaccgagctttttaccaagttactgagtaagttctgttttctcccagggccttattattcagctttgcacactccagaaacatgctggtgagtctcacaatgacatctataccaagatactaaccagtgggtctggaaaaacagtgctgaaaactaagaaatggggcatctgttcattactcccaattgcttggtctgatgggggtcagggtggggggacaggaccacccaagaaaccgttggggtatcagccactcatgggtgttttctttggtagggttcaaatatttgaagctaaagaaaagaaattctgaatggtatttcagttggtaaccgtacaccattattgaaatgcattcgtcattgaggaagctggctctgtgtccctgagataataaacggtagatgctggacaccagcataaactggatctcagagagagtgtggtggtagacgttagaacttggagatgatgaacataaaaatacggatgctccacaggcgttctgcaccatgaactttgacacatggacaaaatgactaccagttggttggtttttttttttttaaagatttatttattattatacctaagttcactgtagctgacttcagacacaccagaagagggtgtcagatctcattatgggtggttgtgagccaccatgtggttgctgggatttgaactcaggaccttcggaagagcagtcagtgccctttacctgcccagccatctcaccagcccggctaccgagtttaactgcttgatgtacacacttgttttgggtggagaatttgcagggaggacacttactggcctccacagtgacaaccaaaggtttctgtttccactgaggacaacggtggccttgactgactccgtgaaggccgagaagggaggggagtacttttccgggagccttgtaaatgagcttccggggtagtaatagatctctaaaattctatagagtgtatgttttgttctctgggtttttttttttttatgttaatctcaatctcccctcttcatgaagagtgaacccagagctttgcacgggctgggatagcattctctaccactgagctggatcgccaccctttgttcatctcctagtcgcctttcaaaggtggtgtgaagagaaaataccttcttcctgcttgtctgtctagcacccaagagctcccctccctgagttctaggctacaggctgcctgttcctacatttcaatgccagcgtcttgtcttgtcctagggagtgtctataagacatgttttccactatcccctgctatctggagattcttttgaaccgtagaaatggatgtgctcttgggagaaatgagctacataggcagaaggacaagatggaaagctgagcgctcaatcttcccgtgccagcgctgtcctcagaactttctggattaactttgttaatccttgtaacaaccctgtgagataagccctgttattatctccagttcactgatgggaactcaggtgcagcaaggttgctgcccgttgtcacaggcagtatatcttggagctgagactctccagagtccacactctcacccaccgttccttgcctcctggccttacctaaaaggcctataaagcatttaataccatgtctgaatgtggtaagcactctataaatgataacttcttttgttgctgtgtttataattattataatgacttttctcgtgactcatcccttgtatcaaacctcacacacacaggcaggaactgaagacccaaaggctattcctgaattcctggaattacttattttttttaatatatatatagatatttcctcagctaaagcaggggacagttctccactgcccctggaagttcaaagctttcttcccaccctttgctggtggcaagacttcaagaaccgttcagtcttcagactccattgtgcggagggacctgttaggagctcttcctctgtggctcctttgatcttttgaaattgcaagcataggaaggaaaagatggatgggggggaggggataaatagtagtttatgattgtcgtgatcatatttttatagagtcctttctctggtgagcaccccaggccatataccaagagccttgagatcttcttgagtttcctcgcctcaaaccatgattgctttggaacagttgtgggttgtggtatgggtttggggtggggcggggtgggatggggtggggtagggtggggtggggtggggtggggtggggcatgtatgaatatatgcagctagcaacacacagtttttcaagtagagtctatgtgcaattcactgacatttttctggtcctgttactcaaagacacagaaccaatctgaacgtccgagactgagagaaatgtggaggttatttgagatccccagaatcagagataagcgtggccgagaccagagtgttatgtgcgtctgagtggcctttctttccctaatagctcaagaaatactggtttgcttatggccttgggctgtttccagaggccaccagtacatcctccaggctcctgggataaagagtgttgcctgccgagaagcacaggattctttaaagttaggagtggtctgtatgccagaccctaggaagcagatactttctcatacagaatgagatttcatgatgaatggcttgttggtaagtaaaacaaacacatgaaaacgtgtgtgtgtgtgtgtgtgtgtgtgatggctctgcacgtaagagcatttgctgatcttatannnnnnnnnnnnnnnnnnnnccctggtaatgtatttagggtttgttgttgttgttgttgttgttgttgtttgtttgtttgtttgttttttaaaatcggtccagtgagtggctttctcagcctgctcctgtgagccactgtgccctgtgtttctctctggtgtgtccagcagttcccaggtgctattttagaatggcagccttcgctccagcgctggctgaggttgatggagctaattttggtgtctagggtaaagggagcgagaaagcctgtgcaggagccaaaaaggctttcttgtcccgggctgagagcagcgtggtgttaccagacacactacatttcacctttagaacctttgtttgtgtacttgcacaacaaatgtttacctagatattaagataaaggaaatatgaaggtcccatttcactggtgacaagggagcgtctataattgtaactgtatcaccgtgtagcaagcaggagtcccttttactctatagccaggtcttaagggaattaatggtgggtgtggtgtacaagccaaggcccttctcagtttctgtttctggctttattgctgctactatgttttcttggctcagccaatgttttgccccacccatttggtgaaggcctttgtggtggtcaaggattcagagggaattctaatgcactctgtggccccactctggagtcatctgctgttctgtggaaaccagttagcagaccctggcaccatcactcttttcctaggctctcagaaaacgtttacatggtaccaatacgaccttgtttcaggccttcacgttgtcttggaagcacagcaaattttccttgtggcaagagggttccacaaggacttgggggtttctttgaagatcccccaaggattagctaaatactcagtctaaagatctaagaacctcactcaagggccttcccatagggaagctacgaagcaggtgactgctggaaatgagggtccccacactccagctctctcatctgccccactcagtcacttatggcacctcctgagctccccacaagcctattcctctgccacacaggtattgtcacagtactcgttcgtctctggttcttagtccatgcttgaatgctttttccctctttctgcccaaatatctcacactttgtcttatcatgaatgagcctaagctctctgcctttaacagaaacccatagcattcccaccctgcctttccctccatttgctgttttatacttctttgttgtctaaagacattttatttgttcttgcctttccatgttcgttcttgcacatggcacaagagcagggatgtctgattttctgatgtggccaataaatgctgatccttttcatttttctctgaaatcatggccattagaaaaataaatacagaatgactttggttttttgttttgtttttgttttttcgagactgggtttctctgtatagcccctggctgtcctggaactcactctgtagaccaggctggcctcgaactcagaaatctgcctgcctctgcctcccgagtgctgggattaaaggcgtgtgccaccaccgcccggcttcgaatgactttgttgatgtcccactttctcgggctcagctgtctccatccacacgacttcccttcacctgtttctgtgaacaagaaaataattggggttgggggaggggcaaggcacgggccaggtgagcattatttgccatcagatgcaaggatcaggcaggtagtatgccaatgctgttgtgcatcaagaatgcatggtagtctaggtaaactccccagcttaactccggagttaacagctttccaggtgggaaattatgcaaatccatccgtatcagctgtcccaaagggtctccctggaaagcagacctccttcagtcagcagggcattgtgtagccctgtatccatctgatcttctgtctgaatttttaaatttgcataatgagtttaaagcttgctttctatttccattttaggtgttctgtagttgtctgtaggtggaattcaggaatatggggaccttagttcaaagggatggaaaccacaggcagaaacactgcctcagatcagcttacccatccttatttgataatcaccacgcaggtcagaagaggtttgtggtactgctggcctcgagtatacgtgctcacaggttatttgctgatttggggactgtggtgcacagagaaatcacagcaaggcatttgatgactctggtctcttcaaatgacttgtttaaaccagtaagtatgtggtagtgtgtggcaccaaggcacctggctgcatctttaggatgttgccatcttattgtggagtaaaaactaggccagatacagcacagagccaggagcagaaaatggataggaatcgagagctctgggttgtataaagttaaaaaggactgggctggagaagaccagagctttgagagaagagcattaaataagacttcggtcttgaagattagaatttgggtttgcacaggcagcaactgcaggctacgctggggatgggcgaggcagtgcagaccgcaagacggaaagaagcagagtgcgcaggacagggctggggggtgctcctttctttcaacttggaatcagtagatcttatattagcagagatagagcctgggcctggactggagaatccagggacaggccctcttcgagccagtttgatggaattctcagcccgcctcttttggggacattagaagctatttagagcaattttattgtccttctcccacaaacctagctagagtgtgcacacctaggagtgattggcagaagccatggtggcctccaaaacaatgacctcaaagcgctgaacccatagatcttaggaaacccactgtcattccgtcaggtatgtatttctttgtggcttgcacagctgcttgggagtgataggtacttagagttctatcagaatgggaacctgaaggggggacggcttgctgttaccctaaaatggccttgctcttcatctccatgttctcactaggatggcaaagcctttgtccccttggggacttggtaaggtcatttgtcatatcctttcttgccatttctccttagagaaggatagacttctttcggcacctagcacgtggaagggagttacacagccaaggttgagtcaaatttttagtctctactggtagctcttcatccaaacccagcccagagcattccggccaagccgttctgtgaccttctctttaagacccagatctggttgatgttctgagtctgaccatgccagaagagtggggggaaaaaaagaatcctctttcggagtcacctgggtaggacagtcagagccctttcctctccacaagcaggtgtgaccttttccctggaggaatttagaagcactaaggtcacagttggtcaaagtgggccaggagttggtcaaagatcccaaatccctggacaagagcccacatcagggacagcagaggccagcaactgatcctagttacatgagtttaccctgcccagtggtacttcaagggagggaacggctcctagatggttttgtgttaaactttaacctcacaatgacaactgtcatgtctcaactgttagttctgtcccctgtggttgtcggacggaggaaccactgctcagttctggcaggctggttaggccagtggtttgctcaggttaaagcctgagcccagagaagagtcttctggagccaaggagccgtaatcgcctgtcagaaccacatagggacaggggacagtggagctttgcagcacagtacagactggcccttatccaggagctaactgagacctcgggccatcccttctggaagcctcagggaagctctaagaaaagccagaaaccaagaccagacctgaccacacatactcagatctctccacattataaatgcgagtgtagcatctacattccgatagcttcttacaggggtcaggaagggaaaaggaagatgtcttagccaagtttgcctgtgactaaacaccagatagctagctccatgtctatgtatctgtgttttctttcctaagtgtgtttcttaaggtttaaaaagatgcatgtgtatgcccgggtgtttgtatgtgtaacacatgtctcaggtacctgcagagaccagaagagggcgctggatctcctgaagctggaattacaagtggttgtgagccatggatcatgggtacttggaactgggcctgggccctctgtgctcttagctgctaagctatctaccccaacagcgtctgtgttcatgttcttttccaaagtaaaaggtccttaaaaaaacaacaaacgagcaaacaaacaaacaaacaagcaagcctttgcttctcctgaactcatagcaggttcttcctggccttggtcagtgaggggctaggcccgggcatagctcaagccagtgtggttctcatgttctctagctcattccaggctatggggagatccagaggactagcgcgctcctagtgagtgcactctccatcctgagccatctctcaagcacattagattcttttctctaaatcagtgggtacattttagttctggccacctgtagttgcttgtgtggggacaagggtggtgacttcaccttaattttcctggccttgggtccccggagcccttgtttatttcggggagtgacaagctttcacccacttgaattccttcgcctccaaatagcgtcagaatgaccacaagcctcctgtgtttcttcgctttcgggttttgccagattctaaatgccgtcagggccactggctcttgttttatgtccctggcaaagctggccttcccatgaagttcaaagccgctttcaggcatcttgggagtctgggagactgctttcgcttgctctctgctttgtgcggacctaggttggagatgtcacctctgtctgctgctctctgaatacgaaccagggaatgttctagtaagaccacgtgctttaaatgtatattttaaaagcacactttgtgagtattatcttaatggaaagaactttgaaaagtataaagtgcaaaccttctaggcattgtcattaaggagcagagcaatatactcattaggtgtgttattacctcttaaaagtgaaccgcctgcagacaggaggaagccttgagagaggctaacaggaggctctggtctccaggctcctaccagtgggtccctccgcctgggcttttgggtcctgtggattcttgccaatcgtggcatttagtggataccccaagactgaggaaatctgaagaaagtcctgacaagcaccagatcccagcacccttctgcttgctttgtttcccctcacctgtggagcaggagagggcacagcccagcactcacgtcaaggacgacacatcctttccgtgtcacacaggaaccagggctgcccaggccatagctgctcgcctcttcctcgttccactatttttatgtcaaagagaggcattgacaacctagaaacaggtgctactctaaagagaccttggtctccttgaatgcagaggcctggctgtgcttataccctaaccaggagacttgaccggtcactcagctctggcctcagacctatcatcaactgtaacacatctggacttcttacctctgagctctctcttccctcagcctcacccgggagactggccagctgacttcaagcggtccttctcagcttaaatatcacctcctcagggaagcctttctcgacgtccttcccttgacctctaatcctgttccatttgtcttttaaacattttccacatgtaatttacatgtttacttatgtctaccgtgcccctcccctgccagggtgaaactgaaggtatggactccacacgtgccttgtttaccactgagggctcagcctttagaatggagcctgcatgcactgctgcttcttacagatgcgtccagcgaactcgttgctccggtattgctgggctctacattaccacggtttacaattgtccagtgttttcctaaagctgattttgtttttgttttctgaggtagggtcgtatgtagcccaggggctaggatttacatgaatgcccccatacttgttctttccaaagctcttggtgctaacaccaaggaattgtcactttttagcatatggatgaggcagttgagacactagagtataatgaccatgccagggtctggcagtacctacctgaacacgttcccagccccagactatttgcaaagatccacgctgcctctcttggccccatagttttctgttgtggcgatgttattgtttgtcatatttggcaatgtttaccccagagaagtagggccattgtgtgctggtagcgtctgggaatgcacagccaagtcccaggggaatggccactgctgttcttaccacaattagaaattgtcaagccaggagcagaagcagggtgggtgctgccatacactgctggttctgcctctccatggggctggggtgagggtcctagctccgcagccccgtgtgtctccttgtcctggctctcccactcacatcgaagtgtggaccttcttctgcagggcgatgtgctatgcttagtgaatttcctgagaagaggtaggcattagctggctagatgaccacctctggcctcaattattcaattattctaccctctccaaaatgaaccagtagatgggaaccagaccaggtaaccccaaaactctccaggttctagctccgctctgaagggaatttccaggggtctggcctcctgtttgcagatgctgactctggaaagagcagagggaagttggaggttgttggcaggggctggcggacctctttccatctctttgtaactcttcctctccaaaaagatattccatcccatcaggagttgctgttgggcctggttcagtgcagcaggatgaacaaccgcccccaaaagtcagctgaggtctgatatgtgatatggtagaaagctcccaaaaggaggccatgcctccatctccctgatgcaggcttctggggtgagagcaccaaattaggaaacgggtgttctgatgccattaacggacaggggtcagacaccaagtgcctctgtctaggccttcgttttcatgtctggcaggtgactgttctgtgcccttcaattgaacaaggctgcacagatgtaaactgccacagaggaagggcacattgctgctatgattcctgtgtacgaatgtttctggcgtgctcacacctggtagtgacatgaactgattgacacttgcagcctgcaaatacggtcctgcaacctgaggcaccaagggagaagtcagctaggaagcccgtgaggccttaagttgttgaatgaagtcatgctgcacagggtggggggtgggggtgaccgtgctgcaggatagaggtgagtcacagtgcaagactgttggggagtcaccttgaatctgagccaaaaaagcagaaatattgggactcgtttatcagccttctatcaggtacatcaagttctggatggccacccactggccagcgacatgatgtggacggctctgctctaccgccctgggaaggctctctgctggctcttgccccgctgagcaaagtccgcttgttcgctggagttcacacagactccttgccaggcctgcccagaatcctgtctcctctgacttcctgtgttcttgcataatatttccttgcctcttgaatggctggccccagtgcgggggcagctcactggctctgctggattgagagtaggatgtggagggaggatgggtgatatttggatctaatccgtgggtgctctgcgtcctggtggcagagcccctcaaactttttgatggaagctttcagccagaagggagtgagagagcattgcagactgtatacacacactcgctcgtgcacatgctccctggcttcttatattcatgaatcatctccctgggaaaattgttgaagtagttaaattgttttcttctggtcataaaaatatgaattattcccatatagtcactgtataagaagcctaaaagtaaaataaatatatatatatataaaataaaaaacaaaaaaatgtattattgaaagataagttccattaacagtgaatatagtttctcctacgtcagaaaggctgatccccatggctatgggataccagcaatattagctgtattaagttctgcttactgatgcatcttcatgagactcccattcactacccgtccaggctcaaaaagcaagtggtaactggcccaacaattatttccaaacctgaaaagcaatgtctcccctgaagttctgaccagtatgctctggagtcccagaaataactgcaaaatcaaaggctggtgcctgtgtgagcctttctgtaggcttagagtaattcccatgattacacaggagaaggctgcttcgatgacagctctgagggctgggcctggtctcactttggggaaaaaaaactccatctatccacagggccgtgtgtgagttaagccaggagcccactggctggcagagcaagtttaactttggctttccagtgctcaagatttcagagaaactctatttaaattttacttggctgtcacccttctgaaaatttgtagcactatccgtatctttaaggaagtgacctttccccgtccttgtccttgttagcatgacatgagaacttggaagcgtccatggtgacctgcttccagtttgattattgaaaacaaaacaaaaccatgcatagatccgggatttctgacttacctctggaaactgtactttctacagggtggccatgagagtttgcaggccacctgctgaaagttgacaacttgagagtctgcagtagacaacacacacagcatgctgctgtgttggatctgagtgtctcctgcatctgcctgttttctttgcttctcctttaaactgggttaaccatcctccatattggtactggggatagatagcacccagggcctcacagattgctagaaaagtgctctaccaatgagcaacgtcctctgctcaatgagtgtgtgtgtgtgtgtgtgtgtgtgtgtgtgtgtgtgtgtgtaaatatcagaaacttggttaaacaaatatatataacatacaatatacttatataatatatgtgtatatattatatatctccatcccaaagttctctgtttgacactggacttaatacttcccgttgggaattgcttataaggttttactttttagtaaagaaaagttgtttgtttcctaaactctctgtcttaaactttttacttaagtcaaaaagcaagagaatacctctcggcttgaatacctttatttttaaagctcaagagtcttttttaaaacaaaaacttgctacagaacttggcaccaggggactgcaaggatttaccttattttgatgatagctgcctgcaaacgatctattagaataatctgcataattgcagtctccccttcagtttattcagcctgcactccctagtctagatttactggccagactgttattacatcaaattccttgatgctgtattcctgactgatggaactaagagttacagagaggaatcagcaacctttgtctgcttttcagaattcttcagaacgtactgatttagccaggggcttttgcgattgctctccttactgggtcagcacctgattttgctgggtttctggccacacatgtgcgtttgggaagcaggatagatagggcgagaaacctgaattggcagtcagagttatgaaacaggactttgttacaattgataggtctgtacagtggacgcacagcagctgttggcatggtaactcctacgtggcagagtgcatggagcccgcagatgactttagcagcgctccgtgttaatttgataaatggcttttttaatagtagtttgtgggctaatggaaagattgaagcgaaccctcgttaatggaagggaggatggagattttgaagccactgggtgaagccggagagtcccagccaagtctccattttcagctcagtgtctcttttcatgtgcctgaagtgtggcaaaccaaagtacagtagggagcctgccttgagagtaggcatcggccctgggctccggcttacgagtgaagaggcttcagggtccttattcaatacagttgctttgtgcaggggcttagcttagggccactgtaagaagtctacattgtgttttctttttccttagtggtaatggggcaggggttatggtggccgacaggtctggcatatttagccgtttggttggttgtattgtggttatttgggttctcagaggggttgtttatttttgtctctggtttgtttgttgacatagggtctcgtaacccaggctggcctcagatgccctacatatatatatctctgaggatgaccctggacctctgatccttctactgccagctccagggtgctggggtcataggcgtgaaccaccttgcctagctaatgtggtatcggggattgaacacagagcttctgcctgctagatgacactctatcaattaacggcatctcctcctggtttcggccatctttcattgtgtgagaatacataatcacaccacactgctggcccactcaaggagcctctctgcaacccacactgaagctctgcgttccttatatagcgctcgacaaacacctctgggggatggatctcctcactgtgttgccaaagcaaaacctggggttttttgcctttctggcaagttcccaggagacgcggacattaccggttctcagtccacatgctgagaacttggtgctttacactaatgcggagaaaattgggaacaagacataaagaggccaaatgacttgcaccttaatggctaaggatgatggagcttgaacttgaacgtggctagggcctctaaggcacctgctgtctctgtcttatcagcaatggcagaagtgcagtggctggagcatcccaagggtaccttctgccatcccaagggtacacggtgtattaacctgtcacagtcaagttcagaggtggcctcggaagcctgctgctcacagccttctctgcgtgcgcattggagttggttttcccctgggctaacctacaatggagacagtaccaacaaacccaccaatgcagctgaaacaaaacaagactttatccgggcattagtctaggccgcctaggagagaagtggtttgtggcttagatttgtaagggacgtggcatctccagttgttctaggccagaacagatcatcacagctggagtctttgttcagatctcaggcaacccagggtacttgagaagtttaagacagatagcattactagagaggtttgtttggttggcttgctttttacattttcatactttttctccttaactcatactccaaacattccattacatggcgctaggtgtagtgacggatattaagatggtggccagtgaatacttgctaagaaaagtaggccaaaggcatctgtgtccaaatatgctgaaccgctcagcccaagagcgggagagatgatcaagacagaaggacaggtaacacctgggattcacacaacacattggctcttaaagtcacattttcaatgtccttaaaaaacaaaatgcacagacacagacacaattaaaataagtcttaaaagaaaaaattttaaaatgcaaaaattatagtggctactgctactgttctgtccccaggatgtcttccacaaagagggaatggaagccaaagcagggttttgtgtgcgtccggagcctcctgaccaatagctgtgattcttctggctttagaaataacccaatgccatctctccagtggctttgccaacccacatgatacctatttctcattacccccaataacgaatatttagtctgtgactgttgtgtatacagggtgatctcgtctcaataactatttataagcaacttaaaagcaagggtgggattaggaggtatatatagctcgatggtaaagtgttctttagcatacccaaggccctgagtttgatccttagcataggatcagagtgaaaggggcaagggcaagcaagatgtttgtggtggtggaggtggtggtggtggtagtgtgtgttactgtgtgtgtgtgttttctctctctccatcatgtgtataatatggcatgtgtatagtaaatattacatgtaaatattcaccatattaaatgctatctgtaaatgcaaatttaatttgtgaagagataaagcttccaggtccattgaagaggagaggtggctctaaataggctgttgcagacaaaacagacaccgtcaggagcacagatgccctactttggctgcgacacaccctgtggcggagaagactggggtgagaatgaaaaatggacatccttgggcaactcccagatgccatgggttttccacatcacatttgatcttataggtaaaattgtctttaatgctggggattcagtgcaaggcctcacatatagtaagcaaggcttcttccactgaccacatccatgacactcgctttttttttattttattttattttttttggtttttcaagacagggtttctctgtatagtcctggctgtcctggaactcactttgtagaccaggctggcctcgaactcagaaatccgcctgcctctgcctcctgagtgctgggattaaaggtgtgtgccaccacaactggtgacactagcttttaaagtcatattctaaaaactactacataagtgggtatctgcgcacagcttgtaacagacttcacaagaggggcagagtccgtgattcggagttgttttgttaaatgtcaagaatacagaaacatagaactggttaatatttctgcttttgctgtaaatgggttaggttagagccaggctcacggccttccctggtcttactctgcctcatgtagcttggctacaggccttgggcatagtgttggattaagcagagagggtccctaataggtatgttcaggaaataggtatgttaaataaaggaaatggggtttggggtgggctgaactttactgaaggagcaggaagattttctctagtcagatctttgtaagagcctccttcttacttacaattaaccccccccccacacacacacaccatggaagatgtcctgacaccctatggactcagggttcactgcttagggctctctgttctatatgcttaagtcaggatcttagagataagggttgtggaaaccaattcctgagttacatcacaatactaatatcctttggaagtttttaggtcattaccttaggaagggaagctattttgctattcattggagatgggaggaggaacataaagcaaaaatttctgctgatgtgggtgtttgcttggggccaaggtactgggaggggcaccaagggtgtgcttcctttatgtttgtaaaagccctactagcctctgtttaagacggtcctgtaggtaggtgcaggagggcatgaatcattttgtgctgccttcctcttggttcagcagagcccagcaagtcagatgggtagagatgacctatctggtctggtcaggctttccattggtcagcagcaaaactgtgctctgggcactgatgatgccaggcccgtgctggggcccatgctggaggatgaggtccacaagccagttcctctgtacctccaaggcttacaaaaccccagccactgggctgtgcaatctcacttcaagtgagtgttatgtccacccatggccgtcacacatgagcatttcagtggaaagagactgaaattctattgccatggactttcagaactcatgctcgatggagatagaacccaccagtgtattaggttcttgaaagctacctcctgcgcatcatttaaatcctaaaaagataatttccaatgaagagaaactgattattttttgctagggacaggttggcttaaggtgggtgctattcgagatgtctgagacctgagggatgaccaggatgagaaggaaatggtcctacactgggctaggtcctccaggcaacccccctacagagagcagtctcctgcccggggtggatttgggaccttctgaaatctttgtggtccaccagtagggaatcaacttcttactacggagagcagctggagacgtaagcataacgcctttccatttggtttccagtccaggtgtgtattctcaagtgggtcccggcttcctggaacggcttcccttgagtgtgagggctgagatgagtctgccgggtgatgaatgggttcaggaaggagtggctgcatcacctgcctgggggatgagcacccacgtgacttcatggttgtgcaagaattgggcaacgtttggccagggtggagaggtcttggcaaaggcagtttcactcctaacagattcctatctcctccatgggggaaaaacaactatcaggagatccatctgtacagcattggaggacgttgatcgcttcttcagctgtctgtggccttttatttgctaagaactcatggactggagacctcagaagattaaggaagataggcatccctttccttcctgtggcagctctggagaaggggagggtgggtagaaggaagacaaggtgggaggccatcaatggcaggacggggagaaatggttttagagcgtctgcagagtagtcgcagagcagagtggtaggcttgcaggttcaagttgtggatctacctcttagctgaggtatcttgataaagtactttaaaccctctgtacctatgtgtttaaagtacaagatggaaatcattgtagtattgaatcagagggtagggcttagtcatcatgaaggttggtcctagttccaagacactagacacaagtggaagggctgaactagccttgggtttttgacttaccactcttcaggtctcgatttcttcatctgtacagtaaagagactagagcagattaatgctaaggttttgtgtattctaaatgatatgattccatggttgaataactattaagtgtctgctgcatgttccagtactgtacggggcatgcgtgaatagggatctctttgtccttaagatcttgtcttactggggaatgttcactaatacacaggagaacatttaattcacaaatcaattcgcaaattaaagaacattagaagccaggcgtggtggcgcacgcctttaatcccagcacttgggaggcagaggcaggtggatttctgagtttgaggccagcgtggtctacagaatgagttccaggacagccagggctacacagagaaaccctgtcttgaaaaccaaaaacaaagcaaaaaaaaaaccaaaaaaaaaaaaaaaacaaaaaaaaattagaaattgaaaacttggagcattttggctggatagatggttcatctgtcaaaggcacttggctgctctttcgaaggacaggcatttaattcccagcacccacatggctggtcacagttgcctgtaactccaatttcaaggaatctggtgcccttttatggcctccatgaacaccagttaggtatatatatatgcagacaaaagatctatacagaagtcaagagtaaataaattaagaacccaaatgccgagtcatggatctgaagaacattggaataagaaatttcactgtggaccagagtagggagacttgacagcagctatgcaccttgtcacatcccaggaacactagcattaatacaagctggagaaaacagcctcctatttgaggcttagaccaaattttataagaagagtatagactgaaagtatgatgtggtccaaactggtttctcatatattcttggatgttcatcctatcagaacaacgtatctggcacacgtgagaattcactttccaaaggctgggaagatctagggctctgcattgttagcttcagcggcacgtagtgttctcagccctgcctctagagggcagcgcacaggcaatacccatcacacaatacccatcttacctatagcttggagaagagctttgagtggccttatgcttcctgagccagattcttctaagataaattcttccagtgcctaaactttgacgacattgtgggaggggaatatcgatacacacccctgaagtctctgcatctacatttggaggaaacttagcaaccccttcaaaggtgtttcctaataaccaaaccatagttcctcatgcaaattggctgatccaggcaacaagggaatattcctaatggccaaagtagtggagttcaggtcatctcagtgatagagctgggaagaggcttacgcaggtcttgaaaagtaagaagaggccattttgggagataagatgggtaaggcctcagctacctaccagtttccaggccacctctcccaatgcacacatgcgcgcacacacacacacacacacacacacacacacacacacacacacatacacannnnnnnnnnnnnnnnnnnntctttctcacactctcttttacacacacattctttcacacacacactctttctcacacactcttttacacacattctttcacacacacactctctttctcaaacacactcttttacacacatattctttcacacacacactcttttacacacacattctttcacacacacacactttctcatacacactcttttgcacacacattctttcacacacacactcttttacacacacattctttcacacacacacacacacacacacacacacacacagacacacacacacacacacacacacacacacacacaccacattgcaggtagtcagtgcatttggatgtggttctttatttccagacaggaagtgagatgtaaatgacagatgaggtgcatgaactctctggcctcgcccagacactgataatttcccatcatctcttgagcagtcagtgatggcctggctcgatagggcggttcatgacaccctagcttcagatcagcagattgcagcttgttgctgagactccttcctgttacagaccacagaaatcctggtgacatgcggcccattttaccttgtgtaaaggcacaaggacatgtcacgcttgccatgagaacacccgttcacacaggcaccaaagcagtaggcaggccagatggagtcacagggttcagagaaggactgtgacataatgctgaagccccgtgttggggacagatgtctctctgccttccaggaggcggcagtaagcgcttcttttccaaaccctcctctcatcccggtcccctccccttttcgttcataaaaaagttattttcttccaaataagcaattccaaaatatatgaaataaacgttagttctaatgagcctctgggaaagtgctcacctttgaactcggccaaggattatggggaaaagaaaaagtcgtaggaacttgatagagcgttagagcttcctgggtttttaagctgggttatgtattgcatttctttgccttaataaggacggttccagaactctgccctggataattgggccatgtctgatagtagagacccaggattggttactggattagggattattatctgggtgctaggcaacaattgggtaggaggccctgtttctagaatgttctttctttccaaggactcagaacctttttttttttttttttgatggtccctgtggggagtctgagacctaggaagaaacaagaggatgtttataggaggccgactgctaaaggggagtaacactcaggaactgtcctgctgagacaagcttaccccccccacttccccgagacattgctgcttcaaataacagaaatcattttctgaaagacaggctttcagtctgggtcgcctctggctgcttgtatggactcttcacatctgaatttccccaccctcctcccccagataagaagtttacttccagccattggcacaaatcatccctagggtgacttgaacctgactaaggacagctctcgaaaatcctgataaggtctccaaacttctatgccctgtagcagtaactaaccattcccctttctttaaactcgtccatcttgctttcattgtagtgtttttcctcatgcctaagtcaaatgagctctgtgtctcatccctaccactctcgagggcctgagcatcaccagtgggctcctcctagggaccagagatctagaaacacagaggaccttagctgagctggaggtaccacttcacggcatgagctgtttttcctcaattttccttcctaggcctgcacagatttctttactggatggataggcccccatgcatacccagcctacctccagcccagcacctgctcagtacacttagcctgtaaatacagtcatcccacaaaggacattttctctggtggctttaaggtttgacggagagttctctagacttggcagcttagctgtgacctcaggaatctcggtgctggcaaggctaggtctttgcactaacgtggctcagtgcccatggagataatctcctcttgtaatgggtgcacaatcattttattgttgaagcaataggaacgcaaaaacagaaggaatcccacaacagagcttgcccgtggctcagtgagcctctctgctcctggctgagggcaccttgggacacctcaagttcaatcccaaccgccaccctgaaggtcagctgattcataaggtgtgggcttatggaggagcctacacccacagcctgagcctccccaggcctggcactgccctgtgttctggctaacacctcctgtttattgtttgaaactcaaaagacaaaaccctccagcaacctcctccctttctactctgagataggtacccccttttgtccctattaccactgacttctgcagtagcagcatttggctccaacacttgagtgctcggtaggcatcagacacagttctgagcacgttacaagcgtttcttccttccaagtgctccatggaacagagacctgtaatgaaaactaaagtaggttgtcctagatcagagcatgcaagtgcccaggccctcaggcccaggctgcctgcttgtctggctcccacactggcttcctcacagaggcagtgttcccacctagtaggtctgcacttgtagtaagtacctattcagtaagtgaaggcttatggctcacaaatacctgatgggatttaaattccaaagagctgtgcagcttacaaagttacataaatgcacaggaccactgactttttattttagcaaagtaagggtgatgcttatctgttgttgttgattttttttaactctgtggagagagatagagagagagtacaccacagtgcacgcatgggagccagaagataagccaagggagccagttttctccttccatcctctgggtccctgggatcaaacgcctcatggcttcagattggcagcaggtgccttcacctgccgagggatgctctatgactccagttgctttggaacggtttttttctaggtagcatagtcagagctgtgagatttggcagactgccacaggggaaaggacagtgtgtttgtcagaataccggcggcctttagaagcgatttccatgaagctgaagttgcaactgacattttaaaaataattaaggaaagagagcaaccgaagtctgtcccgggcggttccaaagaggttgtgtgtctgctctccagccatcagcagggctgggatatccgagactaagtgacaactcaggcaagcctccagggtcacacaacacagcccctccactcaggtctccccatgctggtagaatgtagcatgcaagcctctggggctgtagggtctgagtgggccttggcagcctttctctgtggctctccacacagtagaacgagagatccggcctgaaggctacacagctgtgtctgaggcagagctgagttgctaatatctcttcctgatggccaaggcagggatttttacaggcctagaaatctagccctgcttcggtagctctgggaggaggttctgggtgctccaactgcttggccaggggacagatggagcctttcaccaggatctcatggaaagccagtgtcctgtcacctgtcacctgtcaccattaataggcacgaagagtgttgcacagaaaaaaagtaccaacttgttttcttttcaactgctgggctgggtaatgatgtaaaaacgacattatccctaataaacgtgatttgcagagatcgttgacaaccccagtagcagagacttgcattagcaggtaaacagataagagaaacagccggcttcaccagctcctggcgtggcacgtgtgtctaggtctggtatgaactgaaggttgggggtggagtgtggagttttaaaggcgaatcgggtgatggagagagtttgtcttaaggttggccatcccataaatctacttctcgatttttaggttgtggtttcagttgtatacatgtttgtttttggtggtattttttttttcttaagggatgggggcgtgcttatggggtgtgtggcttgtcctagtttctcacctccatattacctcaccaaaggaggtgggagccctggccaggccctagcaccgtccctgccaagtgactaaagagggcagccacatctgtggcatacagtctatgggcctgcagcgagtggtagattgctcgattatgtcaaggagttgggatcaagacaggaacttccgcaggtggggagagagtggcttctgtctggacctgttcccctagtgagggctgactggcagctggctccctaaaacacctgaatgtaggtagcaggcacaggtacccgtgtctgtgtgagaatagcttcaggatatgtgggtaagttagttgaatccttgggtgttaaataacctggatacagtcaccgttatttctctttaccaattttttttttctttgccagaaagcactaaagcattaggactctggcttcctgctcctgaggctggaggggtgtggcttgtctaaccttctcagcagctggccacgtcacatctgaaagagctacctgatgctgttgttgcctctgtgcgtgtgtgtgtgtgtgtgtgtgtgtgtgtgtaattcataagcttgccttccacctgtccctcagaggagacccccccaagataaggaataactgaaaggccagtgcctcacagctgaggagcaatcaagtctcagtgctcaggcctgggccggggaggaggcatccacatggactgcggagagtggctgagggagcctctgcagggtggcaggttatgctggaccttaaagcttggaaggtcagaaggaagaagaccctctttactaaggcacaactactaggacctcgctggatggccggcaggatgtggcatttggggaggtactagagaatggctgatacaggcactgggtctcagatgaggcaatccaagtctagagatcaaggctggggctaggagacctcaaagggcatagtgcgtgtgttccccatgagagcagccctgagccacttcctgttgcagtgtgaagtggcttgggagaaagggcaccgggctcctaagctgttctctgaggtctgatggcaattacattgctcttgatccatgatctacatgtatgggggggggggtggcgcaaagggacacagctggaagacaggggcaaacatctggaaataaatgaaatacccatgcagtctgccaaggggtatagcctggttaaggaattgttttcatcctgtgggtaacgtgtgacctgtgcttcagcaagaagaccttgacaaggtctctgaggacccagccggaatacggcccacagcagcccagccgacacggctgtacttggagcttttaacaaagacattcatttctcttgcctatggtgtcaaaagagagattcatatgtactgtccagtgtggccaaagcttggccaacagaatgggccgaatctaactggctgctgtgctgcctccgatcacttgtggggcagtgtgcacacttagtcaccccactctgccttgccacctttctcctgcgctttgctgtctcctgatcactggcccctgtccttccctcagaggtatttgtgtcctggcttcctggcttccttccctgcacccactctcccttccaattacctctccaagtctttctgactttctcctctcacactctggtgttgactggggagtaaaccagtcctccagaacagaacttctctgcaggctccctgaggtcaggggagccatctccacttgtcactcttgctggaagaccacacatggaagaagggaatcatgtctgggcaatgagtgcagcgagtaagcccctgctggggaagacagcctgatgtcctaggttgctcagggttaccatctgagaggaagcctttggcatttcccgtggcttcggatgacttctttgcaaaggaatggagtaaagcttcctaaatatgcacagatactcaattctcacagggacgaagaagggacaaatttgggagaaaacaagagcctgccctgtggccgtgaatcagacccagaaagccagacatgtgaccatgtaaacggggcacatatcggtgttcttgcagtagaaccagcaagattctctcagttggttccttttctaaaaacagggtctcatgctgcccaggctagacttggatttgctatataacggcgggtggccttgggctcctggtcatccttctgggtgcagggattactgtcgtgcgtccccatgcatggctgctgcaggacactcatctcgggcttgaacattaggcgagcactctaccaaggcgagctacctcctcccagagatcctgtagggtttcccccttgtctgtacgtgttcccaaacccgtgccacagctctgaccctgaattggattagaagagcacatcctgaggttcttcatcttaacttgtgaccaagcgccagtcctgacgaaaagaccaaaacactttctgtttcttcttaaaattaaagtgtctgaagtagagagaggctcagcccttataattatgagaagtttccctcgcccaacacccatctgcttaggacggctccccacacctttcctccttgtcctcttcctcctcttccttttctacatcctaatgtgtaacccttatgggggactttctgccctcttcttcctgcgtatacccagtgctggccgcagaggcagcccagctctgttttctcatgatgcagtgattatttttggcactgcgcatattttctctaatgttattattgcctcctccacccttctgggtgccttctgaggagcactcagtttttggcaattccacacaaaatcagagggttaattttagttcagtggtgaagacgaggcaaggagagagggggatgccttctcctttcgccccactgcagcatcctatgcccaccccaaaagggatgcgtttccccatgcctactcataaaagagcttgcttgcttccctggctctgtgttagccattcatccactgctgggcctggggttgagggtaccgctctccagaggtgacgtccttcgggggctgcacctcagggctggcatcttaatgacttgacttggcgggcttagaacagcctcattcagaccgagttcactccctgcgcagttggcccactcagcttctgtccatagagttctcttgttcaagctgcaggaggaaatggagatttccaagtgggaagcagccttcccaatgccttaactcttccctgcagggaagaggagctacagagagagagagcaaaagaaaacccaagaggcacagctgcagttccctgggagagggggacaggggcggggtggggagcagtgtggctgggggctgaggctggagccagcacagctgggatcactttccttcctggggaggtgggaaggaagaaagtggagggcgcatttgaattgccctacatcaattagcagatatttttcagtttgtccagagctgaggccctgagaagaacatgcaaaagtagagaatgcagtgtctctgctgccacagtccttaaagcagtaggaacatcacacaggaaagccggtaagatggggacattctctaataatgaatggagttagtaatgtgggcagaagtgccagagggagccgggaccaggcatggcaagaaatatacaagtgaagctgattcttcctgacagaggaagtggtctgatccgttacgtagtaagtacccttgaccaaacatggcgttgggtagtggacacactgcacactgtctttggcttcaagatcttaaaggtcctggaattctttctgttgaaagtgtgaggtcatagaccagcagcatcagcatcagcatctaggatggtgctagaaatgtagaccctcatgccccggcccagccccgaacttaaaagtacagtggatcaagttccctaatgctctgtgcactcggaacagtgtaggtgatgtcatagactagatgatagcccagtgtttattcagagggatggatcacatgcttgtgtgcacgtgggagcaaacacacacacacacttttacctatgagtgtcactgtattaagaactgttcccgggtagaaacttcttggtctaatcacgtgctgggttagaattcttagggaagattcaaacagtgagcagcattgaggaatttacgccccagaagtcactgaggtggtttttaatgccttcctctggtactgcttgtgcctcagaggaaggactctgagggaaccaagggtgggggccttcccagaagaacatgtctgcatggggtgaaatgaaagggagaacagcatgaggctgactctgcagcgtggaatctctggagcaatgtgaagaggtcagaacaggcagggccttcccggggaaaatggacacctctggaggtgaacagaggagctgtggaacagagatagactaagatggtcaagaggaacattctggaaggccgtggggagtgtcagtgcctagagctaaatcttccaggctacgtgggactggtcagctgttctccacacctcggagccttgcttcatgctagggagttcatgtcacacaccaatcagcctcttcttccttttttctgctgtgcgattttgctagctctctctgctgaaaaagaagtgctgtagggacggcttgcacatgtgctgtggcttgagccaaatcacagatttgtgttgttgggtgcttgtggggtccaaaagaaggtgtctgagaggacacaggagccctaaggagaaaccccagaggccttcaggcaacagcttaggcatggggcttacgcccagacccaggggaaaggcccgaaagaaacggaccagggagaaagacgcgctcaccggagacatccattacacctgcccaccacagtaagcatgctgtccccgagtcactctatctctgctcaacccctgtgattctctccaccagccctttctccatccctccctccctcctttctttttttctccctttaacttcttgtctttagatctccaaacaaagatgatctcccccttccctctggcaagtttgccccttgaagcaatggcctagagtagaaggtgatcctgctgtcccctctcttgccacttccttgatcaagagagtgttttcaatggcttcaaattcagtattcttagagggctataccctccgtgtgcccagttcagcgaagccttctgagctgcaagaggggcctgtttattggcatttggagaaaattgcccaattacaacccaatgtggcatgtgggctgcgttgacacggatgtgagagctaagcatgccaacttcctccatctctgggggctgcttcctcagggcacgtgacctgtcgccatactctttccatgagatttgaggattaagtcaggcagtaggaatggataagtgatccttgttaagtgcaaagcactgcccgtggttatttgctagtttcagcagcggcagcagcagcatttcaatttgctgatactaattaaccccttagctagagtctgcacattggcagaggtcaggcagtaaagaacatcggaggccagcaaagaacaacacttagacagacaaatggccactgctgcttgttggcccttcattacacgtaaacgtctacaagtcttctctagacctccatgtgtgaggagagggacaacggagagagagctagcttagagtgagggaagaggaattgttgacctgcaagatggccatcatcccggcactggcttagagccaaaggcagcctcttcagatgcttcaaaaagatctaaggaaaagaggaaggctgagaggaaggaagcctgggggcggggcatgtagagcccaggaccaggcagaacatgagtggttggttttccttccttctgcagactcccctgcctcaggagtgaggctacggatgttgccactcaggtgaggggatgtaagatggcagggagttagatacatgttacaaagcagtatgcagtgcagaggcctacatcatggcactgttcacaacagctaagcgttggggaccccaactgagcaacatatggggatcgccaaatgcattggggtctctgttcacacaatacgctgtgactggcttttaggaatattaagaaagaaatctgagcattatacgtaatgttaagtaagaaagtcaaggggaaaagccgtacgtacgttccgtgagagccctttctgtaagcatctgtgtatttcccaggttacccttgccgagtaggatttgggctgattctcggatgcatgatgaaaggcctccttccaagcctagagctgcttgccagcacactcctcacgagtccttgaaaatacatccgaggagttccatctacttccacctatccctattttctaagcctcagttttcctcatctctaaaatggacaactggcagcagctgttccttcgtgctgtgaagtgagatttacttactcttaaagtgccttataaggtgttgtgtgtgactcaaatgtaaagtagtattcactaatatgctagtgtttacctattgcctcgggccattcagaatgctgaagcaaaagccataggccgggaaactttcaaacagcagggagtcattgcttgtgtgtttgaagtctgggcagcggagatcaaggtttgagcctgatctgttttgtttattgaggatccacattctgcttcacacagtggggctggtggaaggtgccagggatccaactgggtcttatcttacccagagagagggctccaccctcactttggaggcgaggatttcaacattaactttggagacataaaactcagacctgggcccttgctagaatgaggctaggccaaggacagtttgtcacagctactcctgtgcgtggccagctttcctagcaggctggggactccacatgtcctaaggtgatagaagggtctgggttcccagatggactgcttggtaattaaatctgttactgtcttctgggaggctgcctggggcaggaggctcgtccgataagcatctccagtcggcccctgtgcagaattgaccattaaaggggcaagtggagtgagccccagacattacttactgtcagctctgaacgtagtccaggcctgctgctctggggatactgaccctcagagagggtcagcagctgggggctaaactccccatgaaggacggctgggctgaaaggccattataaggacttctcattgagatggggcatgagagcctcgccctcatttcagccactcctccctctgctactctgttgctggcctccccttccaggacagagaccacactcttcataaactgtctgtttgtctgagtgcactgctgcctctctgcctcgtccaggtctcagttcttcctgagttcttaactccgggtcttccattttgactgacagcttttccttccctttgttttgcatgccctgactgaccactactgccttgggtcagaatgcttccagaaagtggctcatcagaacattgtctccatagaccacgttctcgctagcctttagaaattaccctctgagaaattcttgtgagttgtcttgttcttttgagtgcctccagttgtggcaaaaaaaaaaaaaaatatcagttgagagcacattttattctttccaagaactatgagctgtccatagcctggcctagtgactaaaagggtgggtaagttggggaacatacatagtcagttggaatgatgtcattgccattaaatgttgtaactggtattcttttgtggttccaacattaattcctaaatcacctaccaaaatgttagagtagcagccgcctcagtaggataagcctcagccttctcctgaagtgactcttgtaatggccatcacctttttgtgatactcggtataaatctctatgccattgtttgggtcccttcctgtagctatagcatctgtagagcaatggccccaccagccctaacagtatctgttcagcctatgatagtgactttaaatctgcttgacatgatggccatgacaccgtgtgagggagagggggcgtgcatggtcagatctcagaggtatccgaggacttcctgctttttgtgatgtataataatgggtcctgatgtctgtatcaataagaacgcaagtgattttgatatgagccaacattgaaaatggctgttttgctaaaatgacatcagtaacaataattccaatgtaaacatgggccaaaaaccaaaaacactcactgaggaaaagccctgcgccccaagctccataaacgcaggttttctttattcctgagtgtttgagaaaaggggtaattgtatttccaacacatccttaattccagattacatacatagtacacccccaaaatcaacaaaagggccctttaaaatcagacagctttgtccaggtgtggtggcacacagacctttaattccagctcggaggcaaagccaggtggatctctgattttgaggctagcctggtctacgaagcaagttccaggatggccaggactatattacagagaaactctgtctcagaaagaaaaaaaaattgacagctgtgtaacaatggttagccctgggcacataagaacagaattgggcaggagtcatggtgtcctcagataaatcaaatctaaggtcagtccgagctgggaccccaggatccattttttgggggggtcgagacagggtttctctgtgtagccctggctgtcctggaactcactctctagaccaggctggctggccttgaactcagaaatccacctgcctctgtgtcccaagtgctgggattaaaggcatgtgccaccactgcccggccccaggatctacttttaaggcttttccagtgagcaatcaagatcaagaactctgcagaggcatgggttctgctgtgatttcatcagttgcgcaaacaactgctaagcttggggtccagggactcttgattttctccgggaccctgagtaatttttctttttaaaatatttatgtatttttatgttggattttgtgttggatgtttcgctggcctctgtgaccatgtaccatgtccacgcagcacccacaaaggaagaagatatcagaatccttaggactggagttacagacagttgtgagccaccatgtgggtgctgggaattgaaccccaggtatggaagaacagtgtgtgctcttaaccactgagccatttctaacctgaagctgctatttctttcaccaggcagctgttgtctggcagctccacaagctcactgaagagcccacctccttcctgcttgccttcacagtgccctgtgatttagcgtacgtttagatccaaccaacaggttggcccaagctggtttagtgagcctcgcttgacctctcagccacttaaccttatacggtagcagacatctgacttagatacctgatgactgcagtcacagtaaaagttgagtctgctggagacagctaggcttggacactcgcagatgagaaacaaggattgggccgagagtaggtcactgtgaatgagagcatcgggacccactgccacacttacagtatcacgtgctctggccaagctttgcctgggtgagttttacctcatagtctaggcttctggatcctttgattctactaattagatctaaaatatttggaaagaaattatgaatgtggtgaatatatacagtctttttttcttattatcggcccctaaataatacagcataatagctacttatagtgctcacattctaggacgcattgtaagtaatcaagtggtttaaagtatagatgcagatgtgtgcaggttccacacaaacactaccccttaaggactggagcatctttgactttgtctttgaggggtagccagtcgtagctgagcgaggaacggttacccctggattgatgcttctggacagtcagttctgttttacctttagcatgctgcttagaagagcttacctcctttacctgggattaaatctttcagaatcatgtttgtttcccctcagggagagctactgtaaatgaatgtggaaaagaaaatgctcccacccctagctgcagtgtggtaggaaggactgtgcagtgtggtagggaggactgtgcagtttggtaggaaggactgtgcagtgtggtagggaggactgtgcagtgtggtagggaggactgtgcagtgtggtagggaggactgtgcagtgtggtagggagcgtgcaaggctacttgatgttggacttgatcaaacaacacctcactgtaagtcagctctacagcaacgggggctgtgtgcgtcctgccttcctgctcctcccagtctgaactccaatactggccttactccttgggtcctaggatgtccctaaggttattgggtgcttttccaaagacagagctgtccaagccccaaggactgctttgcactgtgtctttctaagtctcaagcctcctccctttcccatggtgtggatggggatctgagttgtaggaaggtctgtaacaacactggacatgtcagaacgatccaagagtttccttgctgcatggggagaaattggggtgttgggacccagagaagctaggattgagacaagtgatttagtctctgtagctcctgtcttaaagagttattatgaaactcaactgcagtaaaatatgtaaaatatgtacctaagccgttataagggcaacattgttatcactcgcagttagcagaatcctgcctcactgcctttgctattagcaggtttgtctctgatcctctagctaaggactgcaggtgtaggtgaccccctaactgactgcttacttctagagaaggaggcttgtgctgtgaccacaggggccagcatggtccccgcaggccaactttggtgtgtgtaaggacaggcagccagaaccacatttaggtggtgtgtttggaacaccacatatgatacaggccatctcgtgggaacaggagagggatgggaaccaaggatgggaaaggaacttaggaaagaaaaccaacgtggagtaaggaagtaccaagtctctccgaatcaagtatttagggtaggatatctttttaagagaagccaatggattctaatatgtaaattgtgggacacattcaataaggataagcaaaatgtggtcattgtaggacccatcttggaagaaaagtgttccaggaaatgaagcacattgtcggcttaggaagatgcccagatataatatgcagagccagtcaagatcagcccgtgtgccatagcctggtcccctcagacagcctgcttagcgaggacggacaggtgccatgccagagtccagatgcagctgattctcagggcatcgatgcccagggtagccagacaatggatcttcaatctgccccaatagttttgattgccagagaaccttctagggattctgcacccattttatcctgataagacatggagttttcttcctactttacagatgcaggaaccagagcccagagaacgtgttttcttccccagattgagatgggtagatagcactgtggcttcgtacaagctcgggcttctgttatctgtgccttcatgataattattctttttcttcagggttgctaattaaatgatttcagtgttacagatttttgtctatttttccaagagtcaacattagacatctctggactatgtcaagattaactaggcaatctaattaaaatcaagctagttctacagtggaactggaaaaaaaaggtagctaaagggagtgtacaacattttaaaccagggacctgcctcagggtctcggccatctaaatgttaaaatgttgaagttgcctctttccagctaaggaaaggtactgcctcttatgcgagtgggaggaggtaatgttttatcactagctctgccactaattaggtaattgctctaagcacagaacttaaccaaattgggtctcagtttccaagtctctgaaatggagacaatggttgcaaggataaaattagtcagcctgtctgctccctgactggaagggcctatgtagctcctggttgtaagaccttgggaaaacggcatggtatgttctgggcctcagtgttcctatctgtaaattgcacaatgtctaccgagccgtgtcagtaagaagagtataacggggtgatatgtagttgtcggcgcagtgactgaacatgtctgtatcagtaagtgtttatgtagctgaaggagcttagccaaacccagagctcttatgccaaagagaacccagactttagctagcctgttccccacaactcagccacaggggtagggggcgcggacgggagagcttgttcttggtatcgttgctgatacacggcctgtggtgactgcttcacggcatagctgctctggatgttaacaacgatgggatcaggcgctgaccctgctgctgtccggaagcgtgagggctggtgctgaggaggggaattcaggatctcctacttggacctcaggagccagagctgtggtactccagtgcagccattcctcctgtgagcccttaaggtatcccaccctaaggagctcaggattgagatataaaatccagggagcaataatggcccttaaagtctggtagaagatgcaaattctcccaggggtcaggttctgaggggtgagaagggtgggatagaaatagagaggtgtggggtttctgagagctgaaaggcagggaaggggaagaaagggagacaaggaaagccaaggggagaggggacaagaaaacccatttccctctttcacaacttctcacaaggttctgcctgaccatccatgttatgtggctcttcctgcagtctggtatccaatggctaatccatctgggggcctagatggcctgcaaatgaagtgagctctgacgtcgaaaacgtcgaaacagggcctctgcctcaaatccgcacggggatgagaggcatgccagcattccaggaatccccaagtagtgatgttctgtccagataacgacatgctcaaagacaggcagaaaggagagcaacccctaggactggcaacctcagagggtaaggtggcatgagccagcctggagctgattggaagaaggccttgaaagccacaaagcacactggacatctacagaagcaaataccaagttagtttctttattaaacaagcaatatatgttatttatagaaaacacaggaaaatatcgataaccacttggtaggccagggagggcgagctccctaactaaccccattactctgcaactcttactaatggctaagtgcctagactctggggttgccctgccaggggcagagttcacctaccagctggcagtcacgggtgaattacttagcctctgtgggcctgttttcttatctgtatattggagatgctaatagcagctactctcacagcaagttgtgaaatttaaagatgctaacactgtactgtctgaaagagtagctgaactgtatcaaaaaacctgtcaccatgacgctgtgaccatcgtaaaaatgtttgctacttaactgtactccctgtgtagcacacaggaagtgctgtgtgggacctgcacagtgttttgaggacatgattgccctgtgttgcggataggttgtcttttcatgggcagannnnnnnnnnnnnnnnnnnnaggggcagagttcacctaccagctggcagtcacgggtgaattacttagcctccgtgggcctgttttcttatctgtatattggagatgctaacagcagctactctcacaacaatttgttaaatttaaagatgctaacactgtactgtctgaaagagtagctgaactgtatcaaaaaacctgtcaccatgacgctgtgaccatcgtaaaaatgtttgctacttaactgcactccctgtgtagcacacaggaagtgctgtgtgggacctgcacagtgttttgaggacatgattgccctctgttgcggataggttgtcttttcatggacagattgttgctaatgtttctttatagtggaatgtgcccaggactaaaagtttcacataaataaatggtcacagtatgtcctcacagttactggttactgatgcgacacttaggcagcttcatggtagaatctgacgagttagcaggcagatactctgacttttaaacttacccgtgttagtacgtgatatggactttgtacgaagaccgtgtttctttaggatctctggaaagaggcaggtttgggtgtcagtttgtcctttccttcccattctgcaacaaagaagagtcagtctggcacctcaggctggcaaggatggcacccactgcagctaccacccttggaggtctttgcttctggattgcaaatggaggcgtgttgtccgcctcatgttctcttggcctttactgatgtctccagactctaacctgtcgtctctcagatcagaaacagggtcttaggtaagccagggctggtctgaccgtagcttcttcgcccttctctttccattggtgccctttgaccctgtcctcaaactttgttcattagtttaattaaatctttgctaacgctacccacgtgaagcccagttctggctcctgcaagaatacagaagaaagcaatttgagaagacaccaatgcgcaaaagcagagtcaataccaaaaggtggcttgctcatagctcccctgggctgagccagatgggttcagtgggagaattgactcactgtgggggtgagtgggtcactaccgagagtgtgaatggatgacgtccacattccaggactnnnnnnnnnnnnnnnnnnnnactggcaacctcagagggtaaggtggcatgagccagcctggagctgattggaagaaggccttgaaagccacaaagcacactggacatctacagaagcaaataccaagttagtttctttattaaacaagcaatatatgttatttatagaaaacacaggaaaatatcgataaccacttggtaggccagggagggcgagctccctaactaaccccattactctgcaactcttactaatggctaagtgcctagactctggggttgccctgccaggggcagagttcacctaccagctggcagtcacgggtgaattacttagcctctgtgggcctgttttcttatctgtatattggagatgctaatagcagctactctcacagcaagttgtgaaatttaaagatgctaacactgtactgtctgaaagagtagctgaactgtatcaaaaaacctgtcaccatgacgctgtgaccatcgtaaaaatgtttgctacttaactgtactccctgtgtagcacacaggaagtgctgtgtgggacctgcacagtgttttgaggacatgattgccctgtgttgcggataggttgtcttttcatgggcagattgttgctaatgtttccttatagtggaatgtgccggggctaaaggtttcacataaataaatggtcacagtatgtcctcacagttactggttactgatgtgacacttaggcagcttcatggtagaatctgacgagttagcaggcagatactctgactttccattggtgccctttgaccctgtcctcaaactttgttcattactttaattaaatctttgctaacgctacccacatgacgcccagttctggctcctgcaagaatacagaagaaagctatttgagaagacaccaatgcgcaaaagcagagtcaataccaaaagatggctcgctcatagctcccctgggctgagccagatgggttcagtgggagaattgactcactgtgtgggtgagtgggtcactaccgcgagtgtgaatggatgacggccacattccaggactaacccctcgtttcttcatgtaggagcagctcagagctgaggaaggagaaatcccgtgatgccgcgaggtgccggcgcagcaaggagacggaggtcttctatgagttggctcatgagttgcccctgcctcacagtgtgagctcccacctggacaaagcctccatcatgcgcctggccatcagcttccttcggacacataagctcctgtcctcaggtaaggcttgacaggtcctgccccaagctggcatctacctaggcctcgctccaagacacatctacaaatatccactcacagaagctggcacatggcctttagtgttacatttatttagttgcgtgtgagggtatgcatgtgggtcagaggacagcctttgggagtccattctgttctcttcttccatcatctgggatctgggacttgaacttgggtcctcaggcttagcagcaaatgcctctagccactggaccttcttgctggccctgttccttcattttagcatctcccctctggcaatgatcttctcatgagttcacccagggaagagaccaaggacagactcaagtgagagtgtgaggtgctcccagagagtgtgaggtgctcccagagagtgtgaggtgctcccagagagtgtgaggtgctccaaggggttggagagccgagagcagcttctcctggaagcccatccagtacctctggacctctggcgagagtcccgctccacactgtgttgactctgcaggaagccttttatccttgtcttccagctacatctctaggacatcagaaatggtgatgtcccttgtgatctatctctcagaaccttggtttccttgcctacaaactggaattagccaggcatactgcctgggaggataggggtaggaaatgggggggggattattagggcactataggaatgagtggagacagcggctcagctgtattcgttcttgctgggctagcccccgccatagaggacagcctcgggcacctctccctgctcagccgatgcgttcttctttcccgcatatctcttcaccaacaaacagttcataacgaatgctttctttcctttgtcagagttacatccctcaaaaatcatttcctgttaggcctcaccaggaagaggcagcctggggtttccactttcacatcctatgtgcagtcttgtcagacttatcagttctgtaaggaaactgggcagcatatagctgccaggctggcactacagcagggcagtgtccgaggcatgagcaagggaggcaggcaggcaagggggaaagagatcccgtggctcattttgagttttcctgagtgagtgtgtcactctggagatgactccttacatggctattctgggaaagagccccctgcacagaggggtccagaatgaggcggggaagccagactagcctgtgctattctgggcccctgtgcacaggaaggatatatgggaaagaccttcggaggttagaatggctgctcatcccatcgtcctcctctaacccccaggctggaggctaagcctgggctgcaaggctgaggtgaccgtgctgttacagaaatgagcagagagtggagaaagcaagggcggagccgctgcacacacagcagggcaacagcaattactcagatttagacggtgaaaatggttgagggaagctcaggctaaggacttgtaaagcctggactgctaaataaaaaggcagactcggaggtgtctcacccatgccccatgcatgccttccttttacagaggattgtcctcttggagaaatgaggacgacagttcggtgatttgtaggattttgcaaagcctgtcaggcaaaaaaaaaaaaaaaaaaaaaaaaaagaaatgtagataaggggcagggagccaatgtccaagtgaagcagctagagcctgaccaggactagccaggagcagtgggtggccaggaggttctgagagctgtgtcttgctgccgtagcagggacacattgtctgtgctcgcccacacagaagcctgtgtgtcttcctcgatgggtcgaggttgatttgcaaagggcttggctagggttggatcttccgagcttatctgccctcatgtgtcctggtgcaacccctcccgcactccacgtactacacaaagccacagatacaagagcagacaccacacggagcagacatctcaggagctctgagccttgagaacaaggactgcctactctctagacagcataagcacggacagaccagaacccttggcgcgtcagctatggggctcccaggcctgaagaaagaaaagttagagattgataaacaagttttggtcatctggtcctggtgaccttaaagaagtgctcctgagtccagccacggaaggagatgtggcttagttctccttctctgccatttctccaggctcctaccaggcactctcgggactggttattttccagaaatggaatgtaaaatgagnnnnnnnnnnnnnnnnnnnngctaaggacttgtaaagcctggactgctaaataaaaaggcagactcggaggtgtctcacccatgccccatgcatgccttcattttacagaggattgtcctcttggagaaatgaggacgacagttcggtgatttgtaggattttgcaaagcctgtcaggcaaaaaaaaaaaaaaaaaaaaaaaaaaaaaaaaagaaatgtagataaggggcagggagccaatgtccaagtgaagcagctagagcctgaccaggactagccaggagcagtgggtggccaggaggttctgaaagctgtgtcttgctgccgtagcagggacacattgtctgtgctcgcccacacagaagcctgtgtgtcttcctcgatgggtcgaggttgatttgcagagggcttggctagggttggatcttccgagcttatctgccctcatgtgtcctggtgcaacccctcccgcactccacgtactacacaaagccacagatacaagagcagacaccacacggagcagacatctcaggagctctgagccttgagaacaaggactgcctactctctagacagcataagcacggacagaccagaacccttggcgcgtcagctatggggctcccaggcctgaagaaagaaaagttagagattgataaacaagttttggtcatctggtcctggtgaccttaaagaagtgctcctgagtccagccacggaaggagatgtggcttagttctccttctctgccatttctccaggctcctaccaggcactctcgggactggttatttccagaaatggaatgtaaaatgagccttttcctccccacccaccctttgttttagtgtgtgcatgcgtgctctggagaggttagggaagagcgtcgaagtcttgcttaaagacttcaacctcccttcttttagacaggacctctcgctcgactcgaagctcacgattttagctaggttggctggctggcaaactcacaggatcctgactgtgcaggtcaacatcggggttccgggcacacacagccaacctgtcaatgccgaggactcgaactcacatcttcatgcctgggcagccagtgctcttatgcacttagccacccaagtggctcattgttttaaattttcacctattatatgcatgtgtttgtggaggggaggaaaggacaacttttgggagttgattctccctccccaccatggatagggttccaaccaagttgtcaggtctgaatagaaggcctttttacctgctaagccatcgtttcaaccctgaaccataggtctttatgttttgtttttgttggttagttggtttgggggttgtgtttgtttgtttgtttgtttgttgtttgttttttgagacagggtttctctgtatagccctggctgtcctggaactcactctgtagaccaggctggccttgaactcagaaatctgcctgtctctgcctcgcaagtgctgtgggttttttgtttgtttgtttgtttgtttgtttgtttgttttatgtgacaaaaagtttagaggatctttgagcagatatcctcctgcactttgcttattggtgttgctgccatctctctcagaaacattgtacacagctctatctcattggaccgcagagtccatgaaacattgttggatgatatgaaagtctagcctgttgtacaagttatagctttgaagtaagtctaacaaaagaaacgatgtaagagaaaaatcagagcgaactctaatgtctttggacccaccttttagcagttacgtgttacagtgttacaacatatactttcccaactcaaaacaaactacagactcattacttaggcaagtggagttttgtatacctcagagttcaaacgcctaaaaaataccaggcttagcgttagggccagtttcttctttacttagcagcacacttcctttgattttcacagtaggctgcagtgtgtgggaatgttggggaggaagcctccgcgctgagaactccaggctgagtcgggccacagttgagattcatatcacaggaaacaaaccgaaacaatagctttacgatacttgcttccacactggcccaggaggacagaacacactgtggcgggaacatgggtggaaatatcacttgattgtcttaaatccagatgaaccctgcgctctggggctgaagtggagtcgcttctgcgtcccaagagctttagaccgcagtaaatgtatagaatgtgcattcgccccaattctgatttgaggcttcccagactcatatgtaaaaaaatcaaattctcattactgcagagttggagatcagcacaaagccaggtttctagacataaatgtcaagtttatttttgattattttgatttgaatttgtttatgttttattcctggcatttgcctagtgaagtcacacagtctgctcaggatatgattctccgatccctgagacattaaaatccaggacatggttttaaagctttcaccatgacttctcaggaaaagtgggacaaaggggacagaattacagcagcagatgtgatttctgtgccctcctatgccttgtggtaagacctgttttccctggttttcagcccaattgttttactgtcccacctcccccggccccacctatactcaaaatcaaggccttttctgtcctgtttggaaggaggccagtaagatgattcatgccaggatgttactggctgagagcagccagcggtcccttcaagaaagtctaaccttgcttatagcattctcttaaagcaaagagtctggccagtcagcgacagtcactgactgtagcgccccatagcattttatgaaggctagcgcagcaagcaagggtgggggagcaggtgtgaaaagaacaaaataaaaatctccaatgctggacttgtggggcacaccaggagagcagcagcaaggccagctgagatctatcactctgcagaaagtgtgagatagccccagcctgctcacagtgcggcataaggcacagtaagtggcccacactctttatgtttgccgtcagtatgcccggaagacgcgtgcacagcctttgaaaggaaagaccctgcggagataactaagtagcaagcaccagggaagtaggaaacctgtatcggagcttgttaggaacaatgtagcagttctagagtttcttgaagatggaaacatctagaaggatcatccgggtgaagtaagaaagcagcagccttacggctggcacagccaggcctcaaagacccagttagaagccacctgctctgccacctgctagttcacacaaggcaagtggctctaccatactggtgtgccacccaacatgggcggtgctgcctaaaggaaatgagcagtgctccggaaaaggcgctccacagccttctcagcggcacatatcctggcggtgggagccatcaaagcctgtttactggggctatttttagcattaaagaatttcgtggtccttctcaaaggagacagttcgtctataccagttctttgagattcgaaccctgacagattctgggaagcaaatggccaggatgtagaacctgagctatttagaccacccagcccagttccttagcaagcacctactttattttgtaccaatggtttgctctccgttgttatcagcatccccaggaggggcttaggctcttcgacagatgtcttcctggcagtttgttggttcctgaattgcacccttccttgcagtatccccagctctccctgagacaggactgagtgtgtaatgagtgctgtgagccagggaagccatggaggaaaagccttagtaactgcagggagggagggaggtctggtgtgcgcagccgccaggcatagcagtttttagcagaattgtgacaggaggctcagggctctgggtgcagcagggggatgtctgcctccctcttggctgggagtgacctagccaagttccttcagagactcccaggaggacaagcaggtgctaaaagagcaaatagttccactgaaggaaggggccacacccaagctgggctgctctagggtcgcagggaaggggtgggggagggtgctattggccattgtgacttcagtctcaagatgttccatgtctgtggccccagacacccttctccctcctctctaaagggcagtccacctgccactgtagccaatttcgccacctcctggaagtaagcgtgctggacagttcggaaaggccgcttggctgtgccgggcctgttaaaaacaggaaactttaagcagaactattttctctgggtctagttaacccagataggttgtcttgggattactccagattttgaagtcagtgttgccactgagatcaaagaagctgaagtgaaaataaattctcagtaggcctcagcactagcctctgtctgtctggagaaagtagccacctcgccctataacccaaatgcagctgaaaccttctccgggcatgtttccggggtcaggcaccctttgcccagactggctggttttcctgacgtgggggatagtcttcagcacgtggtctctggagcgacagctttgacaccctctgaacactttttgttgatgttgttgttgttgttaaaggaagaaaaggcactttttcagcttccctgaattaggaaggaagcctgggaggaggtagaaccttccagcaccaccctgggtggggtgcggcctcctcgtactagccaggtcttgggctctgagctcagcttaaattttcagcagagggttccacgtttttattttactttgcacaaatcccgcaagttgcatagcagtcctgggcccgccaggaggtcctggcccacccactcagccttggctagacttgaactcactatgtagaccaagatggcctggaattcacagagatccacctgcctctgcctcctgatagctgggattaaagacctgctctaacacacctggttaaatccagatttctaaagcacacacatatttgacattaaataatgaacaagaagagggcatagcctgtggtctgaggataacagccaggagccggaacaagagctgagcttagattgcagaggtggacttggtagtccaggacacacagagtgcatggttgggggtagagttcccccacaacgccccgtagtgtctgcctcttgtccctcacggctttgtgcctctaatttccattctctttcgactattctatgtgctatctatccccggacttatgtccccaaagtggtgctctgagaagccacctctatgccccttgactggaagagaagctttgggacactgggctcccttattgtcccagtctctgatattgggccatggatcttctgcctctagctggcctcttctctgtcctgggaggaaggctgtctgtgtgtcctgcagtggtggcccaatcctgtccagttgcctgacagacctctctttccatactcatgtgaactcacattccggatgaatttgcaaattgctctttctaactctatgaagaatggagctggaattttgctggggattgtgttgaatctgtagaatgctttcggcaagatggccattctcactatcttaatcctgccaatccatgagtgtgggagatatttcatgtttcctctccatcctatgtcttcttttttagagtcatctctcctctgactgctggagcttgtgctctctgtaccccttctttggtaccccatggtaatgtgcgtgagggcttatttagctttgtgaggttgtgagccacgaactcgccaccttggctctgatttgagatagtaatggtgtcttagaggagggagcagatgaggtagagcttgtagtcgttgatatcactttaagcagttaatttacttaaccttacaattcatgaagatgggaatcgctatcctggtttgctggtggaggactccagcgttcaatcgttacccaaagtcataagcaagtgggaagcagatgtaggaatagatacaacatttgactccgaagcttgtgaggtggttgaacgtggccctgcacttagctcctggggcttcctaacattctagacatcatagcctttggaaaaatggcttgactcagaagtcttgcactataaaatgagactgcaaatggtacatgccttgtgcgttattgaaaagccaatgtagagtgtttaatgctgggtctgtctgtggttgatgttccacttatgatagcagctaaaataactgctgctgctgctgcgaggtctagcattctatctgtagcctctacccccagccttcctattggtacagcaaattctgctaccacagaaaccacgctgtcccacagtcattgtcaatgtggcctgggtgttccaccaggcatgtggcaaatgttagatggttggtagtgtgcctttccctgtgccctggagccatgcctgtcccctcggtcatgtctattttaacactcgtgcccctgttgttcattcccctctctctccagtctgctctgaaaatgaatctgaagctgaggccgaccagcaaatggataacttgtacctgaaagccttggagggtttcattgctgtggtgacccaagacggtgacatgatctttctgtcggaaaacatcagcaagttcatgggacttacccaggtgacaccctctgcctcgttcagtaggaaaaacatgtctttattgggggtagacactaacgggggtcctaggcatagtcttacttgacttttccttatgcattcccatatgatgatgacagtccttaggacttcccaatgtcatggggcttgacattccttgtggctgccctgacaggtctcttctagctagattaacttggcaaaagtataaatcaagcccttgttgccatcaacattgctctgatacgtctgtaagtccatagacccaatattgactggagactattgataaccactcagttcatccccctgcctgtctctgaatgcagacattatcctagcttcctcttggagtccgaatgacttcatcactaggagtaacagcatctggccttgcttttgaaacaggtagaactaacaggacacagcatctttgacttcactcatccttgcgaccatgaggagatccgtgagaacctgactctcaaaaacggtaaagtgttcttctttgtttgcattcttctcatgacccccaaagcctgcacaaatagcccaaatggattatgttccatagatacagttggactagcttctgggtgagtatgcagctgttgagatgaggcccagcacatagaatagctcctaatggcccatccatgatgcctgatgtcacactacgaggtcagggtgccatctctaggacatttcatcatcacctgagatcaatcatctccgccaagcgacaccacccaaaccaatagcttcatctatgcctgattatttatgggagctacaggtgccttttgtcgtgtatcaagccacccaacacacaggcttaagcaatctcccacatttctgtggattctgtgggcaggtctctagctcaatgtgacatcagctggattgcagccatcaggggctaaactaggttgaagtgattaagatggctcacctggtgtgctgctgggacagtgaccacagctcttagtctatggagcctcccggtagccttcttcatatgaagactccagagcaaccatcttgtatgacagctcaggccatgcatcttccttctcccctgtaaagtgcagctgcagaagcctacagaccatccaagccctagccctgaaataggcatgtcaccacttctaaccctattcggctggcgagggaaaggttcaggcttgccctgtgtctcaggtccatgtcaagaggcatggtccttaggattaccactgaagagcagctatgacgggaatgtggagattttcagaagaactaaaactttggtgctggagagctggctccgtggttaagaatactggctattcttctgaggacctaagttgacctcccaggttctttgactggtggtaggtcacaactccagcttcagggagatccagggtcctcccctaacctctgcaggtatctgcacaaatatgcccataaacacaaaggtacaaacttcagcaaatctttccaaaccatacgaaaggagccatcgctgtaggcagcagtggcttccaatgactggtgagatcctcttgaacttgagaatctatcaccggtctggacagactgcccacatcaacatcttgtaaatctgtcacctgtcactactatggggtgtgtgctcatccaacctgaatagcaaaggcagtgatgccacgcctgcgaggcgtgttctcgttgccttgtgtgctgcaaaagcggaggctttgttggctcacctctcctgttggtacagagtactgtaatccacactcagacttacaaagctttgtaaaattataaccacctccctttccaatgctgccccagcctctcatctgcattgctgcttcctatccaaagaccttggtcaactggcttccagagtacataggctggggaccaccatgagtttatttgtcttgcctgtggtgccaagaaaccctaggctaagccacccaacacatagaatgattggttcttgatggtgaaggggctattgatcacagacctgcgccaccatacttggctttcagaagcacttcctaaatcggtgtctctcgttgcttctcttctagagaacactgctccctgggttctttgtctcaactcaactgctgaccaaaacctttgtttgagcatctgtgagctgaactaagaatctcactcctgtgctgttcaaagtctttcttttcaaatcgatggcaaaagatgaggccaaatctaggatctttttgcttttaggtttctctgactcacagctgagtgtcctccacttatctgaggaaaactcaggtctttagattcatgaatggggatttgagatcaagcagactcagccaatcagcaagtccttgctgaaggtttcaggctgcatagactcatggtctaaaagcaaggggtccgtgtggattcctggaagaagaaaaggttgggagacgggctgtggaatgctttgatggtgagtggaaagcctcaaactcggtcctgcaaacagtcaaaggctgttgcagatgtttaagctgaggtgatactatcagatgtcagaatggggagactccagtgattagcaagttaggagcccacaattacaacccagactattaatcacaaatgaatattgagctccctcattcctaaatcctggggggggctctctcagtacagttataactcatcatatacaaactccacctaataactaaaattatgagaagcctaattatgggagagacagtttataagaacaacattcaagctgtcacttaatgggttctgcagaagatgtttaaatccagttcaaggatgccagttcttttgatacacagctgttttagactgtgtcggtcaaatcaatgttccttagaggtgtgggtgcagaggttggcagcttctcttagagcagtgtgactacttgttggaaagttctgaattgctctgtgatgctgggcctgtggaggccaaggatgaagatggcggtgtagccacagtttagacaccgttggactcatgttttctgttctgcataacaagaagcagaaaacctggacaggctttggagatttgtactaaaggaaagaagccgtatgttccttgtctcggtgatttatttaatcctaaatgaaaggtcatctaattgatctttgtcaagaacatcgttaagatagacttgtctacccagttccagttaaaaacaaggggtgtgtgtggttgtgtgtgtgtgtgtgtgtgtgtgagtgtgtatgtgtgagtgtgtgagtgtgtgtgtgtgttcattcccctcccctcccctccttgacatgtgtcaccttaggaggaaactgatgaatggtacattatccaaagcatagtcatttgaggattcaggtaggatattggttgctcacattcctgagagacaggctagcgagagcagagaggagagtgtccaaggataattctaactagacagacttatgtccttggagcaaccatggtcactctcaggtttcctgctagagacccaaggcctgactggggagagatatctaaaactgtggtgtagcctcacagctctcaggtgacaaacaggtacagtgtgtagcaaacatggcacagctcctgccttccaggccttcctgctcctgggaatgcagtcacataggagcttctactcagccatcctccaagaaatctaacttctgcaggggagcagctttctcccaggagtccctccactgtgagtctccaccagcctggtgttagctcatagtccctgggtgggactggccatcactagaagttttgtaaaaaactttccttgacatatttctgtcctctagttctgaccacaattgagccaggactcaaggcacagcaacaaagggacaccattagtatttaagccatgagggcctctctgcccatggcaggctacacgcactctactacaaaccacaggagacacaaatacaagttgcccagaaacattgtaatttggattaatttaactggctcccacgcccttccccactcaggctctggttttgggaagaagagcaaagacgtgtccaccgagcgtgacttcttcatgaggatgaagtgcacagtcaccaacagaggccggactgtcaacctcaagtcggccacctggaaggtaggatgcgtggagtctcaagaaagagccaggagcaggaggtgcctgaggcctctccctcttctcggccgtctcggccttgtcttacttctgtgctttgaccccaggtcctgcactgcaccgggcaagtgagagtctacaacaactgcccccctcacagtagtctctgtggctccaaggagcccctgctgtcctgccttatcatcatgtgtgagccaatccagcacccatcccacatggacatccccctggacagcaagactttcctgagccgccacagcatggacatgaagttcacctactgtgacgacaggtggggtgttgggacagggtgggtcttaccggtgtgcatctgtgagagtgtgacagtgcagggacgggactaggacatggtgtgggactgctggctgcaagtttgtagaaggtagcctccttccatgtgaagactttaaaatgaagagagctaggttagactcagttccaaagcaactgaacgttctcttgggagtgggggggcacagaagcaataaagactgtggacttggactagagagcctagcagagtcatctgtggtcagtgtaggctgctgttctaaccttcattaaaggggagaccacagagggtgcacaggaaggcatgttgtgtggttgtcagtacatgcagggtttgtatagactacaccacagttcctatccacttgtgctgctgctgctgggatggagatgtggaggacaacagtgagaacgagttgtgatgtgcagtggcttgcaccagggtgagggaagccaggtgagaggccgcaccagtgcgtgcatgcctagcctgagtgaatggcaccactcactgtgcctgactacttcacccatcgtaagctcagctctgccgtgtctctcgcatcagccgtgtactgcttgacactctgaaatgagtgacttgctcctggtgtgtttcatagggtcattctgtgatgaggtcacagttatgaacacatgtggaaaagcagaatggcatagcatgtggaggctttgtgtctgagctcatttccatccctggcctcctcaaagcaggagcttcctcctgtgctcaaggcagtaagcttgcctctgcaagtctgcatgagcccaaaacagcctggtcttccccatagcagaccccaaggcagaagctcctgacagccccctacaggcccagcttctctcttgctcagctaggtacctaggggcatctattttttacagggagacctttctggtttttaggttaggcttagacccttcactctaagtctagatggacctggtgtgttggctgtcacttatggtcccattcagaagttatgtaaacaatccttgacatattcctgtctcctagttctgaccacaacagttaggctgcaaggcgcgggggggnnnnnnnnnnnnnnnnnnnnnnnnnnnnnnnnnnnnnnnnnnnnnnnnnnnnnnnnnnnnnnnnnnnnnnnnnnnnnnnnnnnnnnnnnnnnnnnnnnnnnnnnnnnnnnnnnnnnnnnnnnnnnnnnnnnnnnnnnnnnnnnnnnnnnnnnnnnnnnnnnnnnnnnnnnnnnnnnnnnnnnnnnnnnnnnnnnnnnnnnnnnnnnnttcattaatcagcactggtggccatcctagtgttaccgttgctgttatggtggtgaccactgatgttcaacacatccaatcctgtatttataggaatattctgagcagaagatagatcggaggtacgccctctgcggttttcagagagaccccgaaagtcccggtgccagatccatgacaccggctttgaggtgcagtggcacttgagatgcttgtgcagaaacccaggagtggtcagggatgtgggtgacaggagggagttgctctgaagcaggaaaaccaaaccctcacctgccatctcctgaaagcagaaaagagactgtaaaaaggagctggcaggtgagggaactatctcccagaaaggttcatttgctgttaatttccattcattattgtggtttgagtgggtttcaggtaaaagggctagccttgggttaagggcagaaggggacagtcacaagaaatgggcagcctaaagggacaaagatgccatgtgcacgcacacagaggtaccatggtgacgtccttaggttggctcagtacggcgggtggggtggggttcatactcacaggaaggatcctgggatttagagatgtggctcgtcgtgcacagggagatgccgcttagggtggcttaggacacacagtattttcagcatactcttgccttccaaggaagctgattgcatggccggcccaacgtgaattctgttctgctagggagccgactgcagagggatgcaaacacagagtgccccacggagcgtttaaccgattagcagattagttaaccagggtacagataggacagttagtgaaggggctattttaagtgtttaatcccttggtgttatttctcgattgctttgggttgggggagaggcttgttctgtttgcatgtgttgagatgtggagcagtgtgtgtgtgtgtgtgtgtgtgtgtgtgtgtgtgtgtgtgtgtgtgtgtgtaagaggggaagggggagagagagagagagagagagagagagagagagagagagagagagagagagaatacatacactaacatgaccttctgagagatgtgctctaaatccagagcctacatgtgagagccagtgtagagcagggctcccccattttactcagtgaattatttggtttggggacatcatctgacacaaaggggattgtgtcccctaacagaagcagggaaagaatctgaagagaggaattttgagtccacaatcagatttgagcgagtttcatactttcctctgattatgcttgtatgtgtgtgatatgtttctatatatgaatatatgtatgtatatatatgtatttgattattaattatgagtcagtgaatactttaaaccctccaatagtgtctgtcattttcatatatgtacagggcacagttatggcttagacagtattgcttatctgaaaatcttggaactaaactcgtttctcattttcgagtttgggggaaattttgcgtaaactgtcctcaagtgaatccagaaattcaacatccaaactgctctagaacctgaagtttttaagtgtaatgtaggcacactttgggcatcagattttcagatgaagagtgcccgcctgtggactgctgtggctctggcaacaggagtcttcacttgcttggccaggcaaaagaaaaatctcgtcttcctctagcccccaccctctcaaggctggcccatgatttgcagcaatcctcctgccccagcatcctgagtgctgaggatgtctttattgtccgagtaattaatgtcctcctctgctgtgcactcaaacataaaagttgcagtctgtctgtttcctaacattcttagggactaatccatgagctgtcactggggaacagctgccataaactgttgtgtcacgggggaaagaaacaagtcctggtgcctgagggtttgggcttgagatccgagcagcttagtgaaaccacagggaatttgtaggacagaacagaacgtgccattcatcctggaggaagacccaagccattctgaaatcctttaaaagggttgggtttttaaattcacgtgagatgccatctagtggccaaatagaataactgtgaaggaagccaactcatcaagatgaggttttcttagaaaaatcacatgtaatctcagtgtgattttgtgagtcttctgtaactttgaaagatgtatgaaaattatagtaagcatttaaaactcataagtaaaaccatttaaagaataaaccacacaaaaagaatttgagagcaccatgttccatcaaaacaatacaggacatagccaagagttaggtttgtaagttaggaagacttgtgtataatgctcctgcagagaccccaccccatacacataattacagctacctgtagctctacttacagggacttgggcctctggcctctgagggcacacgtacacgggcacaaacacgtgcgcctatatgcatacatgcacacacgtgttatcacgcacacgtacttaaatctttggggaaaaagatgtatggtggattcattcaaagaacttaggaacagtaagacagcttaagtgagagaaggcttgagggccatggaaagaatgtccgtgaagtcctgggctgctgagatggctcagcaaatagaggaacttgccaccaagcctgggaaaccgagtttgacccccagaaccagtatggacagagctgatttgctgacttcacaagtagtcctctgaccacacacacacacacacacacacacacactatggcatgtacactcacacaaataaatgcatttttaaagaggaaattataaagaaccataaagtgtgaggccaggcgtgtgtgaagacagctagaaggtgtgtcaagtccaagagtaaagcagactggtttaagcaaattcgttgtaaaataatatgttcccttttgcacattggagatgattaataaactttgctgctttttgtaatgggtggtatcgccttaatttcagggtgatcttttgcaagcaccgtgaatgtattttggtctcatatataattgattccaagtgctttagcaggcctgtacattgcctttctccagacatctcagttaggggttatccaatgcttctttagatcctgaagttagactctaacgtgctctgcgtgtccttatgtccgctcagctgacagtattctggaatcagccctagccatgtttgaatgtgtaataacaactactcacatgttgtcctgaaacacctggtctgttggaaatgctctgcagactccctgtagtttatatcagagtttattgcatgatggggttcctaccacggattagtcacttctcacattccttctcactgttgggggttttgtcgacggagctggtggcatgcaggatagcactggtccaggctaccttctggtgtataacttcaccctaccaacaacacatctcacagagaccatagatcccatagagaactgttaactatagagctggggtatagacttcatataactgggcagtattcggggtgtgtgtgcaagacttaagggctgttgcttgaagcaagtctggcccagataaaaatatattaaaatgattaggtcttgaaatctgagtagtgaataatctagatatcattaaagaaatgcactgccagtgcttataaatatacagaaaataaaaaccaagtgtctgggggtcgttaaagcacacaaggaaagagccagtgagaatacacattgattaatgatagcgttcttgggaaggcaagtacgtggctaaaaagtgctcagtactttcatcttcacgcagagttcagatactccctagacactgtgtttacatgattaactcagcaaaccctgggcctctgaagggagggagcagcgatagaattggcactagggggctgcagcctgggagggatggcatgtggctgattctgctgtctctagaggggacagcatgcagaagaccatttccttcctgaccattccatataacacacctacacgtgtctttaacatgccacacttcattctgtgtgtgtttgtatatacatgcgtatatgggctcccttggtctgcctgcatgcttctgaaggtcagatatcagcactgggtgtcttcctcttccattctctactttgtttttttgagacaggctcttgcaatgagctcagaacttactgttttggctaaagtaactgatcagcaagctcttgggatctgcctgctatgccactgccatccactggccccacccactggctccacccactggccccacccactggcccccagcatttgccccacccactggcccagcactgggcttgcagacatcttctgccatgcagcaggctgaggctggggatctgaactcagatctttatgcttggacagtgagcactttgagccatttcctcactcgtgcttgtagactatctccagaacaaagagcagttgtggacagtgaataaatcacctcagattttaccttcacgcctcactctgaaggccaaagccagagtctggtctgacttcagaacaaagatacccttcttccattcattgtctgtttcctctctttcttcctctcctgcctcctcgtaggcttgctccgtcctctttggagtctcacttctttatctgcttgttattaaagcatgcactcggtccccagctttgaaatccgacagatctttttacgtttccccctcctctcgtgcagtctcgagttgacttttaagtttacgggtgaccccaaatgattcttcttccagcgagtcaaggatctctaattatgaagagcaaagtggtccctctcccctgatggagagcacggatggcactcttatctgccgcagccagggaaatgagcagggaaggccccgggggccataacagcgagtctataaacaagttcggttccttaacctccctatggcgtcggtgtgcctgcggatgggggcaaacggtcattagctgtaacttggggcttcctggctttgtgaagtcttgagaacccgcatggtctgcgattgtgttcgggccgtgcgcatttcccagttttttactgtagtctgtttaaaggaatgaagagggaaacattaaatatttattttggctgacaagataactgaaagctgctagcgggaagataactggcaagtctgaaatctgggtttgtttgtcttctagaacatgcccattgtgtgtctttgaaaggatgatacggtcattaggcaaaagcatcttattatgaggttgattataatatttactcgaagccttttgatggcaagatcctaatcgtgaaaggaaatgggatttcttcaggaaagacgatcacatccttcctagaaggccagtggtaaaagtttgtagaaaattttgcatcggctcagtccggctggcaagtgagcaaccctgtgagtggctctgctgtccctggttctggttctgattcccagggagtttgaggtgcagttggcttctcgggaatgctgtatggctaggtacaggcattgctccactcctcattccccccagctttatatcagcgggagtgtctgtgggtaccagctccagggtccgaaatcaagtggggacaaatcctcttgtggtaaggatggccagctggcactagtgctctgccagcctcacaggactgaattagccatacttagaggttatgtcagtgggcctaacctttgctccgcaaagacttgggcctccagcatcgcgtctggtcagaaaacttgccttttctctgctaacataagagcaggtagtatacagaatggaagggcagactgaagactgtgatgagctgctagaggtgctcctgtgggtacacacatgtgcacgtacgtgtaaatacatgtgaacacgtgtgcactgagatggttaatcatgcttaaggaaagtagatcgtgacccgggttcctaagtggggctggattgtcagcatgacttccctcactgtggggaggcaggaggagaaggcccacggtgtaagagtccagtacatccttcctagggcctgggcacatggcctttaggcctctgcaagagaagaaggaattggagggggttcggtggagaaggagaggcctgcggtgactctgggagagaaactggttgcagatggctggtggggagagtacatgacaccctgcaagttagctgaaaatcagatttcttacaagcaaagactggattctggggagatctagaaccagggcagtttgccccagccaagagagtagctggcctaagacgagtagctggcttgagaaggactgggtctaacagccacatgccattacgattggatggaatgaatacagagacagtcactcgagcaagcagagctttttattttccttgtccttagcctctgtccagagggcacagaacacagctgtgccccaaggcagtgtgctccaaggaggatggtcataccgagctgctcccgtcagctctggcttgtgatgagcaaagtgtgaggcatctacgatagaggactcgtgggactcacagcagaatgacatgcgactcacaaggtggccggtgcagtgattctagggcaggcttttgttcacttaaatgtctccacacagaaagcttccatgcgtcttcgtggctctctccatattggctttttcctgtccagttctcaaccaaaactagaccatccagagggaacacatctacacgcggcgcactcatgccattttctggcttcgctgcttgtttacctgccaggactgatttttatgttgcttccccttagcagcctctgtccttctccctcatggagatgggaagagacaagctgctggagacacatctagggtcatagatggcagctgagcagcatccaggggtgacaccggagagaaaactccctccctggctcttcctcgccttcccttctgggacacaggatttccatctaaacattcctcagcttcaactagaatgagcttgagatgctagctaggaggcctcagcgcttgttcctgtctgaactgggcacttgtgtggccatcaagccaattctgtcctctctcagatctccacttacacagatgaactgggaggtggagccatgtgacccctcctgaccccagggcctcttagatactaggcagtagagtcctctgagatagaacttcaggaagggcaggagagtgggggacgggggcagatccacagttgcagctgagtctgatgggttttttttaaattaggtatttatttcatttacatttccaatgttatcccaaaagtcccccacacgctcccacttcttggccctggcattcccctgtactgaggcatataaagtttgcacaatcaatgggcctctctttccagtgatggccgactaggccatcttctgattcatatgcagctagagacatgagctccggggttactggttagttcatattgttgttccacctatagggttgcagatccctttagctccttgggtactttctctagctcctccattgggggccctgtgatccatccaatagctgactgtgagcatccacttctgtgtttgttaggccccagcatagtctcacaagagacagctatatctgggtcctttcagcaaaatgttgctagtgtatgcaatggtgtcagcgtttggaagcttattatgggatggatccctggttatggcagtctctagatggcccatcctttcgtctcagctccaaactttgtctctgtaactccttccttgggtgttttgttcccaattctaagaaggggcaaagtgtccacactttggtctttattcttcttgagtttcatgtgtttagcaaattgtatcttatatcttgggtattctaaatttctgggctaatatccacttatcagtgagtacatattgtgtgagttcctttgtgattgggttacctcactcaggatgatgccctcctgatggggttttgcttgagtaaagaaatggtgtgacgatacttgatccattcaccttagatcctgaagtctctgatcgcatgctgtgccaaggctgtttggtcttttgtcctcacctgctgcttcctttttaattcagaatcttggaactgattggttaccaccccgaggagctacttggacgctctgcctatgagttctaccatgccctggattcggagaacatgaccaaaagtcaccagaactgtgagttcctagataccctgtgtcctcgacatctgcccttgagggtatgattgacaagacacggccttggttacttcctcccagagttaccatcttgggtggcagataaggtagataccttcaagatggtcagagactcaccgatgccaccagcccctaaatggcgtttatgcaaattaagaaaaagactcttgagtcctcgcagatggttaacattctatgcaaccctcaggggcagtcttgaagagcagctaaaagtgggtgtgtaaccagcttggggctgcactagatcggcaagcacctcggcatagaagagggcctgggaaggttccaacgagagttggcttgcactgaatcagtttccatggtagagaggatggggctaaccagaggaagaggtaagagagggggctgcctgtgcagcagcacactgtgtgcatgcgggagagcctgcacagcgaaggagttcaggaacagagctgtgcagtagtagagcctctatcacagaaacatcctgtgccttcataggccacacaagacctaggtagtacttgcagtgtgtctggtgcattgagaaatgtctttaaacttaagttttaaatgatttaagtagcttttcttggcacttggctaccttattggactgagtggttctgtggtgttcccttggccacgtttccaattcggtctttccatctatggatgctccagggtaattttgaatacgtaaaacccatcaacatgtaagaaactggacttggtcctctgaggactagggattggtagacttgatctctaccctaaggagtctttgttttggaagaaaagggagcctggctcccagaaactgggtgacctttaaccttagcatctctcatagcatcgtggtaatacaaacagcaggtgaatgataatctcataaacagactatatttaggaaagagatcatccaagcaggacactggtacagacagggctgccgaggggatannnnnnnnnnnnnnnnnnnnnnnnnnnnnnnnnnnnnnnnnnnnnnnnnnnnnnnnnnnnnnnnnnnnnnnnnnnnnnnnnnnnnnnnnnnnnnnnnnnnnnnnnnnnnnnnnnnnnnnnnnnnnnnnnnnnnnnnnnnnnnnnnnnnnnnnnnnnnnnnnnnnnnnnnnnnnnnnnnnnnnnnnnnnnnnnnnnnnnnnnnnnnnnnnnnnnnnnnnnnnnnnnnnnnnnnnnnncaaactcacccctctgtttcctccctgggagctttgggtttcatctgatctaataatacagcaggggccattatggcatctcagacaagtctcttactgtctctctggcataaaaacaaaaatatccaaatagactaccccaggggtggcaggacactccctgatgctctcagggagatgacccagccagagactccaaggtatggtgtcagccttctcttggagggcccccaatgcttttgtgctccctaggggttccccacccccaaggccgattggtagagacacacaactgtattctgctcagctctggcctagctcaccagctagtgtctctgggtctggcttccttttttttcttggccttctaagccaatggggtctgtcaacacagccgggaaaatatcttcattttaagtacctgggaattcttggagggtagtgttatactttgtctcctggggagggccgttagagagctcagtggccatgtggaaagaagacggctccctgtttagagctccctcatctataaagagggatagcaaggaagctggtcctaccggtttgcagctgactcctgggggaaatacgttggaaaaacgttttggttggatattgtttttacttaatccatatatttaaccccccagcacacctaaggataactcacagtccaaatagaaagtacagactcttgattttctgggttttgtttatttttttcccccagtggagttaggaaaagctgccctgagcacagaggcctgtatttaaccaagaggcctgcatcaagcaaagtctttccgccctatccccctacaagtacagttccattctagatcccctgccagtgtgtggggtctctgattcaccatgtgtgtcacagcttgtgtgtgtttcccatccaaacgcctggagaagctccgtcctcagccagatttagataattgaaagtcatcatttccaaatgggctaataatctatacactgtcactctcagaggggaagagttgggctggtttctctttgttgtgctcttaggaaaacaagattaaaggccataaaaagcctccctctctctcctggagtggcaggcccttcaccaaggctggcattaatgagaggaatgggagtggtgtgacttagaggtgactgatacagcaggcccgcgcctgcacttaacagaagtgcagctcaaacctccgctcagcgaacttcttcgtgaaaaagactaagaacactgaatgtggcaagcaataagaactatgtaaatgagctaattccaggcttgatgtcatgcaagaattgcgtcactgcagccaggtggcctccatgtcacccagaaagcgacagcagaaaagataaaggttccttctctggccaaggagtccatgatggttaacaacatggccttagcccgtttttttttttttttcttctcacttctttctggctcaacataatgtagtcagagaggatccatggcccctggaatcaaaagaccgatgatctaaacactatgactgttattctgtgcaaagtgaagcaaacacagccttcctaggctgcgtttccttgtgttagagggtgctgtctctcctccctcctgcacaggagtccatttaaaagattagatgaagataagacaatcaaagtggcaaaacaatctgactacttctaataataaaaacatggtcttcagcagataatctagaagtttcttaccttgttacacccccatgaaaaagaaagccacgttcttttggatgtggatttggatacagatgtctattgcacttttattcacaacgggaaactcaaacatccaggtcaaaggaataaactggccatggtacacccagggagacacttctctcccacgaatcacagaaacacccacaacctcaggaacacgatgctcaaggataatgacgccaaactcaagaaagtctactcccatagacgtctagaaaggacaggagacggtgccggggaaagatcggtgatcgtctggaatcagaagtcagaactaggaggaggagttaggcacgtgggccatggggcaggttcagatgaagtttttggtccctctgctgtggtgatggctacttaggtgtttacgtttgtcaaaactcactgtactatatgcgtgaaatagttacctctccatgggattaattaaaattaattaattaaaattaaaattaattaaaatacaataaagcttgttgtagagaggaaaatgtgtctaatctagactctcaagcctgagactgtgcaagctggcaatcatgtttagccaaaggactctttcaagggctgcagtcgctgtcgatgggaagcaggagtttcacacactggtaacccacaccaagcaaggcagccatgacactgaactccacaggtgtactatgtaatgactgtcacagggacttgaatttacctctcaaggcagcggtggctctgccgagcaatgcacacatgtaattctccatcattcctgctcctcactgctgtgtgttaagatatccaagagggtaagatgtgccaaggcagaaggactgtgactggcatgactatgaacaaggccatccttcggccatgcaggactgatgaggtggcccacgagctgactggtagacccgaggagactgcctacagggaacatagctgttctctcctagaaccccaggacaattgccgtaaacaattcctagtaacataactggcacagtacctaagcactaggcattgatagcttgtggaagaggaaattcctaaacagtgtttgtgtagccgatgaggcaggcaagtccatttgatctgcagcacaaacagcagtagccttctggacagttagaaatgacagtgatggacatgagaggaaaccacaccaggattgttacttccccaaagtccccaagccagcaagacttcctgagcctcccatcattcctcttcagttctctgtgacctgggcacttctgggctggagctctgaacaatcatttggaggggggggggtgaaagtcagtggacagtttaagaagctaacagacatttctaaaatcagcagacatgactgaaaaggagcccttgagagctctttcacaaaaataaaaatgcatttggaaatggggaagaagacaaactagtgtgtgggacaccccttggtgtttttagactgtgaaattgactacttagaatggcctaggagaggaaagaaactctaagctggcagtctcacggggcagttggcaagtttaaagaccttccagtggctgaggccctgaattaacagtacaggcctttccctactccagataaatagagcagtagtttctctcaaattgtatctggctcctaaggtagcagaaagttcaagggacacaaagtttaaaaaacaaacttcagctgggtcttgtgacacagctcttgagttgagtcccagttattcagggggctaaggcagaagaatggtttaaggcccgcctagacttcagagggagttcaaggacaacctgactaatgcatcaaaataacagaaaggactggggctggagctccgtggacgagcacttgcccagccctgttctgtcctccacagtcagggaatgggacggggctgcagccctgcggtccaccttccagatgtggtctgctaccttcaggaggtgaagtcagtagggtgctgctccctggttgactgggagtcactcctgcactgggcaggcaaacatctgctttccttcagaactcctattcccattttttgaaacgaagagttggctgaaatgatctccccctcccccaaccctctcactgttcctggccttggcatccatctggcagctctgtccatccccctccccgggcaggtgacacttcctgtggggttagagtgtgtgctgcacaccactcctgcacctctcttacctctggctcctttcttcactagtgtgcaccaaggggcaggtggtatctggccagtaccggatgctagccaaacacggaggatatgtgtggctggagacccaggggacggtcatctacaacccccgcaacctgcagcctcagtgtatcatgtgtgtcaactatgtgctgaggtgagtcgaggagggagcagccagcctctcgggaccctgggcagtatctccacatgctggctgtggtgtggatccttctaactgggagggctctatattgaggtcttaggaacagagctctagcgtgtttctttttcatttgtcagctatggtatcatgtctctgacttgtgctgaggggggagaagatggcatagagtaatgcttgatgttgtgtgaatgggagacagtgctctcctgggtaagctgttttgggaagatgtggatgttataccctctcccctccacccctggaaagactatgagcggctgccattgataatatgaaggaaactaacataggaatccaggacttttgtcagcctacagcttgagcacagggagcgagcgaacagcccacaggttgaggctaacctcaccgtactctgcttctgtagctcacagaattggattgtttgtgtttctgcctaacacttctctgagaggtttatctaccaggcttctgacatgtctggggcgggagagccaaaggcttttgctaaaagatgcagatactctgagccgctctctcttcccatcagtgagatcgagaagaacgacgtggtgttctccatggaccagaccgaatccctgttcaagccacacctgatggccatgaacagcatctttgacagcagtgacgatgtggctgtaactgagaagagcaactacctgttcaccaaactgaaggaggagcccgaggaactggcccagttggcccccaccccaggagatgccattatttctctcgatttcggtgcgtacttcctagccctggttgaacccacagaaccctcatggactggcggacagttcttgttatgacaagcctccctggccacagcttccctaaaccacagatgcactcgggccttgctgatcactgtgcgtggtcaggctctgctaggtagagaagaagcacagactcatggccactgagttataagtcctcatgaagggtaaagaggtaggcaaggagagggctccctctcgaggggcccatcctctacctggcttgagagtctgagttgaggcgtgtgtctcagggagtgtcctctaacttaagcgaaaggctgagtcagaacagcgccagaaccagtagccgagaggagactgagggcgaggatgaagccctcggtggctgccctgcgttagaatgtctgcccatcttcctggaagagaagtcctttttggtcctgagctctcctctgacacccggaactgtccagggagaggcctcttccggtctgcaccctctccagcccagctctgactgctcccctttgcaatcaaatccccctttgataatgtgcatctgagaggccacaggaaaatggacacctcagagaaccagaaagggcaatgagccctcttgcacgagataaccttgtaaccccccagctccatgatggtactgaggcaaatggcccaattctcctctgataacttcctcagctctgttctggaaggctctgcaggaaacaactgcttctatctagtaagctcggtctctgaatgccaaatgctgctggagattgctctctttataggaagtccccagattgaatcatagttctggtcctatctaggctccacagtactgagggtgtcaacttcaggccctcttttaggaccttttgtgaactttctgggcttatccaccctggggtgagcccagatctcacgaatgctcctcaagcaagccttgtctttacaggaagccagaacttcgatgaaccctcagcctatggcaaggccatccttcccccgggccagccatgggccgcggggctgaggagccacagtgcccagagcgagtccgggagcctgccagccttcactgtgccccaggcaggcaccccagggaacactacacccagtgcttcaagcagcagtagctgctccacggtgagcccccaccctccaggagagcacacagggctcatgggcccctcaagctctgctgccagatgactggacagaccccctgagaagtactgcctcccttgggtgttacagtgcccctaaggatggctcagatactccgagagacactagagctgactaccggctcttagcatctgtcttccacccttatccacgtcgtgactcttgaaatcacagcaagaacctaggcaggtctctgcaaaccaaaggcttcaaccacagagccctgctggccacagcctctatccagtttgcacatcaagacacacaggacaagtagctcacaacccgtggtacacaaatccctctatttgacgggagaaatcgaacaagcctttcacagggtcacctagatcatcagaaaacacagaaattcactttataattcataactgtagccaaattactgttttgaggttgggggtcagcacagcatgaggaactggagggctgcagcatcaggaaagttaaggaccactgatctaggaagtgatccaagcctctccttagagggagacgaaggttcagagaggttgatgagctgagctgcttcacacagcttgtaaatagtagtccccttcacagatgcttggtagaacggggcagagtgcagaaccatgcttgtctgttctcaatggactcctggcgagacaggccccgtgttcttacttggtctcgtccttcctggtctccagcccagcagccctgaggactactattcatccttggagaatcccttgaagatcgaagtgattgagaagcttttcgccatggacacggagccgagggacccgggcagtacccaggtgggccccgcgcgtgggtgacagagggctcctttgcagagacccccggtgtgctgcgcaaagcttcggggtcaggaagcttgtgagtggcgcgctcccttcctactgtgtccctgctcagccccacactcctgtctaactgttgaccccatctctgtcttgcacaaatggtgtaagtggtggtggtggaggtgggcgagggtggtgatgagaatctccaggggcgatcctcacacctccctttgattgtctcagcctgagttctccaccccagcttccacattgttctttagtgtgtggccttatcctatcctgcagaacctcttgttgtttctgtgcatgtctttttcctctgtgtgtgtgtgtgtgtacgcgcgcgcgtgtgcctgtgacacttcttagcacaagcaggcacacttccttcagtaccagtcttgggtacaaagatctatctgtagtgaggggtcattggctgaccgcgactgaagcttgtgtctttgcttatgagtattctgttgtgaccatgggtgtccctgagtatctactggtgagtgagaacagcagtccctgtgggggagatgaagattagctggtacaaataggataaaaggggcagccagtgcaacagaggccagaagttgacctggttgaaagagaaagagaaggctgcaggtcaaaagtggagaaagctcactgaacctgtacaggatgaagggacagatgcaggttatatcccaacagcaatccttgtaccctcaatggcaaatctgagcagttccagcagaggtatttgaatggaggactgacagtttcaaaaggcctaggcagggcagggccgggccagccactatgcaccctttgctctgtgtctcctcagacggacttcagtgaactggatttggagaccttggcaccctacatccctatggacggcgaggacttccagctgagccccatctgcccagaggagccgctcatgccagagagcccccagcccaccccccagcactgcttcagtaccatgaccagcatcttccagccgctcaccccgggggccacccacggccccttcttcctcgataagtacccgcagcagttggaaagcaggaagacagagtctgagcactggcccatgtcttccatcttctttgatgctgggagcaaagggtccctgtctccatgctgtggccaggccagcacccctctctcttctatggggggcagatccaacacgcagtggcccccggatccaccattacatttcggccctactaagtggcctgtgggtgatcagagtgctgaatccctgggagccctgccggtggggtcatcgcagttggaacctccgagcgccccgcctcatgtctccatgttcaagatgaggttagtgacagatgtctggctggaggggacatactgggcagggcgagtacatgtacacacctgctaatgaaggctctagagggtcacatcagcttcccgctgaccatatcccctcactgtatgtgtaggcagctggcacttttcctagtcctcctctgatatgtgagagccagaccccagcagatagaagaaggggcttttttaagtgatgtctgtctacctttggacacagataggtattatggtatttcctccatagtcctgtactttccatctgcctggagcctctgtggggtgcacacaggcaccagcattttcctgtcttcccagtaggctgcagtcccataagctgatgtgtcttgtctatagtacgtaccctttatagagcaccccagatggtcctctggaaggaaggcattcagcagaaatccttctagagactgttgtcatctagctgggcaggacccctgagggcaggactgaggtggacaggtgtgcggagagaggcgcaggtgacagaactcttgagcatcttacagaaggaagagctgagctgccgccgctcaagccctttagcattctgccctccatagatcgcctgagtcataagtgttagattctgatgaagacaccaggcagcgggaggctgtagatgcctcacacccaccactgtcttctcttggcattggcaggtctgcaaaggacttcggggcccgaggtccatacatgatgagcccagccatgatcgccctgtccaacaagctgaagctaaagcggcagctggagtatgaggagcaagccttccaagacacaagcggggtaagccatgtctgtgaacgaacagcctactggacaggaaggagatgaggctagggtagagatgcagacagctagatctggtagtgagcacctgcccctgctgggtctgtgtgctacccaccctactccaccctggcccacttcctccaactacacatcacctctgcagggggaccctccaggcaccagcagttcacacttgatgtggaaacgtatgaagagcctcatgggcgggacctgtcctttgatgcctgacaagaccatcagtgcgaacatggcccccggtaagcaggcctggcccaggggtctggtggagggttgaaggctcagagcacattccctgagccttgttagaatgggttatatccatgccatgagcaggatcccggttcagaggtctctacatgacttctgaaaaagaaagcaggctgagagcgctattgtctgccctaatgacagcaccacagttcactctctggcttggatcctccagatgaattcacccaaaaatctatgagaggcctgggccagccactgagacacctgccacctccccagccaccatctaccaggaactcaggggagaacgccaagactgggttcccgccacagtgctatgcctcccagttccaggactacggtcctccaggagctcaaaaggtgtcaggtgagtgctttggaactcccaccatagccagggtctgatgcaaacaggtggcctggctggccagagagctgagaggcagccacttgcaggaagcaactctgcatttggacaagactgccttcagagcccctgctcaggtctgatgcgactgcttacagtccatagggctcttcatcagccaagctgcatgagatggtttaggcaggaccaagtctcctctttattccagagcctgcatggtaccaggcccagaaaggatttgacaatgacttgttcaaagtacaaggaaggcccaggagggtgcaggctcctcattgatgagctgagattgtgtgagaaagtaagaaaggcctctttggctattgtccctgagaaagggcagagccacggttacttctggccaagcaggctccccagaaggtgggtctcaggctggggaagctttggtagaaggaagcggctggtatggcaagggccccagggctgtggtggacttctgagcaagacaagctcgctgccctggaaaggcaggctggaagattgtgcacggctctggaagggatcgtccagtaatcagtcagatcacatccgggctcttggccccgcaagaccaagagtctacatctttcctcagctgctcattgcctgaagtgtatacacataccgtaacaagctttctctgaaaggttgcacaggggactcactgatgggagggtagcctggtgatccagtaagttcagctattgccactgaaacacacaagtgttcccatagacgcctttgctcggcacaaacaatctgtggtttgagaaagaaaattccagagccttgtctacagtagcagagttggggaaaatttatagttgtgttcttagaattccatctgaagaacccaaaagccctgggctgatatttcagttctgttgtttaccagcaggtgggcttgcaagccagaagtcttaaaagagaaagtttaaagtttaaagagaggaccacacatcactcacccccggtatacacatctgggcagctgtagtcagcaaatgacaggtttccccagctgttgaatgcgaagcaaaactaatttcaacatagatcgtttctgcccatagaccgaaaggaggtgaatttaagaagggcagggcatctgttggtaggagtgcaggcaacgggaagtgtggaccccagaagggagagcacactgggacccagctctgtctctaaactgagagagctctgctctcgctccagccatctttggatctcaccactgctgtggcatgtcctcttctggctccgtcctctgaacaggggatggagccccagggccagagtgctgctgcatcggaagttgctggaagctggagacacagttgtttgcatgcatgccctttcctctggtcatctacagccagcggagcaggtgtgtgccagtcctctaaaacacccttcctctccctcctctcaggcgtggccagtcgactgctggggccatcgttcgagccttacctgttgccggaactgaccagatatgactgtgaggtgaacgtgcccgtgcctggaagctccacactcctgcaggggagagaccttctcagagctctggaccaggccacctgagccagggcctctggccgggcatgcccctgcctgccccgccgtcttgacctgccagcttcacttccatctgtgttgctattaggtatctctaacaccagcacacttcttacgagatgtactcaacctggcctactggccaggtcaccaagcagtggcctttatctgacatgctcactttattatccatgttttaaaaatacatagttgttgtacctgctatgttttaccgttgatgaaagtgttctgaaattttataagatttccccctccctccctcccttgaattacttctaatttatattccccaaag

SEQ ID NO: 271 - DNA, 3405 bp, Mus musculus
gcggccgcactcgcttgcccccggatttttttccaacttgctctcttcgagccatttttttttctttttttctttttctttttttctttttcttttttggttggttggttttgatttgtcagatcccagaaaagtgactcctgttcggggctaaacggaactccaggtcccttgtcgctgctctctcttttggcgtcttacaacctcctcccactcctttccccggccccgcctcctcctgcaggttcctccccgtcacccccctcctccctcctcctcctccgcacctagccagccctctgcaaacttccacctgattgagcgggactctcggacctgcgagcactaaagacctttcacacctgcccgggcgacagagagctgcggagggccacagcaaagagagcggctgcagcccctacggggttaaggaacccaggtgctccgggtctcggagggccacggcgacaatgacagctgacaaggagaaaaaaaggagcagctcagagctgaggaaggagaaatcccgtgatgccgcgaggtgccggcgcagcaaggagacggaggtcttctatgagttggctcatgagttgcccctgcctcacagtgtgagctcccacctggacaaagcctccatcatgcgcctggccatcagcttccttcggacacataagctcctgtcctcagtctgctctgaaaatgaatctgaagctgaggccgaccagcaaatggataacttgtacctgaaagccttggagggtttcattgctgtggtgacccaagacggtgacatgatctttctgtcggaaaacatcagcaagttcatgggacttacccaggtagaactaacaggacacagcatctttgacttcactcatccttgcgaccatgaggagatccgtgagaacctgactctcaaaaacggctctggttttgggaagaagagcaaagacgtgtccaccgagcgtgacttcttcatgaggatgaagtgcacagtcaccaacagaggccggactgtcaacctcaagtcggccacctggaaggtcctgcactgcaccgggcaagtgagagtctacaacaactgcccccctcacagtagtctctgtggctccaaggagcccctgctgtcctgccttatcatcatgtgtgagccaatccagcacccatcccacatggacatccccctggacagcaagactttcctgagccgccacagcatggacatgaagttcacctactgtgacgacagaatcttggaactgattggttaccaccccgaggagctacttggacgctctgcctatgagttctaccatgccctggattcggagaacatgaccaaaagtcaccagaacttgtgcaccaaggggcaggtggtatctggccagtaccggatgctagccaaacacggaggatatgtgtggctggagacccaggggacggtcatctacaacccccgcaacctgcagcctcagtgtatcatgtgtgtcaactatgtgctgagtgagatcgagaagaacgacgtggtgttctccatggaccagaccgaatccctgttcaagccacacctgatggccatgaacagcatctttgacagcagtgacgatgtggctgtaactgagaagagcaactacctgttcaccaaactgaaggaggagcccgaggaactggcccagttggcccccaccccaggagatgccattatttctctcgatttcggaagccagaacttcgatgaaccctcagcctatggcaaggccatccttcccccgggccagccatgggccgcggggctgaggagccacagtgcccagagcgagtccgggagcctgccagccttcactgtgccccaggcaggcaccccagggaacactacacccagtgcttcaagcagcagtagctgctccacgcccagcagccctgaggactactattcatccttggagaatcccttgaagatcgaagtgattgagaagcttttcgccatggacacggagccgagggacccgggcagtacccagacggacttcagtgaactggatttggagaccttggcaccctacatccctatggacggcgaggacttccagctgagccccatctgcccagaggagccgctcatgccagagagcccccagcccaccccccagcactgcttcagtaccatgaccagcatcttccagccgctcaccccgggggccacccacggccccttcttcctcgataagtacccgcagcagttggaaagcaggaagacagagtctgagcactggcccatgtcttccatcttctttgatgctgggagcaaagggtccctgtctccatgctgtggccaggccagcacccctctctcttctatggggggcagatccaacacgcagtggcccccggatccaccattacatttcggccctactaagtggcctgtgggtgatcagagtgctgaatccctgggagccctgccggtggggtcatcgcagttggaacctccgagcgccccgcctcatgtctccatgttcaagatgaggtctgcaaaggacttcggggcccgaggtccatacatgatgagcccagccatgatcgccctgtccaacaagctgaagctaaagcggcagctggagtatgaggagcaagccttccaagacacaagcgggggggaccctccaggcaccagcagttcacacttgatgtggaaacgtatgaagagcctcatgggcgggacctgtcctttgatgcctgacaagaccatcagtgcgaacatggcccccgatgaattcacccaaaaatctatgagaggcctgggccagccactgagacacctgccacctccccagccaccatctaccaggaactcaggggagaacgccaagactgggttcccgccacagtgctatgcctcccagttccaggactacggtcctccaggagctcaaaaggtgtcaggcgtggccagtcgactgctggggccatcgttcgagccttacctgttgccggaactgaccagatatgactgtgaggtgaacgtgcccgtgcctggaagctccacactcctgcaggggagagaccttctcagagctctggaccaggccacctgagccagggcctctggccgggcatgcccctgcctgccccgccgtcttgacctgccagcttcacttccatctgtgttgctattaggtatctctaacaccagcacacttcttacgagatgtactcaacctggcctactggccaggtcaccaagcagtggcctttatctgacatgctcactttattatccatgttttaaaaatacatagttgttgtacctgctatgttttaccgttgatgaaagtgttctgaaattttataagatttccccctccctccctcccttgaattacttctaatttatattccccaaag

SEQ ID NO: 272 - protein, 870 aa, Mus musculus
MTADKEKKRSSSELRKEKSRDAARCRRSKETEVFYELAHELPLPHSVSSHLDKASIMRLAISFLRTHKLLSSVCSENESEAEADQQMDNLYLKALEGFIAVVTQDGDMIFLSENISKFMGLTQVELTGHSIFDFTHPCDHEEIRENLTLKNGSGFGKKSKDVSTERDFFMRMKCTVTNRGRTVNLKSATWKVLHCTGQVRVYNNCPPHSSLCGSKEPLLSCLIIMCEPIQHPSHMDIPLDSKTFLSRHSMDMKFTYCDDRILIGYHPEELLGRSAYEFYHALDSENMTKSHQNLCTKGQVVSGQYRMLAKHGGYVWLETQGTVIYNPRNLQPQCIMCVNYVLSEIEKNDVVFSMDQTESLFKPHLMAMNSIFDSSDDVAVTEKSNYLFTKLKEEPEELAQLAPTPGDAIISLDFGSQNFDEPSAYGKAILPPGQPWAAGLRSHSAQSESGSLPAFTVPQAGTPGNTTPSASSSSSCSTPSSPEDYYSSLENPLKIEVIEKLFAMDTEPRDPGSTQTDFSELDLETLAPYIPMDGEDFQLSPICPEEPLMPESPQPTPQHCFSTMTSIFQPLTPGATHGPFFLDKYPQQLESRKTESEHWPMSSIFFDAGSKGSLSPCCGQASTPLSSMGGRSNTQWPPDPPLHFGPTKWPVGDQSAESLGALPVGSSQLEPPSAPPHVSMFKMRSAKDFGRPYMMSPAMIALSNKLKLKRQLEYEEQAFQDTSGGDPPGTSSSHLMWKRMKSLMGGTCPLMPDKTISANMAPDEFTQKSMRGLGQPLRHLPPPQPPSTRNSGENAKTGFPPQCYASQFQDYGPPGAQKVSGVASRLLGPSFEPYLLPELTRYDCEVNVPVPGSSTLLQGRDLLRALDQAT
